United States Patent Application Publication US 2007/0099251 A1 - sequence listing, part 3

SEQ ID NO: 9585 - protein, 950 aa, Homo sapiens
MLSSWQGGPRPRQLLLWLLILAAWETGSGQLHYSVPEEAKHGTFVGRIAQDLGLELAELVPRLFRVASKRHGDLLEVNLQNGILFVNSRIDREELCGRSAECSIHLEVIVDRPLQVFHVEVKVRDINDNPPIFPESKKRIIIAESRPPETRFPLDGASDADIGVNSALTYRLDPNDYFTLDAQNSLEQMSSLSLVLRKTLDREEIQEHSLLLTASDGGKPELTGTVQLLITILDVNDNAPEFYQSVYKVTVLENAFNGTLVIKLNATDPDDGTNGDIVYSFRRPVWPAVVYAFTINPNNGEIRTKGKLDFEEKKLYEISVEAVDKGNIPMAGHCTLLVEVLDVNDNAPEVTITSLSLPIREDTQPSAIIALISVSDRDSGSNGQVTCTLTPHVPFKLVSTYKNYYSLVLDSALDRESVSAYELVVTARDGGSPSLWATASVSVGVADVNDNAPAFAQPEYTVFVKENNPPGCHIFTVSAQDADAQENALVSYSLVERRVGERALSSYVSVHAESGKVYALQPLDHEELELLQFQVSARDSGVPPLGSNVTLQVFVLDENDNAPALLTPGAGSAGGTVSELMPRSVGAGHVVAKVRAVDADSGYNAWLSYELQLAAVGARIPFRVGLYTGEISTTRPLDEVDAPHHRLLVLVKDHGEPALTATATVLLSLVESGQAPQASSRASAGAVGPEAALVDVNVYLIIAICAVSSLLVLTLLLYTALRCSAPPTEGACAPGKPTLVCSSAAGSWSYSQQRRPRVCSGEGPHKTDLMAFSPSLPPCLGSAEGTGQREEDSECLKEPRQPNPDWRYSASLRAGMHSSVHLEEAGILRAGPGGPDQQWPTVSSATPEPEAGEVSPPVGAGVNSNSWTFKYGPGNPKQSGPGELPDKFIIPGSPAIISIRQEPTNSQIDKSDFITFGKKEETKKKKKKKKGNKTQEKKEKGNSTTDNSDQ

SEQ ID NO: 9586 - protein, 941 aa, Homo sapiens
MVIIGPRGPGSQRLLLSLLLLAAWEVGSGQLHYSVYEEAKHGTFVGRIAQDLGLELAELVPRLFRVASKRHGDLLEVNLQNGILFVNSRIDREKLCGRSAECSIHLEVIVDRPLQVFHVDVEVKDINDNPPVFREREQKVPVSESAPLDSHFPLEGASDADIGVNSLLTYALSLNENFELKIKTKKDKSILPELVLRKLLDREQTPKLNLLLMVIDGGKPELTGSVQIQITVLDVNDNGPAFDKPSYKVVLSENVQNDTRVIQLNASDPDEGLNGEISYGIKMILPVSEKCMFSINPDTGEIRIYGELDFEENNAYEIQVNAIDKGIPSMAGHSMVLVEVLDVNDNVPEVMVTSLSLPVQEDAQVGTVIALISVSDRDSGANGQVICSLTPHVPFKLVSTYKNYYSLVLDSALDRESVSAYELVVTARDGGSPSLWATARVSVEVADVNDNAPAFAQPEYTVFVKENNPPGCHIFTVSAWDADAQKNALVSYSLVERRVGEHALSSYVSVHAESGKVYALQPLDHEELELLQFQVSARDAGVPPLGSNVTLQVFVLDENDNAPALLATPAGSAGGAVSELVPRSVGAGHVVAKVRAVDADSGYNAWLSYELQPAAVGAHIPFHVGLYTGEISTTRILDEADAPRHRLLVLVKDHGEPALTSTATVLVSLVENGQAPKTSSRASVGAVDPEAALVDINVYLIIAICAVSSLLVLTLLLYTALRCSAPPTVSRCAPGKPTLVCSSAVGSWSYSQQRRQRVCSAESPPKTDLMAFSPSLQLSREDCLNPPSEPRQPNPDWRYSASLRAGMHSSVHLEEAGILRAGPGGPDQQWPTVSSATPEPEAGEVSPPVGAGVNSNSWTFKYGPGNPKQSGPGELPDKFIIPGSPAIISIRQEPTNSQIDKSDFITFGKKEETKKKKKKKKGNKTQEKKEKGNSTTDNSDQ

SEQ ID NO: 9587 - protein, 686 aa, Homo sapiens
MVFSRRGGLGARDLLLWLLLLAAWEVGSGQLHYSIPEEAKHGTFVGRVAQDLGLELAELVPRLFRVASKTHRDLLEVNLQNGILFVNSRIDREELCQWSAECSIHLELIADRPLQVFHVEVKVKDINDNPPVFRGREQIIFIPESRLLNSRFPIEGAADADIGANALLTYTLSPSDYFSLDVEASDELSKSLWLELRKYLDREETPELHLLLTATDGGKPELQGTVELLITVLDVNDNAPLFDQAVYRVHLLETTANGTLVTTLNASDADEGVNGEVVFSFDSGISRDIQEKFKVDSSSGEIRLIDKLDYEETKSYEIQVKAVDKGSPPMSNHCKVLVKVLDVNDNAPELAVTSLYLPIREDAPLSTVIALITVSDRDSGANGQVTCSLMPHVPFKLVSTFKNYYSLVLDSALDRESLSVYELVVTARDGGSPSLWATARVSVEVADVNDNAPAFAQPEYTVFVKENNPPGCHIFTVSARDADAQENALVSYSLVERRVGERALSNYVSVHAESGKVYALQPLDHEELELLQFQPRQPNPDWRYSASLRAGMHSSVHLEEAGILRAGPGGPDQQWPTVSSATPEPEAGEVSPPVGAGVNSNSWTFKYGPGNPKQSGPGELPDKFIIPGSPAIISIRQEPTNSQIDKSDFITFGKKEETKKKKKKKKGNKTQEKKEKGNSTTDNSDQ

SEQ ID NO: 9588 - protein, 950 aa, Homo sapiens
MVFSRRGGLGARDLLLWLLLLAAWEVGSGQLHYSIPEEAKHGTFVGRVAQDLGLELAELVPRLFRVASKTHRDLLEVNLQNGILFVNSRIDREELCQWSAECSIHLELIADRPLQVFHVEVKVKDINDNPPVFRGREQIIFIPESRLLNSRFPIEGAADADIGANALLTYTLSPSDYFSLDVEASDELSKSLWLELRKYLDREETPELHLLLTATDGGKPELQGTVELLITVLDVNDNAPLFDQAVYRVHLLETTANGTLVTTLNASDADEGVNGEVVFSFDSGISRDIQEKFKVDSSSGEIRLIDKLDYEETKSYEIQVKAVDKGSPPMSNHCKVLVKVLDVNDNAPELAVTSLYLPIREDAPLSTVIALITVSDRDSGANGQVTCSLMPHVPFKLVSTFKNYYSLVLDSALDRESLSVYELVVTARDGGSPSLWATARVSVEVADVNDNAPAFAQPEYTVFVKENNPPGCHIFTVSARDADAQENALVSYSLVERRVGERALSNYVSVHAESGKVYALQPLDHEELELLQFQVSARDAGVPPLGSNVTLQVFVLDENDNAPALLAPRVGGTIGAVSELVPRLVGAGHVVAKVRAVDADSGYNAWLSYELQPAAGGARIPFRVGLYTGEISTTRVLDEADLSRYRLLVLVKDHGEPALTATATVLVSLVESGQAPKASSRASVGVAGPEAALVDVNVYLIIAICAVSSLLVLTLLLYTALRCSVPPTEGAYVPGKPTLVCSSALGSWSNSQQRRQRVCSSEGPPKTDLMAFSPGLSPSLNTSERNEQPEANLDLSGNPRQPNPDWRYSASLRAGMHSSVHLEEAGILRAGPGGPDQQWPTVSSATPEPEAGEVSPPVGAGVNSNSWTFKYGPGNPKQSGPGELPDKFIIPGSPAIISIRQEPTNSQIDKSDFITFGKKEETKKKKKKKKGNKTQEKKEKGNSTTDNSDQ

SEQ ID NO: 9589 - protein, 936 aa, Homo sapiens
MVYSRRGSLGSRLLLLWLLLAYWKAGSGQLHYSIPEEAKHGTFVGRIAQDLGLELAELVPRLFRVASKGRGDLLEVNLQNGILFVNSRIDREELCRRRAECSIHLEVIVDRPLQVFHVEVAVKDINDNPPRFSRQEQRLFILESRMPDSRFPLEGASDLDIGANAQLRYRLNPNEYFDLDVKTNEEETNFLELVLRKSLDREETQEHRLLVIATDGGKPELTGTVQLLINVLDANDNAPEFDKSIYNVRLLENAPSGTLVIKLNASDADEGINKEIVYFFSNLVLDDVKSKFIINSNTGEIKVNGELDYEDYNSYEINIDAMDKSTFPLSGHCKVVVKLLDVNDNTPEMAITTLFLPVKEDAPLSTVIALISVSDRDSGANGQVTCSLMPHVPFKLVSTFKNYYSLVLDSALDRESVSVYELVVTARDGGSPSLWATASVSVEVADVNDNAPAFAQPQYTVFVKENNPPGCHIFTVSARDADAQENALVSYSLVERRVGERPLSSYVSVHAESGKVYALQPLDHEEVELLQFQVSARDAGVPPLGSNVTLQVFVLDENDNAPALLVPRVGGTGGAVSELVPRSVGAGHVVAKVRAVDPDSGYNAWLSYELQPAPGSARIPFRVGLYTGEISTTRSLDETEAPRHRLLVLVKDHGEPPLTATATVLVSLVESGQAPKASSRASAGAVGPEAALVDVNVYLIIAICAVSSLLVLTLLLYTALRCSAQPTEAVCTRGKPTLLCSSAVGSWSYSQQRRQRVCSGEAPPKTDLMAFSPSLPQGPTSTDNPRQPNPDWRYSASLRAGMHSSVHLEEAGILRAGPGGPDQQWPTVSSATPEPEAGEVSPPVGAGVNSNSWTFKYGPGNPKQSGPGELPDKFIIPGSPAIISIRQEPTNSQIDKSDFITFGKKEETKKKKKKKKGNKTQEKKEKGNSTTDNSDQ

SEQ ID NO: 9590 - protein, 685 aa, Homo sapiens
MVSRCSCLGVQCLLLSLLLLAAWEVGSGQLHYSVYEEARHGTFVGRIAQDLGLELAELVQRLFRVASKRHGDLLEVNLQNGILFVNSRIDREELCGRSVECSIHLEVIVDRPLQVFHVDVEVKDINDNPPRFSVTEQKLSIPESRLLDSRFPLEGASDADVGENALLTYKLSPNEYFVLDIINKKDKDKFPVLVLRKLLDREENPQLKLLLTATDGGKPEFTGSVSLLILVLDANDNAPIFDRPVYEVKMYENQVNQTLVIRLNASDSDEGINKEMMYSFSSLVPPTIRRKFWINERTGEIKVNDAIDFEDSNTYEIHVDVTDKGNPPMVGHCTVLVELLDENDNSPEVIVTSLSLPVKEDAQVGTVIALISVSDHDSGANGQVTCSLTPHVPFKLVSTYKNYYSLVLDSALDRERVSAYELVVTARDGGSPPLWATASVSVEVADVNDNAPAFAQSEYTVFVKENNPPGCHIFTVSAWDADAQENALVSYSLVERRLGERSLSSYVSVHAESGKVYALQPLDHEELELLQFQPRQPNPDWRYSASLRAGMHSSVHLEEAGILRAGPGGPDQQWPTVSSATPEPEAGEVSPPVGAGVNSNSWTFKYGPGNPKQSGPGELPDKFIIPGSPAIISIRQEPTNSQIDKSDFITFGKKEETKKKKKKKKGNKTQEKKEKGNSTTDNSDQ

SEQ ID NO: 9591 - protein, 950 aa, Homo sapiens
MDYHWRGELGSWRLLLLLLLLAAWKVGSGQLHYSVPEEAKHGTFVGRIAQDLGLELAELVPRLFRVASKRHRDLLEVSLQNGILFVNSRIDREELCGRSAECSIHLEVIVDRPLQVFHVDVEVKDVNDNPPVFRVKDQKLFVSESRMPDSRFPLEGASDADVGANSVLTYRLSSHDYFMLDVNSKNDENKLVELVLRKSLDREDAPAHHLFLTATDGGKPELTGTVQLLVTVLDVNDNAPTFEQSEYEVRIFENADNGTTVIKLNASDPDEGANGAISYSFNSLVETMVIDHFSIDRNTGEIVIRGNLDFEQENLYKILIDATDKGHPPMAGHCTVLVRILDKNDNVPEIALTSLSLPVREDAQFGTVIALISVNDLDSGANGQVTCSLMPHVPFKLVSTFKNYYSLVLDSALDRERVSAYELVVTARDGGSPSLWATASLSVEVADVNDNAPAFAQPEYTVFVKENNPPGCHIFTVSARDADAQENALVSYSLVERRVGERSLSSYISVHTESGKVYALQPLDHEELELLQFQVSARDAGVPPLGSNVTLQVFVLDENDNAPALLEPRVGGTGGAASKLVPRSVGAGHVVAKVRAVDADSGYNAWLSYELQPAASSPRIPFRVGLYTGEISTTRVLDEADSPRHRLLVLVKDHGEPALTATATVLVSLVESGQAPKASSRQSAGVLGPEAALVDVNVYLIIAICAVSSLLVLTLLLYTALRCSALPTEGGCRAGKPTLVCSSAVGSWSYSQQQPQRVCSGEGPPKTDLMAFSPCLPPDLGSVDVGEEQDLNVDHGLKPRQPNPDWRYSASLRAGMHSSVHLEEAGILRAGPGGPDQQWPTVSSATPEPEAGEVSPPVGAGVNSNSWTFKYGPGNPKQSGPGELPDKFIIPGSPAIISIRQEPTNSQIDKSDFITFGKKEETKKKKKKKKGNKTQEKKEKGNSTTDNSDQ

SEQ ID NO: 9592 - protein, 949 aa, Homo sapiens
MFGFQRRGLGTPRLQLWLLLLEFWEVGSGQLHYSVSEEAKHGTFVGRIAQDLGLELAELVQRLFRVASKTHGDLLEVNLQNGILFVNSRIDREELCGQSAECSIHLEVIVDRPLQVFHVNVEVKDINDNPPVFSLREQKLLIAESKQSDSRFPLEGASDADIEENALLTYRLSKNEYFSLDSPTNGKQIKRLSLILKKSLDREKTPELNLLLTATDGGKPELTGTVRLLVQVLDVNDNDPEFDKSEYKVSLMENAAKETLVLKLNATDRDEGVNGEVTYSLMSIKPNGRHLFTLDQNNGEVRVNGTLDYEENKFYKIEVQATDKGTPPMAGHCTVWVEILDTNDNSPEVAVTSLSLPVREDAQPSTVIALISVSDRDSGVNGQVTCSLTPHVPFKLVSTFKNYYSLVLDSALDRENVWAYELVVTARDGGSPSLWATARVSVEVADVNDNAPAFAQPEYTVFVKENNPPGCHIFTVSARDADAQENALVSYSLVERRLGDRALSSYVSVHAESGKVYALQPLDHEELELLQFQVSARDAGVPPLSSNVTLQVFVLDENDNAPALLATQAGSAGGAVNKLVPRSVGAGHVVAKVRAVDADSGYNAWLSYELQPAAGGSRIPFRVGLYTGEISTTRALDEADSPRHRLLVLVKDHGEPALTATATVLVSLVESGQAPKASSRTLAGAASPEAALVDVNVYLIIAICVVSSLLVLTLLLYTALWWSATPTEGACAPGKPTLVCSRAVGSWSYSQQRRQRVCSEEGPPKTDLMAFSPSLPLGLNKEEEGERQEPGSNHPGQPRQPNPDWRYSASLRAGMHSSVHLEEAGILRAGPGGPDQQWPTVSSATPEPEAGEVSPPVGAGVNSNSWTFKYGPGNPKQSGPGELPDKFIIPGSPAIISIRQEPTNSQIDKSDFITFGKKEETKKKKKKKKGNKTQEKKEKGNSTTDNSDQ

SEQ ID NO: 9593 - protein, 948 aa, Homo sapiens
MASSIRRGRGAWTRLLSLLLLAAWEVGSGQLRYSVPEEAKHGTFVGRIAQDLGLELEELVPRLFRVASKRHGDLLEVNLQNGILFVNSRIDREELCGRSAECSIHVEVIVDRPLQVFHVEVEVKDINDNPPIFPMTVKTIRFPESRLLDSRFPLEGASDADIGVNALLSYKLSSSEFFFLDIQANDELSESLSLVLGKSLDREETAEVNLLLVATDGGKPELTGTVQILIKVLDVNDNEPTFAQSVYKVKLLENTANGTLVVKLNASDADEGPNSEIVYSLGSDVSSTIQTKFTIDPISGEIRTKGKLDYEEAKSYEIQVTATDKGTPSMSGHCKISLKLVDINDNTPEVSITSLSLPISENASLGTVIALITVSDRDSGTNGHVTCSLTPHVPFKLVSTFKNYYSLVLDSALDRESVSAYELVVTARDGGSPSLWATTSVSIEVADVNDNAPAFAQPEYTVFVKENNPPGCHIFTVSAWDADAQENALVSYSLVERRVGERALSSYVSVHAESGKVYALQPLDHEEVELLQFQVSARDAGVPPLGSNVTLQVFVLDENDNAPALLAPRAGTAAGAVSELVPWSVGAGHVVAKVRAVDADSGYNAWLSYELQLGTGSARIPFRVGLYTGEISTTRALDEADSPRHRLLVLVKDHGEPALTATATVLVSLVESGQAPKASSRAWVGAAGSEATLVDVNVYLIIAICAVSSLLVLTVLLYTALRCSVPPTEGARAPGKPTLVCSSAVGSWSYSQQRRQRVCSGEDPPKTDLMAFSPSLSQGPDSAEEKQLSESEYVGKPRQPNPDWRYSASLRAGMHSSVHLEEAGILRAGPGGPDQQWPTVSSATPEPEAGEVSPPVGAGVNSNSWTFKYGPGNPKQSGPGELPDKFIIPGSPAIISIRQEPTNSQIDKSDFITFGKKEETKKKKKKKKGNKTQEKKEKGNSTTDNSDQ

SEQ ID NO: 9594 - protein, 686 aa, Homo sapiens
MVFTPEDRLGKQCLLLPLLLLAAWKVGSGQLHYSVPEEAKHGTFVGRIAQDLGLELAELVPRLFRMASKDREDLLEVNLQNGILFVNSRIDREELCGRSAECSIHLEVIVDRPLQVFHVDVEVRDINDNPPLFPVEEQRVLIYESRLPDSVFPLEGASDADVGSNSILTYKLSSSEYFGLDVKINSDDNKQIGLLLKKSLDREEAPAHNLFLTATDGGKPELTGTVQLLVTVLDVNDNAPTFEQSEYEVRIFENADNGTTVIRLNASDRDEGANGAISYSFNSLVAAMVIDHFSIDRNTGEIVIRGNLDFEQENLYKILIDATDKGHPPMAGHCTVLVRILDKNDNVPEIALTSLSLPVREDAQFGTVIALISVNDLDSGANGQVNCSLTPHVPFKLVSTFKNYYSLVLDSALDRESVSAYELVVTARDGGSPSLWATASLSVEVADMNDNAPAFAQPEYTVFVKENNPPGCHIFTVSARDADAQENALVSYSLVERRVGERALSSYISVHAESGKVYALQPLDHEELELLQFQVRQPNPDWRYSASLRAGMHSSVHLEEAGILRAGPGGPDQQWPTVSSATPEPEAGEVSPPVGAGVNSNSWTFKYGPGNPKQSGPGELPDKFIIPGSPAIISIRQEPTNSQIDKSDFITFGKKEETKKKKKKKKGNKTQEKKEKGNSTTDNSDQ

SEQ ID NO: 9595 - protein, 937 aa, Homo sapiens
MVCPNGYDPGGRHLLLFIIILAAWEAGRGQLHYSVPEEAKHGNFVGRIAQDLGLELAELVPRLFRAVCKFRGDLLEVNLQNGILFVNSRIDREELCGRSAECSIHLEVIVERPLQVFHVDVEVKDINDNPPVFPATQRNLFIAESRPLDSRFPLEGASDADIGENALLTYRLSPNEYFFLDVPTSNQQVKPLGLVLRKLLDREETPELHLLLTATDGGKPELTGTVQLLITVLDNNDNAPVFDRTLYTVKLPENVSIGTLVIHPNASDLDEGLNGDIIYSFSSDVSPDIKSKFHMDPLSGAITVIGHMDFEESRAHKIPVEAVDKGFPPLAGHCTVLVEVVDVNDNAPQLTLTSLSLPIPEDAQPGTVITLISVFDRDFGVNGQVTCSLTPRVPFKLVSTFKNYYSLVLDSALDRESVSAYELVVTARDGGSPSLWATASVSVEVADVNDNAPAFAQPEYTVFVKENNPPGCHIFTVSAGDADAQKNALVSYSLVELRVGERALSSYVSVHAESGKVYALQPLDHEELELLQFQVSARDAGVPPLGSNVTLQVFVLDENDNAPALLAPRVGGTGGAVRELVPRSVGAGHVVAKVRAVDADSGYNAWLSYELQPVAAGASIPFRVGLYTGEISTTRALDETDAPRHRLLVLVKDHGEPSLTATATVLVSLVESGQAPKASSRASLGIAGPETELVDVNVYLIIAICAVSSLLVLTLLLYTALRCSAPSSEGACSLVKPTLVCSSAVGSWSFSQQRRQRVCSGEGPPKTDLMAFSPSLPQGPSSTDNPRQPNPDWRYSASLRAGMHSSVHLEEAGILRAGPGGPDQQWPTVSSATPEPEAGEVSPPVGAGVNSNSWTFKYGPGNPKQSGPGELPDKFIIPGSPAIISIRQEPTNSQIDKSDFITFGKKEETKKKKKKKKGNKTQEKKEKGNSTTDNSDQ

SEQ ID NO: 9596 - protein, 950 aa, Homo sapiens
MLYSSRGDPEGQPLLLSLLILAMWVVGSGQLHYSVPEEAEHGTFVGRIAQDLGLELAELVPRLFQLDSKGRGDLLEVNLQNGILFVNSRIDREELCGRSAECSIHLEVIVDRPLQVFHVDVEVKDINDNPPVFPATQKNLFIAESRPLDSRFPLEGASDADIGENALLTYRLSPNEYFFLDVPTSNQQVKPLGLVLRKLLDREETPELHLLLTATDGGKPELTGTVQLLITVLDNNDNAPVFDRTLYTVKLPENVSIGTLVIHPNASDLDEGLNGDIIYSFSSDVSPDIKSKFHMDPLSGAITVIGHMDFEESRAHKIPVEAVDKGFPPLAGHCTLLVEVVDVNDNAPQLTIKTLSVPVKEDAQLGTVIALISVIDLDADANGQVTCSLTPHVPFKLVSTYKNYYSLVLDRALDRESVSAYELVVTARDGGSPSLWATARVSVEVADVNDNAPAFAQSEYTVFVKENNPPGCHIFTVSARDADAQENALVSYSLVERRLGERSLSSYVSVHAESGKVYALQPLDHEELELLQFQVSARDAGVPPLGSNVTLQVFVLDENDNAPALLTPRMRGTDGAVSEMVLRSVGAGVVVGKVRAVDADSGYNAWLSYELQPETASASIPFRVGLYTGEISTTRALDETDAPRQRLLVLVKDHGEPALTATATVLVSLVESGQAPKSSSRASVGATGPEVTLVDVNVYLIIAICAVSSLLVLTLLLYTVLRCSAMPTEGECAPGKPTLVCSSAVGSWSYSQQRRQRVCSGEGKQKTDLMAFSPGLSPCAGSTERTGEPSASSDSTGKPRQPNPDWRYSASLRAGMHSSVHLEEAGILRAGPGGPDQQWPTVSSATPEPEAGEVSPPVGAGVNSNSWTFKYGPGNPKQSGPGELPDKFIIPGSPAIISIRQEPTNSQIDKSDFITFGKKEETKKKKKKKKGNKTQEKKEKGNSTTDNSDQ

SEQ ID NO: 9597 - protein, 948 aa, Homo sapiens
MVSRCSCLGVQCLLLSLLLLAAWEVGSGQLHYSVYEEARHGTFVGRIAQDLGLELAELVQRLFRVASKRHGDLLEVNLQNGILFVNSRIDREELCGRSVECSIHLEVIVDRPLQVFHVDVEVKDINDNPPRFSVTEQKLSIPESRLLDSRFPLEGASDADVGENALLTYKLSPNEYFVLDIINKKDKDKFPVLVLRKLLDREENPQLKLLLTATDGGKPEFTGSVSLLILVLDANDNAPIFDRPVYEVKMYENQVNQTLVIRLNASDSDEGINKEMMYSFSSLVPPTIRRKFWINERTGEIKVNDAIDFEDSNTYEIHVDVTDKGNPPMVGHCTVLVELLDENDNSPEVIVTSLSLPVKEDAQVGTVIALISVSDHDSGANGQVTCSLTPHVPFKLVSTYKNYYSLVLDSALDRERVSAYELVVTARDGGSPPLWATASVSVEVADVNDNAPAFAQSEYTVFVKENNPPGCHIFTVSAWDADAQENALVSYSLVERRLGERSLSSYVSVHAESGKVYALQPLDHEELELLQFQVSARDGGVPPLGSNLTLQVFVLDENDNAPALLASPAGSAGGAVSELVLRSVVAGHVVAKVRAVDADSGYNAWLSYELQSAAVGARIPFRVGLYTGEISTTRALDETDSPRQRLLVLVKDHGEPSLTATATVLVSLVEGSQAPKASSRASVGVAPEVALVDVNVYLIIAICAVSSLLVLTLLLYTALRCSAAPTEGACGPVKPTLVCSSAVGSWSYSQQRRQRVCSGEGLPKADLMAFSPSLPPCPMVDVDGEDQSIGGDHSRKPRQPNPDWRYSASLRAGMHSSVHLEEAGILRAGPGGPDQQWPTVSSATPEPEAGEVSPPVGAGVNSNSWTFKYGPGNPKQSGPGELPDKFIIPGSPAIISIRQEPTNSQIDKSDFITFGKKEETKKKKKKKKGNKTQEKKEKGNSTTDNSDQ

SEQ ID NO: 9598 - protein, 947 aa, Homo sapiens
MEFSWGSGQESRRLLLLLLLLAAWEAGNGQLHYSVSEEAKHGTFVGRIAQDLGLELAELVPRLFRVASKGRGGLLEVNLQNGILFVNSRIDREELCRRSAECSIHLEVIVDRPLQVFHVDVEVRDINDNPPVFPATQKNLSIAESRPLDSRFPLEGASDADIGENALLTYRLSPNEYFSLEKPPDDELVKGLGLILRKSLDREEAPEIFLVLTATDGGKPELTGTVQLLITVLDANDNAPAFDRTIYKVRLLENVPNGTLVIKLNASDLDEGLNGDIVYSFSNDISPNVKSKFHIDPITGQIIVKGYIDFEESKSYEIIVEGIDKGQLPLSGHCRVIVEVEDNNDNVPDLEFKSLSLPIREDAPLGTVIALISVSDKDMGVNGLVTCSLTSHVPFKLVSTFKNYYSLVLDSALDRESVSAYELVVTARDGGSPSLWATASVSVEVADVNDNAPAFAQPEYTVFVKENNPPGCHIFTVSAWDADAQENALVSYSLVERRVGERALSSYVSVHAESGKVYALQPLDHEELELLQFQVTARDAGVPPLGSNVTLQVFVLDENDNAPALLAPRAGGTGGAVSELVPWSVGVGHVVAKVRAVDADSGYNAWLSYELQPGTGGARIPFRVGLYTGEISTTRALDETDAPRHRLLVLVKDHGEPALTATATVLVSLVESGQAPKASSRALVGAVGPDAALVDVNVYLIIAICAVSSLLVLTLLLYTALRCSALPTEGACAPGKPTLVCSSAVGSWSYSQQRRPRVCSGEGPPKTDLMAFSPSLPDSRDREDQLQTTEESFAKPRQPNPDWRYSASLRAGMHSSVHLEEAGILRAGPGGPDQQWPTVSSATPEPEAGEVSPPVGAGVNSNSWTFKYGPGNPKQSGPGELPDKFIIPGSPAIISIRQEPTNSQIDKSDFITFGKKEETKKKKKKKKGNKTQEKKEKGNSTTDNSDQ

SEQ ID NO: 9599 - protein, 950 aa, Homo sapiens
MVFTPEDRLGKQCLLLPLLLLAAWKVGSGQLHYSVPEEAKHGTFVGRIAQDLGLELAELVPRLFRMASKDREDLLEVNLQNGILFVNSRIDREELCGRSAECSIHLEVIVDRPLQVFHVDVEVRDINDNPPLFPVEEQRVLIYESRLPDSVFPLEGASDADVGSNSILTYKLSSSEYFGLDVKINSDDNKQIGLLLKKSLDREEAPAHNLFLTATDGGKPELTGTVQLLVTVLDVNDNAPTFEQSEYEVRIFENADNGTTVIRLNASDRDEGANGAISYSFNSLVAAMVIDHFSIDRNTGEIVIRGNLDFEQENLYKILIDATDKGHPPMAGHCTVLVRILDKNDNVPEIALTSLSLPVREDAQFGTVIALISVNDLDSGANGQVNCSLTPHVPFKLVSTFKNYYSLVLDSALDRESVSAYELVVTARDGGSPSLWATASLSVEVADMNDNAPAFAQPEYTVFVKENNPPGCHIFTVSARDADAQENALVSYSLVERRVGERALSSYISVHAESGKVYALQPLDHEELELLQFQVSARDAGVPPLGSNVTLQVFVLDENDNAPALLAPRVGGTGGAVSELVPRSLGAGQVVAKVRAVDADSGYNAWLSYELQPPASSARFPFRVGLYTGEISTTRVLDEADSPRHRLLVLVKDHGEPALTATATVLVSLVESGQAPKASSRASVGAAGPEAALVDVNVYLIIAICAVSSLLVLTLLLYTALRCSAPPTEGACTADKPTLVCSSAVGSWSYSQQRRQRVCSGEGPPKMDLMAFSPSLSPCPIMMGKAENQDLNEDHDAKPRQPNPDWRYSASLRAGMHSSVHLEEAGILRAGPGGPDQQWPTVSSATPEPEAGEVSPPVGAGVNSNSWTFKYGPGNPKQSGPGELPDKFIIPGSPAIISIRQEPTNSQIDKSDFITFGKKEETKKKKKKKKGNKTQEKKEKGNSTTDNSDQ

SEQ ID NO: 9600 - protein, 1836 aa, Homo sapiens
MARPSLCTLVPLGPECLRPFTRESLAAIEQRAVEEEARLQRNKQMEIEEPERKPRSDLEAGKNLPMIYGDPPPEVIGIPLEDLDPYYSNKKTFIVLNKGKAIFRFSATPALYLLSPFSVVRRGAIKVLIHALFSMFIMITILTNCVFMTMSDPPPWSKNVEYTFTGIYTFESLIKILARGFCVDDFTFLRDPWNWLDFSVIMMAYLTEFVDLGNISALRTFRVLRALKTITVIPGLKTIVGALIQSVKKLSDVMILTVFCLSVFALVGLQLFMGNLRQKCVRWPPPFNDTNTTWYSNDTWYGNDTWYGNEMWYGNDSWYANDTWNSHASWATNDTFDWDAYISDEGNFYFLEGSNDALLCGNSSDAGHCPEGYECIKTGRNPNYGYTSYDTFSWAFLALFRLMTQDYWENLFQLTLRAAGKTYMIFFVVIIFLGSFYLINLILAVVAMAYAEQNEATLAEDKEKEEEFQQMLEKFKKHQEELEKAKAAQALEGGEADGDPAHGKDCNGSLDTSQGEKGAPRQSGSGDSGISDAMEELEEAHQKCPPWWYKCAHKVLIWNCCAPWLKFKNIIHLIVMDPFVDLGITICIVLNTLFMAMEHYPMTEHFDNVLTVGNLVFTGIFTAEMVLKLIAMDPYEYFQQGWNIFDSIIVTLSLVELGLANVQGLSVLRSFRLLRVFKLAKSWPTLNMLIKIIGNSVGALGNLTLVLAIIVFIFAVVGMQLFGKSYKECVCKIALDCNLPRWHMHDFFHSFLIVFRILCGEWIETMWDCMEVAGQAMCLTVFLMVMVIGNLVVLNLFLALLLSSFSADSLAASDEDGEMNNLQIAIGRIKLGIGFAKAFLLGLLHGKILSPKDIMLSLGEADGAGEAGEAGETAPEDEKKEPPEEDLKKDNHILNHMGLADGPPSSLELDHLNFINNPYLTIQVPIASEESDLEMPTEEETDTFSEPEDSKKPPQPLYDGNSSVCSTADYKPPEEDPEEQAEENPEGEQPEECFTEACVQRWPCLYVDISQGRGKKWWTLRRACFKIVEHNWFETFIVFMILLSSGALAFEDIYIEQRRVIRTILEYADKVFTYIFIMEMLLKWVAYGFKVYFTNAWCWLDFLIVDVSIISLVANWLGYSELGPIKSLRTLRALRPLRALSRFEGMRVVVNALLGAIPSIMNVLLVCLIFWLIFSIMGVNLFAGKFYYCINTTTSERFDISEVNNKSECESLMHTGQVRWLNVKVNYDNVGLGYLSLLQVATFKGWMDIMYAAVDSREKEEQPQYEVNLYMYLYFVIFIIFGSFFTLNLFIGVIIDNFNQQKKKLGGKDIFMTEEQKKYYNAMKKLGSKKPQKPIPRPQNKIQGMVYDLVTKQAFDITIMILICLNMVTMMVETDNQSQLKVDILYNINMIFIIIFTGECVLKMLALRQYYFTVGWNIFDFVVVILSIVGLALSDLIQKYFVSPTLFRVIRLARIGRVLRLIRGAKGIRTLLFALMMSLPALFNIGLLLFLVMFIYSIFGMSNFAYVKKESGIDDMFNFETFGNSIICLFEITTSAGWDGLLNPILNSGPPDCDPNLENPGTSVKGDCGNPSIGICFFCSYIIISFLIVVNMYIAIILENFNVATEESSEPLGEDDFEMFYETWEKFDPDATQFIAYSRLSDFVDTLQEPLRIAKPNKIKLITLDLPMVPGDKIHCLDILFALTKEVLGDSGEMDALKQTMEEKFMAANPSKVSYEPITTTLKRKHEEVCAIKIQRAYRRHLLQRSMKQASYMYRHSHDGSGDDAPEKEGLLANTMSKMYGHENGNSSSPSPEEKGEAGDAGPTMGLMPISPSDTAWPPAPPPGQTVRPGVKESLV

SEQ ID NO: 9601 - protein, 1836 aa, Homo sapiens
MARPSLCTLVPLGPECLRPFTRESLAAIEQRAVEEEARLQRNKQMEIEEPERKPRSDLEAGKNLPMIYGDPPPEVIGIPLEDLDPYYSNKKTFIVLNKGKAIFRFSATPALYLLSPFSVVRRGAIKVLIHALFSMFIMITILTNCVFMTMSDPPPWSKNVEYTFTGIYTFESLIKILARGFCVDDFTFLRDPWNWLDFSVIMMAYLTEFVDLGNISALRTFRVLRALKTITVIPGLKTIVGALIQSVKKLSDVMILTVFCLSVFALVGLQLFMGNLRQKCVRWPPPFNDTNTTWYSNDTWYGNDTWYGNEMWYGNDSWYANDTWNSHASWATNDTFDWDAYISDEGNFYFLEGSNDALLCGNSSDAGHCPQGYECIKTGRNPNYGYTSYDTFSWAFLALFRLMTQDYWENLFQLTLRAAGKTYMIFFVVIIFLGSFYLINLILAVVAMAYAEQNEATLAEDKEKEEEFQQMLEKFKKHQEELEKAKAAQALEGGEADGDPAHGKDCNGSLDTSQGEKGAPRQSGSGDSGISDAMEELEEAHQKCPPWWYKCAHKVLIWNCCAPWLKFKNIIHLIVMDPFVDLGITICIVLNTLFMAMEHYPMTEHFDNVLTVGNLVFTGIFTAEMVLKLIAMDPYEYFQQGWNIFDSIIVTLSLVELGLANVQGLSVLRSFRLLRVFKLAKSWPTLNMLIKIIGNSVGALGNLTLVLAIIVFIFAVVGMQLFGKSYKECVCKIALDCNLPRWHMHDFFHSFLIVFRILCGEWIETMWDCMEVAGQAMCLTVFLMVMVIGNLVVLNLFLALLLSSFSADSLAASDEDGEMNNLQIAIGRIKLGIGFAKAFLLGLLHGKILSPKDIMLSLGEADGAGEAGEGGETAPEDEKKEPPEEDLKKDNHILNHMGLADGPPSSLELDHLNFINNPYLTIQVPIASEESDLEMPTEEETDTFSEPEDSKKPPQPLYDGNSSVCSTADYKPPEEDPEEQAEENPEGEQPEECFTEACVQRWPCLYVDISQGRGKKWWTLRRACFKIVEHNWFETFIVFMILLSSGALAFEDIYIEQRRVIRTILEYADKVFTYIFIMEMLLKWVAYGFKVYFTNAWCWLDFLIVDVSIISLVANWLGYSELGPIKSLRTLRALRPLRALSRFEGMRVVVKPLLGAIPSIMNVLLVCLIFWLIFSIMGVNLFAGKFYYCINTTTSERFDISEVNNKSECESLMHTGQVRWLNVKVNYDNVGLGYLSLLQVATFKGWMDIMYAAVDSREKEEQPQYEVNLYMYLYFVIFIIFGSFFTLNLFIGVIIDNFNQQKKKLGGKDIFMTEEQKKYYNAMKKLGSKKPQKPIPRPQNKIQGMVYDLVTKQAFDITIMILICLNMVTMMVETDDQSQLKVDILYNINMIFIIIFTGECVLKMLALRQYYFTVGWNIFDFVVVILSIVGLALSDLIQKYFVSPTLFRVIRLARIGRVLRLIRGAKGIRTLLFALMMSLPALFNIGLLLFLVMFIYSIFGMSNFAYVKKESGIDDMFNFETFGNSIICLFEITTSAGWDGLLNPILNSGPPDCDPNLENPGTSVKGDCGNPSIGICFFCSYIIISFLIVVNMYIAIILENFNVATEESSEPLGEDDFEMFYETWEKFDPDATQFIAYSRLSDFVDTLQEPLRIAKPNKIKLITLDLPMVPGDKIHCLDILFALTKEVLGDSGEMDALKQTMEEKFMAANPSKVSYEPITTTLKRKHEEVCAIKIQRAYRRHLLQRSMKQASYMYRHSHDGSGDDAPEKEGLLANTMSKMYGHENGNSSSPSPEEKGEAGDAGPTMGLMPISPSDTAWPPAPPPGQTVRPGVKESLV

SEQ ID NO: 9602 - protein, 1098 aa, Homo sapiens
  VARIANT 261: Xaa = Any Amino Acid
MPTHRHASSSLFGSSADNMRGLRSSTRMILVLPEPSPESPSGIVKISQATFSGLAGQLTSLTTTGKASFRDFTSSILKMIVSVINQLLVAYTIQSAMGWVSGGAKASSAGQSFAVQSYRPQGFDVGGFTGHGGKYEPAGIVHRGEFVFTKESTSRIGVANLYRLMRGYASGGLVGGGNAAGAGMGGISVYAPVSISQQGSDGSINQANAHGDGETAAGDCSADNHRATEKRNVRGRACFIRGGHSDGHVYLAHAKNSAGHXNSPNAAGPETWNLDWTGTRQEAAALRAFLMSHVTKSFWWTTPWGEKKLFRMKADSCLRAAFFYGGSMSFTADIQQLEPGSVIQLIEIDGTEFGMDQVLRFHAHNIQEEGWAAFAAENLPAIIWQGNQYDPHPYELKGMELSSTGSQPTPTLSVGNVGNYVTALCLEYDDMVRAKVKIHTTLSKYLDAANWKNGNPGASPADERVQLFYVNAKTAETRVQVDFELCSPFDIQSLQLPTRQITPVCTWCMRGWYRSGTGCDYNGTKYFTKDGTPTDDPSKDHVAAEYPKEACGLIVQSGQQQIFIPCRNIADKPEETFTLSPEDQLAARARGEIIMLIHSHPDVVRLVPSELDRIQCDWSGIEWGIMSWPDGDFCTISPREDRDYAGRQWVLGYADCWSLIREFYLREYGIVLGNYSVPYEWWESGKERLYDDNWEREGFVEIDAGAMQPGDIIMMSVQASVTNHAADIWVITSFSIIFLGTFLRERLMENIIATERSGWSGIRTECMVKTLILEGKMAKKFGKRVQFDVADLREMLRAMCSQVPGFKKYMSEAHMKGIRFAFFNGGNNIGLEEFDMTRGGSVYRIVPVYEGAKSSGVLQIVVGAVALVAAFFTAGASMAAWGAAMSATAISATSILTGVGVSMMLGGVVQMLTPQPSFGAGKSSSTDNTPNYAFGAPVNTVAMGHPVPLAYGLIEAGGAIVSAGCAPQNQNNNLQKQYADLANCQEDNITMPKQMPHSKKEFAEFLSKEALNASADQFVTQKRIEILQLVGWDNSVADAITTCGATRKSKLKEIGSNVFETMKANTKDTEERRALVEAYSSWEAYVTSQTPLAKQDFD

SEQ ID NO: 9603 - protein, 324 aa, Homo sapiens
MGMSNLTRLSEFILLGLSSRSEDQRPLFALFLIIYLVTLMGNLLIILAIHSDPRLQNPMYFFLSILSFADICYTTVIVPKMLVNFLSEKKTISYAECLAQMYFFLVFGNIDSYLLAAMAINRCVAICNPFHYVTVMNRRCCVLLLAFPITFSYFHSLLHVLLVNRLTFCTSNVIHHFFCDVNPVLKLSCSSTFVNEIVAMTEGLASVMAPFVCIIISYLRILIAVLKIPSAAGKHKAFSTCSSHLTVVILFYGSISYVYLQPLSSYTVKDRIATINYTVLTSVLNPFIYSLRNKDMKRGLQKLINKIKSQMSRFSTKTNKICGP

SEQ ID NO: 9604 - protein, 1278 aa, Homo sapiens
MTARGLALGLLLLLLCPAQVFSQSCVWYGECGIAYGDKRYNCEYSGPPKPLPKDGYDLVQELCPGFFFGNVSLCCDVRQLQTLKDNLQLPLQFLSRCPSCFYNLLNLFCELTCSPRQSQFLNVTATEDYVDPVTNQTKTNVKELQYYVGQSFANAMYNACRDVEAPSSNDKALGLLCGKDADACNATNWIEYMFNKDNGQAPFTITPVFSDFPVHGMEPMNNATKGCDESVDEVTAPCSCQDCSIVCGPKPQPPPPPAPWTILGLDAMYVIMWITYMAFLLVFFGAFFAVWCYRKRYFVSEYTPIDSNIAFSVNASDKGEASCCDPVSAAFEGCLRRLFTRWGSFCVRNPGCVIFFSLVFITACSSGLVFVRVTTNPVDLWSAPSSQARLEKEYFDQHFGPFFRTEQLIIRAPLTDKHIYQPYPSGADVPFGPPLDIQILHQVLDLQIAIENITASYDNETVTLQDICLAPLSPYNTNCTILSVLNYFQNSHSVLDHKKGDDFFVYADYHTHFLYCVRAPASLNDTSLLHDPCLGTFGGPVFPWLVLGGYDDQNYNNATALVITFPVNNYYNDTEKLQRAQAWEKEFINFVKNYKNPNLTISFTAERSIEDELNRESDSDVFTVVISYAIMFLYISLALGHIKSCRRLLVDSKVSLGIAGILIVLSSVACSLGVFSYIGLPLTLIVIEVIPFLVLAVGVDNIFILVQAYQRDERLQGETLDQQLGRVLGEVAPSMFLSSFSETVAFFLGALSVMPAVHTFSLFAGLAVFIDFLLQITCFVSLLGLDIKRQEKNRLDIFCCVRGAEDGTSVQASESCLFRFFKNSYSPLLLKDWMRPIVIAIFVGVLSFSIAVLNKVDIGLDQSLSMPDDSYMVDYFKSISQYLHAGPPVYFVLEEGHDYTSSKGQNMVCGGMGCNNDSLVQQIFNAAQLDNYTRIGFAPSSWIDDYFDWVKPQSSCCRVDNITDQFCNASVVDPACVRCRPLTPEGKQRPQGGDFMRFLPMFLSDNPNPKCGKGGHAAYSSAVNILLGHGTRVGATYFMTYHTVLQTSADFIDALKKARLIASNVTETMGINGSAYRVFPYSVFYVFYEQYLTIIDDTIFNLGVSLGAIFLVTMVLLGCELWSAVIMCATIAMVLVNMFGVMWLWGISLNAVSLVNLVMSCGISVEFCSHITRAFTVSMKGSRVERAEEALAHMGSSVFSGITLTKFGGIVVLAFAKSQIFQIFYFRMYLAMVLLGATHGLIFLPVLLSYIGPSVNKAKSCATEERYKGTERERLLNF

SEQ ID NO: 9605 - protein, 208 aa, Homo sapiens [sequence omitted]

SEQ ID NO: 9606 - protein, 461 aa, Homo sapiens
MGTIHLFRKPQRSFFGKLLREFRLVAADRRSWKILLFGVINLICTGFLLMWCSSTNSIALTAYTYLTIFDLFSLMTCLISYWVTLRKPSPVYSFGFERLEVLAVFASTVLAQLGALFILKESAERFLEQPEIHTGRLLVGTFVALCFNLFTMLSIRNKPFAYVSEAASTSWLQEHVADLSRSLCGIIPGLSSIFLPRMNPFVLIDLAGAFALCITYMLIEINNYFAVDTASAIAIALMTFGTMYPMSVYSGKVLLQTTPPHVIGQLDKLIREVSTLDGVLEVRNEHFWTLGFGSLAGSVHVRIRRDANEQMVLAHVTNRLYTLVSTLTVQIFKDDWIRPALLSGPVAANVLNFSDHHVIPMPLLKGTDDLNPVTSTPAKPSSPPPEFSFNTPGKNVNPVILLNTQTRPYGFGLNHGHTPYSSMLNQGLGVPGIGATQGLRTGFTNIPSRYGTNNRIGQPRP

SEQ ID NO: 9607 - protein, 532 aa, Homo sapiens
MEGDSYHNATTVNGTPVNHQPLERHRLWEVITIAAVTAVVSLITIVGNVLVMISFKVNSQLKTVNNYYLLSLACADLIIGIFSMNLYTTYILMGRWALGSLACDLWLALDYVASNASVMNLLVISFDRYFSITRPLTYRAKRTPKRAGIMIGLAWLISFILWAPAILCWQYLVGKRTVPLDECQIQFLSEPTITFGTAIAAFYIPVSVMTILYCRIYRETEKRTKDLADLQGSDSVTKAEKRKPAHRALFRSCLRCPRPTLAQRERNQASWSSSRRSTSTTGKPSQATGPSANWAKAEQLTTCSSYPSSEDEDKPATDPVLQVVYKSQGKESPGEEFSAEETEETFVKAETEKSDYDTPNYLLSPAAAHRPKSQKCVAYKFRLVVKADGNQETNNGCHKVKIMPCPFPVAKEPSTKGLNPNPSHQMTKRKRVVLVKERKAAQTLSAILLAFIITWTPYNIMVLVSTFCDKCVPVTLWHLGYWLCYVNSTVNPICYALCNRTFRKTFKMLLLCRWKKKKVEEKLYWQGNSKLP

SEQ ID NO: 9608 - protein, 555 aa, Homo sapiens
MESTPFSGVANQIHTLCERPTYGEVKDGALDVKRQHKCPGPTSGPSPGTNLSGCIRMNDDPSMEENGVERVCPESLLQSRGYSSLPLPRHTSSTDGTITSSDPGLEILNMASCDLDRNSLCKKEEDTRSASPTIEAQGTSPAHDNIAFQDSTSKDKTILNLEAKEEPETIEEHKKEHASGDSVVSPLPVTTVKSVNVRQSENTSANEKEVEAEFLRLSLGFKCDWFTLEKRVKLEERSRDWAEENLKKEITNSLKLLESLTPLCEDDNQAQEIIKKLEKSIKFLSQCAARVASRAEMLGAINQESRVSKAVEVMIQHVENLKRMYAKEHAELEELKQVLLQNERSFNPLEDDDDCQIKKRSASLNSKPSSLRRVTIASLPRNIGNAGMVAGMENNDRFSRRSSSWRILGSKQSEHRPSLPRFISTYSWADAEEEKCELKTKDDSEPSGEETVERTRKPSLSEKKNNPSKWDVSSVYDTIASWATNLKSSIRKANKALWLSIAFIVLFAALMSFLTGQLFQKSVDAAPTQQEDSWTSLEHILWPFTRLRHNGPPPV

SEQ ID NO: 9609 - protein, 1137 aa, Homo sapiens
MKVKEEKAGVGKLDHTNHRRRFPDQKECPPIHIGLPVPTYPQRKTDQKGHLSGLQKVHWGLRPDQPQQELTGPGSGASSQDSSMDLISRTRSPAAEQLQDILGEEDEAPNPTLFTEMDTLQHDGDQMEWKESARWIKFEEKVEEGGERWSKPHVSTLSLHSLFELRTCLQTGTVLLDLDSGSLPQIIDDVIEKQIEDGLLRPELRERVSYVLLRRHRHQTKKPIHRSLADIGKSVSTTNRSPARSPGAGPSLHHSTEDLRMRQSANYGRLCHAQSRSMNDISLTPNTDQRKNKFMKKIPKDSEASNVLVGEVDFLDQPFIAFVRLIQSAMLGGVTEVPVPTRFLFILLGPSGRAKSYNEIGRAIATLMVDDLFSDVAYKARNREDLIAGIDEFLDEVIVLPPGEWDPNIRIEPPKKVPSADKRKSVFSLAELGQMNGSVGGGGGAPGGGNGGGGGGGSGGGAGSGGAGGTSSGDDGEMPAMHEIGEELIWTGRFFGGLCLDIKRKLPWFPSDFYDGFHIQSISAILFIYLGCITNAITFGGLLGDATDNYQGVMESFLGTAMAGSLFCLFSGQPLIILSSTGPILIFEKLLFDFSKGNGLDYMEFRLWIGLHSAVQCLILVATDASFIIKYITRFTEEGFSTLISFIFIYDAIKKMIGAFKYYPINMDFKPNFITTYKCECVAPDTVNTTVFNASAPLAPDTNASLYNLLNLTALDWSLLSKKECLSYGGRLLGNSCKFIPDLALMSFILFFGTYSMTLTLKKFKFSRYFPTKVRALVADFSIVFSILMFCGIDACFGLETPKLHVPSVIKPPRPDRGWFVAPFGKNPWWVYPASILPALLVTILIFMDQQITAVIVNRKENKLKKAAGYHLDLFWVGILMALCSFMGLPWYVAATVISIAHIDSLKMETETSAPGEQPQFLGVREQRVTGIIVFILTGISVFLAPILKCIPLPVLYGVFLYMGVASLNGIQMGTGGSEFKIQKKLTPFWERCKLFLMPAKHQPDHAFLRHVPLRRIHLFTLVQILCLAVLWILKSTVAAIIFPVMILGLIIVRRLLDFIFSQHDLAWIDNILPEKEKKETDKKRKRKKGAHEDCDEEPQFPPPSVIKIPMESVQSDPQNGIHCIARKRSSSWSYSL

SEQ ID NO: 9610 - protein, 1040 aa, Homo sapiens
MKVKEEKAGVGKLDHTNHRRRFPDQKECPPIHIGLPVPTYPQRKTDQKGHLSGLQKVHWGLRPDQPQQELTGPGSGASSQDSSMDLISRTRSPAAEQLQDILGEEDEAPNPTLFTEMDTLQHDGDQMEWKESARWIKFEEKVEEGGERWSKPHVSTLSLHSLFELRTCLQTGTVLLDLDSGSLPQIIDDVIEKQIEDGLLRPELRERVSYVLLRRHRHQTKKPIHRSLADIGKSVSTTNRSPARSPGAGPSLHHSTEDLRMRQSANYGRLCHAQSRSMNDISLTPNTDQRKNKFMKKIPKDSEASNVLVGEVDFLDQPFIAFVRLIQSAMLGGVTEVPVPTRFLFILLGPSGRAKSYNEIGRAIATLMVDDLFSDVAYKARNREDLIAGIDEFLDEVIVLPPGEWDPNIRIEPPKKVPSADKRKSVFSLAELGQMNGSVGGGGGAPGGGNGGGGGGGSGGGAGSGGAGGTSSGDDGEMPAMHEIGEELIWTGRFFGGLCLDIKRKLPWFPSDFYDGFHIQSISAILFIYLGCITNAITFGGLLGDATDNYQGVMESFLGTAMAGSLFCLFSGQPLIILSSTGPILIFEKLLFDFSKGNGLDYMEFRLWIGLHSAVQCLILVATDASFIIKYITRFTEEGFSTLISFIFIYDAIKKMIGAFKYYPINMDFKPNFITTYKCECVAPDTVNTTVFNASAPLAPDTNASLYNLLNLTALDWSLLSKKECLSYGGRLLGNSCKFIPDLALMSFILFFGTYSMTLTLKKFKFSRYFPTKVRALVADFSIVFSILMFCGIDACFGLETPKLHVPSVIKPTRPDRGWFVAPFGKNPWWVYPASILPALLVTILIFMDQQITAVIVNRKENKLKKAAGYHLDLFWVGILMALCSFMGLPWYVAATVISIAHIDSLKMETETSAPGEQPQFLGVREQRVTGIIVFILTGISVFLAPILKILGLIIVRRLLDFIFSQHDLAWIDNILPEKEKKETDKKRKRKKGAHEDCDEEPQFPPPSVIKIPMESVQSDPQNGIHCIARKRSSSWSYSL

SEQ ID NO: 9611 - protein, 1074 aa, Homo sapiens
MKVKEEKAGVGKLDHTNHRRRFPDQKECPPIHIGLPVPTYPQRKTDQKGHLSGLQKVHWGLRPDQPQQELTGPGSGASSQDSSMDLISRTRSPAAEQLQDILGEEDEAPNPTLFTEMDTLQHDGDQMEWKESARWIKFEEKVEEGGERWSKPHVSTLSLHSLFELRTCLQTGTVLLDLDSGSLPQIIDDVIEKQIEDGLLRPELRERVSYVLLRRHRHQTKKPIHRSLADIGKSVSTTNRSPARSPGAGPSLHHSTEDLRMRQSANYGRLCHAQSRSMNDISLTPNTDQRKNKFMKKIPKDSEASNVLVGEVDFLDQPFIAFVRLIQSAMLGGVTEVPVPTRFLFILLGPSGRAKSYNEIGRAIATLMVDDLFSDVAYKARNREDLIAGIDEFLDEVIVLPPGEWDPNIRIEPPKKVPSADKRKSVFSLAELGQMNGSVGGGGGAPGGGNGGGGGGGSGGGAGSGGAGGTSSGDDGEMPAMHEIGEELIWTGRFFGGLCLDIKRKLPWFPSDFYDGFHIQSISAILFIYLGCITNAITFGGLLGDATDNYQGVMESFLGTAMAGSLFCLFSGQPLIILSSTGPILIFEKLLFDFSKGNGLDYMEFRLWIGLHSAVQCLILVATDASFIIKYITRFTEEGFSTLISFIFIYDAIKKMIGAFKYYPINMDFKPNFITTYKCECVAPDTVNTTVFNASAPLAPDTNASLYNLLNLTALDWSLLSKKECLSYGGRLLGNSCKFIPDLALMSFILFFGTYSMTLTLKKFKFSRYFPTKVRALVADFSIVFSILMFCGIDACFGLETPKLHVPSVIKPTRPDRGWFVAPFGKNPWWVYPASILPALLVTILIFMDQQITAVIVNRKENKLKKAAGYHLDLFWVGILMALCSFMGLPWYVAATVISIAHIDSLKMETETSAPGEQPQFLGVREQRVTGIIVFILTGISVFLAPILKCIPLPVLYGVFLYMGVASLNGIQMGTGGSEFKIQKKLTPFWERCKLFLMPAKHQPDHAFLRHVPLRRIHLFTLVQILCLAVLWILKSTVAAIIFPVMSLSTTDPGPHHRSKASGFHLFPARPGLD

SEQ ID NO: 9612 - protein, 1121 aa, Homo sapiens
MKVKEEKAGVGKLDHTNHRRRFPDQKECPPIHIGLPVPTYPQRKTDQKGHLSGLQKVHWGLRPDQPQQELTGPGSGASSQDSSMDLISRTRSPAAEQLQDILGEEDEAPNPTLFTEMDTLQHDGDQMEWKESARWIKFEEKVEEGGERWSKPHVSTLSLHSLFELRTCLQTGTVLLDLDSGSLPQIIDDVIEKQIEDGLLRPELRERVSYVLLRRHRHQTKKPIHRSLADIGKSVSTTNRSPARSPGAGPSLHHSTEDLRMRQSANYGRLCHAQSRSMNDISLTPNTDQRKNKFMKKIPKDSEASNVLVGEVDFLDQPFIAFVRLIQSAMLGGVTEVPVPTRFLFILLGPSGRAKSYNEIGRAIATLMVDDLFSDVAYKARNREDLIAGIDEFLDEVIVLPPGEWDPNIRIEPPKKVPSADKRKSVFSLAELGQMNGSVGGGGGAPGGGNGGGGGGGSGGGAGSGGAGGTSSGDDGEMPAMHEIGEELIWTGRFFGGLCLDIKRKLPWFPSDFYDGFHIQSISAILFIYLGCITNAITFGGLLGDATDNYQGVMESFLGTAMAGSLFCLFSGQPLIILSSTGPILIFEKLLFDFSKGNGLDYMEFRLWIGLHSAVQCLILVATDASFIIKYITRFTEEGFSTLISFIFIYDAIKKMIGAFKYYPINMDFKPNFITTYKCECVAPDTVNTTVFNASAPLAPDTNASLYNLLNLTALDWSLLSKKECLSYGGRLLGNSCKFIPDLALMSFILFFGTYSMTLTLKKFKFSRYFPTKVRALVADFSIVFSILMFCGIDACFGLETPKLHVPSVIKPTRPDRGWFVAPFGKNPWWVYPASILPALLVTILIFMDQQITAVIVNRKENKLKKAAGYHLDLFWVGILMALCSFMGLPWYVAATVISIAHIDSLKMETETSAPGEQPQFLGVREQRVTGIIVFILTGISVFLAPILKCIPLPVLYGVFLYMGVASLNGIQFWERCKLFLMPAKHQPDHAFLRHVPLRRIHLFTLVQILCLAVLWILKSTVAAIIFPVMILGLIIVRRLLDFIFSQHDLAWIDNILPEKEKKETDKKRKRKKGAHEDCDEEPQFPPPSVIKIPMESVQSDPQNGIHCIARKRSSSWSYSL

SEQ ID NO: 9613 - protein, 425 aa, Homo sapiens
MGPRRLLLVAACFSLCGPLLSARTRARRPESKATNATLDPRSFLLRNPNDKYEPFWEDEEKNESGLTEYRLVSINKSSPLQKQLPAFISEDASGYLTSSWLTLFVPSVYTGVFVVSLPLNIMAIVVFILKMKVKKPAVVYMLHLATADVLFVSVLPFKISYYFSGSDWQFGSELCRFVTAAFYCNMYASILLMTVISIDRFLAVVYPMQSLSWRTLGRASFTCLAIWALAIAGVVPLLLKEQTIQVPGLNITTCHDVLNETLLEGYYAYYFSAFSAVFFFVPLIISTVCYVSIIRCLSSSAVANRSKKSRALFLSAAVFCIFIICFGPTNVLLIAHYSFLSHTSTTEAAYFAYLLCVCVSSISCCIDPLIYYYASSECQRYVYSILCCKESSDPSSYNSSGQLMASKMDTCSSNLNNSIYKKLLT

SEQ ID NO: 9614 - protein, 1204 aa, Homo sapiens
MAAAAAVGNAVPCGARPCGVRPDGQPKPGPQPRALLAAGPALIANGDELVAAVWPYRRLALLRRLTVLPFAGLLYPAWLGAAAAGCWGWGSSWVQIPEAALLVLATICLAHALTVLSGHWSVHAHCALTCTPEYDPSKATFVKVVPTPNNGSTELVALHRNEGEDGLEVLSFEFQKIKYSYDALEKKQFLPVAFPVGNAFSYYQSNRGFQEDSEIRAAEKKFGSNKAEMVVPDFSELFKERATAPFFVFQVFCVGLWCLDEYWYYSVFTLSMLVAFEASLVQQQMRNMSEIRKMGNKPHMIQVYRSRKWRPIASDEIVPGDIVSIGRSPQENLVPCDVLLLRGRCIVDEAMLTGESVPQMKEPIEDLSPDRVLDLQADSRLHVIFGGTKVVQHIPPQKATTGLKPVDSGCVAYVLRTGFNTSQGKLLRTILFGVKRVTANNLETFIFILFLLVFAIAAAAYVWIEGTKDPSRNRYKLFLECTLILTSVVPPELPIELSLAVNTSLIALAKLYMYCTEPFRIPFAGKVEVCCFDKTGTLTSDSLVVRGVAGLRDGKEVTPVSSIPVETHRALASCHSLMQLDDGTLVGDPLEKAMLTAVDWTLTKDEKVFPRSIKTQGLKIHQRFHFASALKRMSVLASYEKLGSTDLCYIAAVKGAPETLHSMFSQCPPDYHHIHTEISREGARVLALGYKELGHLTHQQAREVKREALECSLKFVGFIVVSCPLKADSKAVIREIQNASHRVVMITGDNPLTACHVAQELHFIEKAHTLILQPPSEKGRQCEWRSIDGSIVLPLARGSPKALALEYALCLTGDGLAHLQATDPQQLLRLIPHVQVFARVAPKQKEFVITSLKELGYVTLMCGDGTNDVGALKHADVGVALLANAPERVVERRRRPRDSPTLSNSGIRATSRTAKQRSGLPPSEEQPTSQRDRLSQVLRDLEDESTPIVKLGDASIAAPFTSKLSSIQCICHVIKQGRCTLVTTLQMFKILALNALILAYSQSVLYLEGVKFSDFQATLQGLLLAGCFLFISRSKPLKTLSRERPLPNIFNLYTILTVMLQFFVHFLSLVYLYREAQARSPEKQEQFVDLYKEFEPSLVNSTVYIMAMAMQMATFAINYKGPPFMESLPENKPLVWSLAVSLLAIIGLLLGSSPDFNSQFGLVDIPVEFKLVIAQVLLLDFCLALLADRVLQFFLGTPKLKVPS

SEQ ID NO: 9615 - protein, 1086 aa, Homo sapiens
MEKWEELNSHQPGEEYDPSKATFVKVVPTPNNGSTELVALHRNEGEDGLEVLSFEFQKIKYSYDALEKKQFLPVAFPVGNAFSYYQSNRGFQEDSEIRAAEKKFGSNKAEMVVPDFSELFKERATAPFFVFQVFCVGLWCLDEYWYYSVFTLSMLVAFEASLVQQQMRNMSEIRKMGNKPHMIQVYRSRKWRPIASDEIVPGDIVSIGRSPQENLVPCDVLLLRGRCIVDEAMLTGESVPQMKEPIEDLSPDRVLDLQADSRLHVIFGGTKVVQHIPPQKATTGLKPVDSGCVAYVLRTGFNTSQGKLLRTILFGVKRVTANNLETFIFILFLLVFAIAAAAYVWIEGTKDPSRNRYKLFLECTLILTSVVPPELPIELSLAVNTSLIALAKLYMYCTEPFRIPFAGKVEVCCFDKTGTLTSDSLVVRGVAGLRDGKEVTPVSSIPVETHRALASCHSLMQLDDGTLVGDPLEKAMLTAVDWTLTKDEKVFPRSIKTQGLKIHQRFHFASALKRMSVLASYEKLGSTDLCYIAAVKGAPETLHSMFSQCPPDYHHIHTEISREGARVLALGYKELGHLTHQQAREVKREALECSLKFVGFIVVSCPLKADSKAVIREIQNASHRVVMITGDNPLTACHVAQELHFIEKAHTLILQPPSEKGRQCEWRSIDGSIVLPLARGSPKALALEYALCLTGDGLAHLQATDPQQLLRLIPHVQVFARVAPKQKEFVITSLKELGYVTLMCGDGTNDVGALKHADVGVALLANAPERVVERRRRPRDSPTLSNSGIRATSRTAKQRSGLPPSEEQPTSQRDRLSQVLRDLEDESTPIVKLGDASIAAPFTSKLSSIQCICHVIKQGRCTLVTTLQMFKILALNALILAYSQSVLYLEGVKFSDFQATLQGLLLAGCFLFISRSKPLKTLSRERPLPNIFNLYTILTVMLQFFVHFLSLVYLYREAQARSPEKQEQFVDLYKEFEPSLVNSTVYIMAMAMQMATFAINYKGPPFMESLPENKPLVWSLAVSLLAIIGLLLGSSPDFNSQFGLVDIPVEFKLVIAQVLLLDFCLALLADRVLQFFLGTPKLKVPS

SEQ ID NO: 9616 - protein, 709 aa, Homo sapiens
MGPRIGPAGEVPQVPDKETKATMGTENTPGGKASPDPQDVRPSVFHNIKLFVLCHSLLQLAQLMISGYLKSSISTVEKRFGLSSQTSGLLASFNEVGNTALIVFVSYFGSRVHRPRMIGYGAILVALAGLLMTLPHFISEPYRYDNTSPEDMPQDFKASLCLPTTSAPASAPSNGNCSSYTETQHLSVVGIMFVAQTLLGVGGVPIQPFGISYIDDFAHNSNSPLYLGILFAVTMMGPGLAFGLGSLMLRLYVDINQMPEGGISLTIKDPRWVGAWWLGFLIAAGAVALAAIPYFFFPKEMPKEKRELQFRRKVLAVTDSPARKGKDSPSKQSPGESTKKQDGLVQIAPNLTVIQFIKVFPRVLLQTLRHPIFLLVVLSQVCLSSMAAGMATFLPKFLERQFSITASYANLLIGCLSFPSVIVGIVVGGVLVKRLHLGPVGCGALCLLGMLLCLFFSLPLFFIGCSSHQIAGITHQTSAHPGLELSPSCMEACSCPLDGFNPVCDPSTRVEYITPCHAGCSSWVVQDALDNSQVFYTNCSCVVEGNPVLAGSCDSTCSHLVVPFLLLVSLGSALACLTHTPSFMLILRGVKKEDKTLAVGIQFMFLRILAWMPSPVIHGSAIDTTCVHWALSCGRRAVCRYYNNDLLRNRFIGLQFFFKTGSVICFALVLAVLRQQDKEARTKESRSSPAVEQQLLVSGPGKKPEDSRV

SEQ ID NO: 9617 - protein, 268 aa, Homo sapiens
HVGGQDKPFLSARPSTVVPRGGHVALQCHYRRGFNNFMLYKEDRSHVPIFHGRIFQESFIMGPVTPAHAGTYRCRGSRPHSLTGWSAPSNPLVIMVTGNHRKPSLLAHPGPLLKSGETVILQCWSDVMFEHFFLHRDGISEDPSRLVGQIHDGVSKANFSIGPLMPVLAGTYRCYGSVPNSPTVQAGENVTLSCSSWSSYDIYHLSREGEAHERRLRAVPKGNRTFQADFPLGPATHGGTYRCFGSFRALPCVWSNSSDPLLVSVTGN

SEQ ID NO: 9618 - protein, 438 aa, Homo sapiens [sequence omitted]

SEQ ID NO: 9619 - protein, 456 aa, Homo sapiens
KPSLLAHPGPLVKSGERVILQCWSDIMFEHFFLHKEGISKDPSRLVGQIHDGVSKANFSIGPMMLALAGTYRCYGSVTHTPYQLSAPSDPLDIVVTGPYEKPSLSAQPGPKVQAGESVTLSCSSRSSYDMYHLSREGGAHERRLPAVRKVNRTFQADFPLGPATHGGTYRCFGSFRHSPYEWSDPSDPLLVSVTGNHRKPSLLAHPGPLLKSGETVILQCWSDVMFEHFFLHREGISEDPSRLVGQIHDGVSKANFSIGPLMPVLAGTYRCYGSVPHSPYQLSAPSDPLDIVITEMYDTPTLSVHPGPEVISGEKVTFYCRLDTATSMFLLLKEGRSSHVQRGYGKVQAEFPLGPVTTAHRGTYRCFGSYNNHAWSFPSEPVKLLVTGEEMLNSPHPSPPCPTWSPEGSPENHALWDHTAQNLLRMGLAFLVLVALVWFLVEDWLSRKRTRERASR

SEQ ID NO: 9620 - protein, 455 aa, Homo sapiens
MSLTVVSMACVGFFLLQGAWPLMGGQDKPFLSARPSTVVPRGGHVALQCHYRRGFNNFMLYKEDRSHVPIFHGRIFQESFIMGPVTPAHAGTYRCRGSRPHSLTGWSAPSNPLVIMVTGNHRKPSLLAHPGPLLKSGETVILQCWSDVMFEHFFLHREGISEDPSRLVGQIHDGVSKANFSIGPLMPVLAGTYRCYGSVPHSPYQLSAPSDPLDIVITGLYEKPSLSAQPGPTVQAGENVTLSCSSWSSYDIYHLSREGEAHERRLRAVPKVNRTFQADFPLGPATHGGTYRCFGSFRALPCVWSNSSDPLLVSVTGNPSSSWPSPTEPSSKSGICRHLHVLIGTSVVIFLFILLLFFLLYRWCSNKKNAAVMDQEPAGDRTVNRQDSDEQDPQEVTYAQLDHCVFIQRKISRPSQRPKTPLTDTSVYTELPNAEPRSKVVSCPRAPQSGLEGVF

SEQ ID NO: 9621 - protein, 203 aa, Homo sapiens
HEGVHRKPSLLAHPGPLLKSGETVILQCWSDVMFEHFFLHRDGISEDPSRLVGQIHDGVSKANFSIGPLMPVLAGTYRCYGSVPHSPYQLSAPSDPLDIVITGLYEKPSLSAQLGPTVLAGENVTLSCSSRSSYDMYHLSREGEAHERRLPAGPKVNGTFQADFPLGPATHGGTYRCFGSFHDSPYEWSKSSDPLLVSVTGNP

SEQ ID NO: 9622 - protein, 257 aa, Homo sapiens
MDFSRLHMYSPPQCVPENTGYTYALSSSYSSDALDFETEHKLDPVFDSPRMSRRSLRLATTACTLGDGEAVGADSGTSSAVSLKNRAARTTKQRRSTNKSAFSINHVSRQVTSSGVSHGGTVSLQDAVTRRPPVLDESWIREQTTVDHFWGLDDDGDLKGGNKAAIQGNGDVGAAAATAHNGFSCSNCSMLSERKDVLTAHPAAPGPVSRVYSRDRNQKCKSQSFKTQKKVCFPNLIFPFCKSQCLHYLSWRLKIIP

SEQ ID NO: 9623 - protein, 804 aa, Homo sapiens
MGDVRKAKEALAEEVLLVISPSDISAADCDSHCCYEDFLKVRVCALWFEVVNMDFSRLHMYSPPQCVPENTGYTYALSSSYSSDALDFETEHKLDPVFDSPRMSRRSLRLATTACTLGDGEAVGADSGTSSAVSLKNRAARTTKQRRSTNKSAFSINHVSRQVTSSGVSHGGTVSLQDAVTRRPPVLDESWIREQTTVDHFWGLDDDGDLKGGNKAAIQGNGDVGAAAATAHNGFSCSNCSMLSERKDVLTAHPAAPGPVSRVYSRDRNQKWKAASGVFWWLGIGWYQFVTLISWLNVFLLTRCLRNICKFLVLLIPLFLLLAGLSLRGQGNFFSFLPVLNWASMHRTQRVDDPQDVFKPTTSRLKQPLQGDSEAFPWHWMSGVEQQVASLSGQCHHHGENLRELTTLLQKLQARVDQMEGGAAGPSASVRDAVGQPPRETDFMAFHQEHEVRMSHLEDILGKLREKSEAIQKELEQTKQKTISAVGEQLLPTVEHLQLELDQLKSELSSWRHVKTGCETVDAVQERVDVQVREMVKLLFSEDQQGGSLEQLLQRFSSQFVSKGDLQTMLRDLQLQILRNVTHHVSVTKQLPTSEAVVSAVSEAGASGITEAQARAIVNSALKLYSQDKTGMVDFALESGGGSILSTRCSETYETKTALMSLFGIPLWYFSQSPRVVIQPDIYPGNCWAFKGSQGYLVVRLSMMIHPAAFTLEHIPKTLSPTGNISSAPKDFAVYGLENEYQEEGQLLGQFTYDQDGESLQMFQALKRPDDTAFQIVELRIFSNWGHPEYTCLYRFRVHGEPVK

SEQ ID NO: 9624 - protein, 808 aa, Homo sapiens
MGRDISAAAPSLHICKGSSQGPGTSTDISAADCDSHCFYEDFLKVRVCALWFEVVNMDFSRLHMYSPPQCVPENTGYTYALSSSYSSDALDFETEHKLDPVFDSPRMSRRSLRLATTACTLGDGEAVGADSGTSSAVSLKNRAARTTKQRRSTNKSAFSINHVSRQVTSSGVSHGGTVSLQDAVTRRPPVLDESWIREQTTVDHFWGLDDDGDLKGGNKAAIQGNGDVGAAAATAHNGFSCSNCSMLSERKDVLTAHPAAPGPVSRVYSRDRNQKWKAASGVFWWLGIGWYQFVTLISWLNVFLLTRCLRNICKFLVLLIPLFLLLAGLSLRGQGNFFSFLPVLNWASMHRTQRVDDPQDVFKPTTSRLKQPLQGDSEAFPWHWMSGVEQQVASLSGQCHHHGENLRELTTLLQKLQARVDQMEGGAAGPSASVRDAVGQPPRETDFMAFHQEHEVRMSHLEDILGKLREKSEAIQKELEQTKQKTISAVGEQLLPTVEHLQLELDQLKSELSSWRHVKTGCETVDAVQERVDVQVREMVKLLFSEDQQGGSLEQLLQRFSSQFVSKGDLQTMLRDLQLQILRNVTHHVSVTKQLPTSEAVVSAVSEAGASGITEAQARAIVNSALKLYSQDKTGMVDFALESGGGSILSTRCSETYETKTALMSLFGIPLWYFSQSPRVVIQPDIYPGNCWAFKGSQGYLVVRLSMMIHPAAFTLEHIPKTLSPTGNISSAPKDFAVYGLENEYQEEGQLLGQFTYDQDGESLQMFQALKRPDDTAFQIVELRIFSNWGHPEYTCLYRFRVHGEPVK

SEQ ID NO: 9625 - protein, 341 aa, Homo sapiens
MDFSRLHMYSPPQCVPENTGYTYALSSSYSSDALDFETEHKLDPVFDSPRMSRRSLRLATTACTLGDGEAVGADSGTSSAVSLKNRAARTTKQRRSTNKSAFSINHVSRQVTSSGVSHGGTVSLQDAVTRRPPVLDESWIREQTTVDHFWGLDDDGDLKGGNKAAIQGNGDVGAAAATAHNGFSCSNCSMLSERKDVLTAHPAAPGPVSRVYSRDRNQKCGASFYVNRILWLARYTASSFSSFLVQLFQVVLMKLSYESENYKLKTHESKDCESESYKSKSHESKAHASYYGRMNVREVLREDGHLSVNGEALCKYGFVFLWASVVELVPHAVMLGTSSRE

SEQ ID NO: 9626 - protein, 233 aa, Homo sapiens
MAKRNLSTVTEFILVVFTDHPELAVPLFLVFLSFYLVTFLGNGGMIILIQVDAQLHTPVYFFLSHLAFLDACCASVITPQILATLATDKTVISYGCRAVQFSFFTICAGTECYLLSVMAYDRFVAISNPLHCNMTMTPGTCRVFLASAFICGVSGAILHTTCTFTLSFCCDNQINFFFCDLPPLLKLACSSMTQTEIVILLCAKCMFLANVMVILICYMLIIRAILRVKSAGG

SEQ ID NO: 9627 - protein, 764 aa, Homo sapiens
MRPADLLQLVLLLDLPRDLGGMGCSSPPCECHQEEDFRVTCKDIQRIPSLPPSTQTLKLIETHLRTIPSHAFSNLPNISRIYVSIDVTLQQLESHSFYNLSKVTHIEIRNTRNLTYIDPDALKELPLLKFLGIFNTGLKMFPDLTKVYSTDIFFILEITDNPYMTSIPVNAFQGLCNETLTLKLYNNGFTSVQGYAFNGTKLDAVYLNKNKYLTVIDKDAFGGVYSGPSLLDVSQTSVTALPSKGLEHLKELIARNTWTLKKLPLSLSFLHLTRADLSYPSHCCAFKNQKKIRGILESLMCNESSMQSLRQRKSVNALNSPLHQEYEENLGDSIVGYKEKSKFQDTHNNAHYYVFFEEQEDEIIGFGQELKNPQEETLQAFDSHYDYTICGDSEDMVCTPKSDEFNPCEDIMGYKFLRIVVWFVSLLALLGNVFVLLILLTSHYKLNVPRFLMCNLAFADFCMGMYLLLIASVDLYTHSEYYNHAIDWQTGPGCNTAGFFTVFASELSVYTLTVITLERWYAITFAMRLDRKIRLRHACAIMVGGWVCCFLLALLPLVGISSYAKVSICLPMDTETPLALAYIVFVLTLNIVAFVIVCCCHVKIYITVRNPQYNPGDKDTKIAKRMAVLIFTDFICMAPISFYALSAILNKPLITVSNSKILLVLFYPLNSCANPFLYAIFTKAFQRDVFILLSKFGICKRQAQAYRGQRVPPKNSTDIQVQKVTHDMRQGLHNMEDVYELIENSHLTPKKQGQISEEYMQTVL

SEQ ID NO: 9628 - protein, 789 aa, Homo sapiens
MLEGNYQVMLKSGTNILYWRTTGILMGSKAVKPVLVKNITIEGVAYTSECFPCKPGTFSNKPGSFNCQVCPRNTYSEKGAKECIRCKDDSQFSEEGSSECTERPPCTTKDYFQIHTPCDEEGKTQIMYKWIEPKICREDLTDAIRLPPSGEKKDCPPCNPGFYNNGSSSCHPCPPGTFSDGTKECRPCPAGTEPALGFEYKWWNVLPGNMKTSCFNVGNSKCDGMNGWEVAGDHIQSGAGGSDNDYLILNLHIPGFKPPTSMTGATGSELGRITFVFETLCSADCVLYFMVDINRKSTNVVESWGGTKEKQAYTHIIFKNATFTFTWAFQRTNQGQDNRRFINDMVKIYSITATNAVDGVASSCRACALGSEQSGSSCVPCPPGHYIEKETNQCKECPPDTYLSIHQVYGKEACIPCGPGSKNNQDHSVCYSDCFFYHEKENQSLHYDFSNLSSVGSLMNGPSFTSKGTKYFHFFNISLCGHEGKKMALCTNNITDFTVKEIVAGSDDYTNLVGAFVCQSTIIPSESKGFRAALSSQSIILADTFIGVTVETTLKNINIKEDMFPVPTSQIPDVHFFYKSSTATTSCINGRSTAVKMRCNPTKSGAGVISVPSKCPAGTCDGCTFYFLWESAEACPLCTEHDFHEIEGACKRGFQETLYVWNEPKWCIKGISLPEKKLATCETVDFWLKVGAGVGAFTAVLLVALTCYFWKKNQKLEYKYSKLVMTTNSKECELPAADSCAIMEGEDNEEEVVYSNKQSLLGKLKSLATKEKEDHFESVQLKTSRSPNI

SEQ ID NO: 9629 - protein, 803 aa, Homo sapiens
MDTTTDKWVKLTDNGEWGSHSVMLKSGTNILYWRTTGILMGSKAVKPVLVKNITIEGVAYTSECFPCKPGTFSNKPGSFNCQVCPRNTYSEKGAKECIRCKDDSQFSEEGSSECTERPPCTTKDYFQIHTPCDEEGKTQIMYKWIEPKICREDLTDAIRLPPSGEKKDCPPCNPGFYNNGSSSCHPCPPGTFSDGTKECRPCPAGTEPALGFEYKWWNVLPGNMKTSCFNVGNSKCDGMNGWEVAGDHIQSGAGGSDNDYLILNLHIPGFKPPTSMTGATGSELGRITFVFETLCSADCVLYFMVDINRKSTNVVESWGGTKEKQAYTHIIFKNATFTFTWAFQRTNQGQDNRRFINDMVKIYSITATNAVDGVASSCRACALGSEQSGSSCVPCPPGHYIEKETNQCKECPPDTYLSIHQVYGKEACIPCGPGSKNNQDHSVCYSDCFFYHEKENQSLHYDFSNLSSVGSLMNGPSFTSKGTKYFHFFNISLCGHEGKKMALCTNNITDFTVKEIVAGSDDYTNLVGAFVCQSTIIPSESKGFRAALSSQSIILADTFIGVTVETTLKNINIKEDMFPVPTSQIPDVHFFYKSSTATTSCINGRSTAVKMRCNPTKSGAGVISVPSKCPAGTCDGCTFYFLWESAEACPLCTEHDFHEIEGACKRGFQETLYVWNEPKWCIKGISLPEKKLATCETVDFWLKVGAGVGAFTAVLLVALTCYFWKKNQKLEYKYSKLVMTTNSKECELPAADSCAIMEGEDNEEEVVYSNKQSLLGKLKSLATKEKEDHFESVQLKTSRSPNI

SEQ ID NO: 9630 - protein, 511 aa, Homo sapiens
MDVCGWKEMEVALVNFDNSDEIQEEPGYATDFDSTSPKGRPGGSSFSNGKILISESTNHETAFSKLPGDYADPPGPEPVVLNEGNQRVIINIAGLRFETQLRTLSQFPETLLGDREKRMQFFDSMRNEYFFDRNRPSFDGILYYYQSGGKIRRPANVPIDIFADEISFYELGSEAMDQFREDEGFIKDPETLLPTNDIHRQFWLLFEYPESSSAARAVAVVSVLVVVISITIFCLETLPEFREDRELKVVRDPNLNMSKTVLSQTMFTDPFFMVESTCIVWFTFELVLRFVVCPSKTDFFRNIMNIIDIISIIPYFATLITELVQETEPSAQQNMSLAILRIIRLVRVFRIFKLSRHSKGLQILGQTLKASMRELGLLIFFLFIGVILFSSAVYFAEVDEPESHFSSIPDGFWWAVVTMTTVGYGDMCPTTPGGKIVGTLCAIAGVLTIALPVPVIVSNFNYFYHRETENEEKQNIPGEIERILNSVGSRMGSTDSLNKTNGGCSTEKSRK

SEQ ID NO: 9631 - protein, 458 aa, Homo sapiens
MVNLRNAVHSFLVHLIGLLVWQCDISVSPVAAIVTDIFNTSDGGRFKFPDGVQNWPALSIVIIIIMTIGGNILVIMAVSMEKKLHNATNYFLMSLAIADMLVGLLVMPLSLLAILYDYVWPLPRYLCPVWISLDVLFSTASIMHLCAISLDRYVAIRNPIEHSRFNSRTKAIMKIAIVWAISIGVSVPIPVIGLRDEEKVFVNNTTCVLNDPNFVLIGSFVAFFIPLTIMVITYCLTIYVLRRQALMLLHGHTEEPPGLSLDFLKCCKRNTAEEENSANPNQDQNARRRKKKERRPRGTMQAINNERKASKVLGIVFFVFLIMWCPFFITNILSVLCEKSCNQKLMEKLLNVFVWIGYVCSGINPLVYTLFNKIYRRAFSNYLRCNYKVEKKPPVRQIPRVAATALSGRELNVNIYRHTNEPVIEKASDNEPGIEMQVENLELPVNPSSVVSERISSV

SEQ ID NO: 9632 - protein, 554 aa, Homo sapiens
MAAGGSAPEPRVLVCLGALLAGWVAVGLEAVVIGEVHENVTLHCGNISGLRGQVTWYRNNSEPVFLLSSNSSLRPAEPRFSLVDATSLHIESLSLGDEGIYTCQEILNVTQWFQVWLQVASGPYQIEVHIVATGTLPNGTLYAARGSQVDFSCNSSSRPPPVVEWWFQALNSSSESFGHNLTVNFFSLLLISPNLQGNYTCLALNQLSKRHRKVTTELLVYYPPPSAPQCWAQMASGSFMLQLTCRWDGGYPDPDFLWIEEPGGVIVGKSKLGVEMLSESQLSDGKKFKCVTSHIVGPESGASCMVQIRGPSLLSEPMKTCFTGGNVTLTCQVSGAYPPAKILWLRNLTQPEVIIQPSSRHLITQDGQNSTLTIHNCSQDLDEGYYICRADSPVGVREMEIWLSVKEPLNIGGIVGTIVSLLLLGLAIISGLLLHYSPVFCWKGLKLGKIRNLLDYFSPLEIRGQNMDDVMVLVDSEEEEEEEEEEEEDAAVGEQEGAREREELPKEIPKQDHIHRVTALVNGNIEQMGNGFQDLQDDSSEEQSDIVQEEDRPV

SEQ ID NO: 9633 - protein, 546 aa, Homo sapiens
MAAGGSAPEPRVLVCLGALLAGWVAVGLEAVVIGEVHENVTLHCGNISGLRGQVTWYRNNSEPVFLLSSNSSLRPAEPRFSLVDATSLHIESLSLGDEGIYTCQEILNVTQWFQVWLQVASGPYQIEVHIVATGTLPNGTLYAARGSQVDFSCNSSSRPPPVVEWWFQALNSSSESFGHNLTVNFFSLLLISPNLQGNYTCLALNQLSKRHRKVTTELLVYYPPPSAPQCWAQMASGSFMLQLTCRWDGGYPDPDFLWIEEPGGVIVGKSKLGVEMLSESQLSDGKKFKCVTSHIVGPESGASCMVQIRGPSLLSEPMKTCFTGGNVTLTCQVSGAYPPAKILWLRNLTQPEVIIQPSSRHLITQDGQNSTLTIHNCSQDLDEGYYICRADSPVGVREMEIWLSVKEPLNIGGIVGTIVSLLLLGLAIISGLLLHYSPVFCWKGELLEPGRQRLRGQNMDDVMVLVDSEEEEEEEEEEEEDAAVGEQEGAREREELPKEIPKQDHIHRVTALVNGNIEQMGNGFQDLQDDSSEEQSDIVQEEDRPV

SEQ ID NO: 9634 - protein, 432 aa, Homo sapiens
MTHCACARDRAREGWGARCLGARRPPRPAKRRMGKNPVRPPRALPPVPSQDDIPLSRPKKKKPRTKNTPASASLEGLAQTAGRRPSEGNEPSTKELKEHPEAPVQRRQKKTRLPLELETSSTQKKSSSSSLLRNENGIDAEPAEEAVIQKPRRKTKKTQPAELQYANELGVEDEDIITDEQTTVEQQSVFTAPTGISQPVGKVFVEKSRRFQAADRSELIKTTENIDVSMDVKPSWTTRDVALTVHRAFRMIGLFSHGFLAGCAVWNIVVIYVLAGDQLSNLSNLLQQYKTLAYPFQSLLYLLLALSTISAFDRIDFAKISVAIRNFLALDPTALASFLYFTALILSLSQQMTSDRIHLYTPSSVNGSLWEAGIEEQILQPWIVVNLVVALLVGLSWLFLSYRPGMDLSEELMFSSEVEEYPDKEKEIKASS

SEQ ID NO: 9635 - protein, 237 aa, Homo sapiens
SSSSSLLRNENGIDAEPAEEAVIQKPRRKTKKTQPAELQYANELGVEDEDIITDEQTTVEQQSVFTAPTGISQPVGKVFVEKSRRFQAADRSELIKTTENIDVSMDVKPSWTTRDVALTVHRAFRMIGLFSHGFLAGCAVWNIVVIYVLAGDQLSNLSNLLQQYKTLAYPFQSLLYLLLALSTISAFDRIDFAKISVAIRNFLALDPTALASFLNFICLFLSVLYCSYTIFESANDK

SEQ ID NO: 9636 - protein, 342 aa, Homo sapiens
MEPHDSSHMDSEFRYTLFPIVYSIIFVLGVIANGYVLWVFARLYPCKKFNEIKIFMVNLTMADMLFLITLPLWIVYYQNQGNWILPKFLCNVAGCLFFINTYCSVAFLGVITYNRFQAVTRPIKTAQANTRKRGISLSLVIWVAIVGAASYFLILDSTNTVPDSAGSGNVTRCFEHYEKGSVPVLIIHIFIVFSFFLVFLIILFCNLVIIRTLLMQPVQQQRNAEVKRRALWMVCTVLAVFIICFVPHHVVQLPWTLAELGFQDSKFHQAINDAHQVTLCLLSTNCVLDPVIYCFLTKKFRKHLTEKFYSMRSSRKCSRATTDTVTEVVVPFNQIPGNSLKN

SEQ ID NO: 9637 - protein, 983 aa, Homo sapiens
MAPRLQLEKAAWRWAETVRPEEVSQEHIETAYRIWLEPCIRGVCRRNCKGNPNCLVGIGEHIWLGEIDENSFHNIDDPNCERRKKNSFVGLTNLGATCYVNTFLQVWFLNLELRQALYLCPSTCSDYMLGDGIQEEKDYEPQTICEHLQYLFALLQNSNRRYIDPSGFVKALGLDTGQQQDAQEFSKLFMSLLEDTLSKQKNPDVRNIVQQQFCGEYAYVTVCNQCGRESKLLSKFYELELNIQGHKQLTDCISEFLKEEKLEGDNRYFCENCQSKQNATRKIRLLSLPCTLNLQLMRFVFDRQTGHKKKLNTYIGFSEILDMEPYVEHKGGSYVYELSAVLIHRGVSAYSGHYIAHVKDPQSGEWYKFNDEDIEKMEGKKLQLGIEEDLAEPSKSQTRKPKCGKGTHCSRNAYMLVYRLQTQEKPNTTVQVPAFLQELVDRDNSKFEEWCIEMAEMRKQSVDKGKAKHEEVKELYQRLPAGAEPYEFVSLEWLQKWLDESTPTKPIDNHACLCSHDKLHPDKISIMKRISEYAADIFYSRYGGGPRLTVKALCKECVVERCRILRLKNQLNEDYKTVNNLLKAAVKGSDGFWVGKSSLRSWRQLALEQLDEQDGDAEQSNGKMNGSTLNKDESKEERKEEEELNFNEDILCPHGELCISENERRLVSKEAWSKLQQYFPKAPEFPSYKECCSQCKILEREGEENEALHKMIANEQKTSLPNLFQDKNRPCLSNWPEDTDVLYIVSQFFVEEWRKFVRKPTRCSPVSSVGNSALLCPHGGLMFTFASMTKEDSKLIALIWPSEWQMIQKLFVVDHVIKITRIEVGDVNPSETQYISEPKLCPECREGLLCQQQRDLREYTQATIYVHKVVDNKKVMKDSAPELNVSSSETEEDKEEAKPDGEKDPDFNQIMHAFSVAPFDQNLSIDGKILSDDCATLGTLGVIPESVILLKADEPIADYAAMDDVMQVCMPEEGFKGTGLLGH

SEQ ID NO: 9638 - protein, 399 aa, Homo sapiens
MARRFQEELAAFLFEYDTPRMVLVRNKKVGVIFRLIQLVVLVYVIGWVFLYEKGYQTSSGLISSVSVKLKGLAVTQLPGLGPQVWDVADYVFPAQGDNSFVVMTNFIVTPKQTQGYCAEHPEGGICKEDSGCTPGKAKRKAQGIRTGKCVAFNDTVKTCEIFGWCPVEVDDDIPRPALLREAENFTLFIKNSISFPRFKVNRRNLVEEVNAAHMKTCLFHKTLHPLCPVFQLGYVVQESGQNFSTLAEKGGVVGITIDWHCDLDWHVRHCRPIYEFHGLYEEKNLSPGFNFRFARHFVENGTNYRHLFKVFGIRFDILVDGKAGKFDIIPTMTTIGSGIGIFGVATVLCDLLLLHILPKRHYYKQKKFKYAEDMGPGAAERDLAATSSTLGLQENMRTS

SEQ ID NO: 9639 - protein, 992 aa, Homo sapiens
MPACTERVLLSLCYRALEEPPSGSGIERGHRWATQKDRFLGTDQEEGRSYYSPEATWGLSPKPQLLFQLPPATPPHFAKGTLTVTGHPKLEGIEARVKRGHLAIAQTGSDRSYNVYSDEFRPGSRRDVMVLIHHGAVAKTLAPMAQHPLGTIMAAHLLRGIGRKPWVGVQGLEDKEKKLPGKERHLCGGPRDDLSTGGRLQNMTVDECFQSRNTVLQGQPFGGVPTVLCLNIALWVLVLVVYSFLRKAAWDYGRLALLIHNDSLTSLIYGEQSEKTSPSETSLEMERRDKGFCSWFFNSITMKDEDLINKCGDDARIYIVFQYHLIIFVLIICIPSLGIILPINYTGSVLDWSSHFARTTIVNVSTESKLLWLHSLLSFFYFITNFMFMAHHCLGFAPRNSQKVTRTLMITYVPKDIEDPELIIKHFHEAYPGSVVTRVHFCYDVRNLIDLDDQRRHAMRGRLFYTAKAKKTGKVMIRIHPCARLCFCKCWTCFKEVDAEQYYSELEEQLTDEFNAELNRVPLKRLDLIFVTFQDSRMAKRVRKDYKYVQCGVQPQQSSVTTIVKSYYWRVTMAPHPKDIIWKHLSVRRFFWWARFIAINTFLFFLFFFLTTPAIIMNTIDMYNVTRPIEKLQNPIVTQFFPSVMLWGFTVILPLIVYFSAFLEAHWTRSSQNLVMVHKCYIFLVFMVVILPSMGLTSLDVFLRWLFDIYYLEQASIRFQCVFLPDNGAFFVNYVITAALLGTGMELLRLGSLFCYSTRLFFSRSEPERVNIRKNQAIDFQFGREYAWMMNVFSVVMAYSITCPIIVPFGLLYLCMKHLTDRYNMYYSFAPTKLNEQIHMAAVSQAIFAPLLGLFWMLFFSILRLGSLHAITIFSLSTLLIAMVIAFVGIFLGKLRMVADYEPEEEEIQTVFDMEPSSTSSTPTSLLYVATVLQEPELNLTPASSPARHTYGTMNNQPEEGEEESGLRGFARELDSAQFQEGLELEGQNQYH

SEQ ID NO: 9640 - protein, 847 aa, Homo sapiens
MGKKGKVGKSRRDKFYHLAKETGYRSRSAFKLIQLNRRFQFLQKARALLDLCAAPGGWLQVAAKFMPVSSLIVGVDLVPIKPLPNVVTLQEDITTERCRQALRKELKTWKVDVVLNDGAPNVGASWVHDAYSQAHLTLMALRLACDFLARGGSFITKVFRSRDYQPLLWIFQQLFRRVQATKPQASRHESAEIFVVCQGFLAPDKVDSKFFDPKFAFKEVEVQAKTVTELVTKKKPKAEGYAEGDLTLYHRTSVTDFLRAANPVDFLSKASEIMVDDEELAQHPATTEDIRVCCQDIRVLGRKELRSLLNWRTKLRRYVAKKLKEQAKALDISLSSGEEDEGDEEDSTAGTTKQPSKEEEEEEEEEQLNQTLAEMKAQEVAELKRKKKKLLREQRKQRERVELKMDLPGVSIADEGETGMFSLCTIRGHQLLEEVTQGDMSAADTFLSDLPRDDIYVSDVEDDGDDTSLDSDLDPEELAGVRGHQGLRDQKRMRLTEVQDDKEEEEEENPLLVPLEEKAVLQEEQANLWFSKGSFAGIEDDADEALEISQAQLLFENRRKGRQQQQKQQLPQTPPSCLKTEIMSPLYQDEAPKGTEASSGTEAATGLEGEEKDGISDSDSSTSSEEEESWEPLRGKKRSRGPKSDDDGFEIVPIEDPAKHRILDPEGLALGAVIASSKKAKRDLIDNSFNRYTFNEDEGELPEWFVQEEKQHRIRQLPVGKKEVEHYRKRWREINARPIKKVAEAKARKKRRMLKRLEQTRKKAEAVVNTVDISEREKVAQLRSLYKKAGLGKEKRHVTYVVAKKGVGRKVRRPAGVRGHFKVVDSRMKKDQRAQQRKEQKKKHKRK

SEQ ID NO: 9641 - protein, 493 aa, Homo sapiens
MGKKGKVGKSRRDKFYHLAKETGYRSRSAFKLIQLNRRFQFLQKARALLDLCAAPGGWLQVAAKFMPVSSLIVGVDLVPIKPLPNVVTLQEDITTERCRQALRKELKTWKVDVVLNDGAPNVGASWVHDAYSQAHLTLMALRLACDFLARGGSFITKVFRSRDYQPLLWIFQQLFRRVQATKPQASRHESAEIFVVCQGFLAPDKVDSKFFDPKFAFKEVEVQAKTVTELVTKKKPKAEGYAEGDLTLYHRTSVTDFLRAANPVDFLSKASEIMVDDEELAQHPATTEDIRVCCQDIRVLGRKELRSLLNWRTKLRRYVAKKLKEQAKALDISLSSGEEDEGDEEDSTAGTTKQPSKEEEEEEEEEQLNQTLAEMKAQEVAELKRKKKKLLREQRKQRERVELKMDLPGVSIADEGETGMFSLCTIRGHQLLEEVTQGDMSAADTFLSDLPRDDIYVLIIFLICFLVLYALFLTLTTKLTNTNISDAQEIETV

SEQ ID NO: 9642 - protein, 195 aa, Homo sapiens
MENHKSNNKENITIVDISRKINQLPEAERNLLENGSVYVGLNAALCGLIANSLFRRILNVTKARIAAGLPMAGIPFLTTDLTYRCFVSFPLNTGDLDCETCTITRSGLTGLVIGGLYPVFLAIPVNGGLAARYQSALLPHKGNILSYWIRTSKPVFRKMLFPILLQTMFSAYLGSEQYKLLIKALQLSEPGKEIH

SEQ ID NO: 9643 - protein, 654 aa, Homo sapiens
RCHTDCLEGLLSRTFQWLGWQVGAHPWIFLLAPLMLTAALGTGFLYLPKDEEEDLEEHYTPVGSPAKAERRFVQGHFTTNDSYRFSASRRSTEANFVSLLVVSYSDSLLDPATFAEVSKLDGAVQDLRVAREKGSQIQYQQVCARYRALCVPPNPILYAWQVNKTLNLSSISFPAYNHGRHPLYLTGFFGGYILGGSLGMGQLLLRAKAMRLLYYLKTEDPEYDVQSKQWLTHLLDQFTNIKNILALKKIEVVHFTSLSRQLEFEATSVTVIPVFHLAYILIILFAVTSCFRFDCIRNKMCVAAFGVISAFLAVVSGFGLLLHIGVPFVIIVANSPFLILGVGVDDMFIMISAWHKTNLADDIRERMSNVYSKAAVSITITTITNILALYTGIMSSFRSVQCFCIYTGMTLLFCYFYNITCFGAFMALDGKREVVCLCWLKKADPKWPSFKKFCCFPFGSVPDEHGTDIHPISLFFRDYFGPFLTRSESKYFVVFIYVLYIISSIYGCFHVQEGLDLRNLASDDSYITPYFNVEENYFSDYGPRVMVIVTKKVDYWDKDVRQKLENCTKIFEKNVYVDKNLTEFWLDAYVQYLKGNSQDPNEKNTFMNNIPDFLSNFPNFQHDINISSSNEIISSRGFIQTTDVSSSAKKKILL

SEQ ID NO: 9644 - protein, 255 aa, Homo sapiens
MFHQVRRVMTILFLTMVISYFGCMKAAPMKEANIRGQGGLAYPGVRTHGTLESVNGPKAGSRGLTSLADTFEHVIEELLDEDQKVRPNEENNKDADLYTSRVMLSSQVPLEPPLLFLLEEYKNYLDAANMSMRVRRHSDPARRGELSVCDSISEWVTAADKKTAVDMSGGTVTVLEKVPVSKGQLKQYFYETKCNPMGYTKEGCRGIDKRHWNSQCRTTQSYVRALTMDSKKRIGWRFIRIDTSCVCTLTIKRGR

SEQ ID NO: 9645 - protein, 262 aa, Homo sapiens
MQSREEEWFHQVRRVMTILFLTMVISYFGCMKAAPMKEANIRGQGGLAYPGVRTHGTLESVNGPKAGSRGLTSLADTFEHVIEELLDEDQKVRPNEENNKDADLYTSRVMLSSQVPLEPPLLFLLEEYKNYLDAANMSMRVRRHSDPARRGELSVCDSISEWVTAADKKTAVDMSGGTVTVLEKVPVSKGQLKQYFYETKCNPMGYTKEGCRGIDKRHWNSQCRTTQSYVRALTMDSKKRIGWRFIRIDTSCVCTLTIKRGR

SEQ ID NO: 9646 - protein, 247 aa, Homo sapiens
MTILFLTMVISYFGCMKAAPMKEANIRGQGGLAYPGVRTHGTLESVNGPKAGSRGLTSLADTFEHVIEELLDEDQKVRPNEENNKDADLYTSRVMLSSQVPLEPPLLFLLEEYKNYLDAANMSMRVRRHSDPARRGELSVCDSISEWVTAADKKTAVDMSGGTVTVLEKVPVSKGQLKQYFYETKCNPMGYTKEGCRGIDKRHWNSQCRTTQSYVRALTMDSKKRIGWRFIRIDTSCVCTLTIKRGR

SEQ ID NO: 9647 - protein, 980 aa, Homo sapiens [sequence omitted]

SEQ ID NO: 9648 - protein, 981 aa, Homo sapiens
MPAELLLLLIVAFASPSCQVLSSLRMAAILDDQTVCGRGERLALALAREQINGIIEVPAKARVEVDIFELQRDSQYETTDTMCQILPKGVVSVLGPSSSPASASTVSHICGEKEIPHIKVGPEETPRLQYLRFASVSLYPSNEDVSLAVSRILKSFNYPSASLICAKAECLLRLEELVRGFLISKETLSVRMLDDSRDPTPLLKEIRDDKVSTIIIDANASISHLILRKASELGMTSAFYKYILTTMDFPILHLDGIVEDSSNILGFSMFNTSHPFYPEFVRSLNMSWRENCEASTYLGPALSAALMFDAVHVVVSAVRELNRSQEIGVKPLACTSANIWPHGTSLMNYLRMVEYDGLTGRVEFNSKGQRTNYTLRILEKSRQGHREIGVWYSNRTLAMNATTLDINLSQTLANKTLVVTTILENPYVMRRPNFQALSGNERFEGFCVDMLRELAELLRFRYRLRLVEDGLYGAPEPNGSWTGMVGELINRKADLAVAAFTITAEREKVIDFSKPFMTLGISILYRVHMGRKPGYFSFLDPFSPAVWLFMLLAYLAVSCVLFLAARLSPYEWYNPHPCLRARPHILENQYTLGNSLWFPVGGFMQQGSEIMPRALSTRCVSGVWWAFTLIIISSYTANLAAFLTVQRMEVPVESADDLADQTNIEYGTIHAGSTMTFFQNSRYQTYQRMWNYMQSKQPSVFVKSTEEGIARVLNSRYAFLLESTMNEYHRRLNCNLTQIGGLLDTKGYGIGMPLGSPFRDEITLAILQLQENNRLEILKRKWWEGGRCPKEEDHRAKGLGMENIGGIFIVLICGLIIAVFVAVMEFIWSTRRSAESEETPALHPAACQCSALGPRTPLKEPSMLLVKVPSTRVQVAFSRTSLRQVCPFLLQHQLSSLYWIQATNVQICCHFSSLKPSPDLTFPPSHRPLSSLLFTALAAVGGLPDASSFFFPPISSCPPLQSGIGPCHSTEATLVTSNFHV

SEQ ID NO: 9649 - protein, 338 aa, Homo sapiens
EFRKTLETDTVTGKSGEKIDYSTTPRIDEWRDKGYRLVEDGFAEAGTPVYDDNDDVEQIFIVKLDHDTAPVGPNDPHEPETPINPNDPNGPKWPAKDSYTKQYTSTVHFVDENGNKLHDYNVQTSNWTRTLIVDKATGEILNPDEAWHSDIDKYSDVKVDPIKGYYTDRNSVPGEVAQQQDIVNTVVYKQIGKIVPVDPSGNPIPDAPTPQYRNNPNDPTKVIVTNTPEIPGMTPEVPSVTPENPGEDTPIVYNKVETPTPKTVDVTPETPKTVDVTSETPKATPVKTAPQVEKVKAPELPQTGEKQNKALTAVGASIMTGLLGILAFAKKKKDDKEI

SEQ ID NO: 9650 - protein, 666 aa, Homo sapiens
MENPRWSCGPGRTSVPKAPGETKKQSSHALSPTLGPLRRRDRGPPSRGRGPASRSPARASSGSRKQKRVLLAPRLRTRWSWKLRRMGEKMAEEERFPNTTHEGFNVTLHTTLVVTTKLVLPTPGKPILPVQTGEQAQQEEQSSGMTIFFSLLVLAICIILVHLLIRYRLHFLPESVAVVSLGILMGAVIKIIEFKKLANWKEEEMFRPNMFFLLLLPPIIFESGYSLHKGNFFQNIGSITLFAVFGTAISAFVVGGGIYFLGQADVISKLNMTDSFAFGSLISAVDPVATIAIFNALHVDPVLNMLVFGESILNDAVSIVLTNTAEGLTRKNMSDVSGWQTFLQALDYFLKMFFGSAALGTLTGLISALVLKHIDLRKTPSLEFGMMIIFAYLPYGLAEGISLSGIMAILFSGIVMSHYTHHNLSPVTQILMQQTLRTVAFLCETCVFAFLGLSIFSFPHKFEISFVIWCIVLVLFGRAVNIFPLSYLLNFFRDHKITPKMMFIMWFSGLRGAIPYALSLHLDLEPMEKRQLIGTTTIVIVLFTILLLGGSTMPLIRLMDIEDAKAHRRNKKDVNLSKTEKMGNTVESEHLSELTEEEYEAHYIRRQDLKGFVWLDAKYLNPFFTRRLTQEDLHHGRIQMKTLTNKWYEEVRQGPSGSEDDEQELL

SEQ ID NO: 9651 - protein, 916 aa, Homo sapiens
METSQETSLFLVKILEELDSKQNTVSYQDLCKSLCARFDLSQLAKLRSVLFYTACLDPNFPATLFKDKMKCTVNNQQSKKIMVAADIVTIFNLIQMNGGAAKEKLPTGRQKVRKKEASFESCRSDTEICNAAECEPLNCELSERSFSRGYPIRQSSKCRKMDCKDCPQFVPASEPNFLLGVSKEVKNRAASLDRLQALAPYSVTSPQPCEMQRTYFPMNIENESISDQDSLPINQSIKETFISNEEPFVVQSCVQKRNIFKEDFHNLMAVSPSLVGPISKAENEHREPQSRKEPHKPPFFNHSFEMPYNSQYLNPVYSPVPDKRRAKHESLDDLQASTYFGPTPVMGTQEARRCLGKPNKQTPWPAKSWSLNTEEVPDFERSFFNRNPSEEKLHYPNASSQTPNFPAPERRPTYLVPKDQQPILPIAYAAKQNGLKSKEISSPVDLEKHEPVKKFKDKSINCTSGQLSSDTSSVGTQTEHVLEPKKCRDLCTSGQGKYSDRHTMKHSDDDSEIVSDDISDIFRFLDDMSISGSTGVIQSSCYNSTGSLSQLHKSDCDSSPEHNLTKIANGVPNSKGDKGNRPENTHHSEEELKTSVCKLVLRIGEIERKLESLSGVRDEISQVLGKLNKLDQKMQQPEKVSVQIDLNSLTSEGPSDDSASPRMFHAHSGSHGPKLENNPDWCCSDASGSNSESLRVKALKKSLFTRPSSRSLTEENSATESKIASISNSPRDWRTITYTNRVGLNEEEIKDTGPGDNKDWHRKSKEADRQYDIPPQHRLPKQPKDGFLVEQVFSPHPYPASLKAHMKSNPLYTDMRLTELAEVKRGQPSWTIEEYARNAGDKGKLTALDLQTQESLNPNNLEYWMEDIYTPGYDSLLKRKEAEFRRAKVCKIAALIAAAACTVILVIVVPICTMKS

SEQ ID NO: 9652 - protein, 451 aa, Homo sapiens
MKTKLNIYNIEFLLFVFLVWDPARLVLANIQEDEAKNNITIFTRILDRLLDGYDNRLRPGLGDSITEVFTNIYVTSFGPVSDTDMEYTIDVFFRQKWKDERLKFKGPMNILRLNNLMASKIWTPDTFFHNGKKSVAHNMTMPNKLLRIQDDGTLLYTMRLTVQAECPMHLEDFPMDAHSCPLKFGSYAYTTSEVTYIWTYNASDSVQVAPDGSRLNQYDLLGQSIGKETIKSSTGEYTVMTAHFHLKRKIGYFVIQTYLPCIMTVILSQVSFWLNRESVPARTVFGVTTVLTMTTLSISARNSLPKVAYATAMDWFIAVCYAFVFSALIEFATVNYFTKRGWTWDGKSVVNDKKKEKASVMIQNNAYAVAVANYAPNLSKDPVLSTISKSATTPEPNKKPENKPAEAKKTFNSVSKIDRMSRIVFPVLFGTFNLVYWATYLNREPVLGVSP

SEQ ID NO: 9653 - protein, 1178 aa, Homo sapiens
MANGGGGGGGSSGGGGGGGGSSLRMSSNIHANHLSLDVSSSSSSSSSSSSSSSSSSSSSSVHEPKMDALIIPVTMEVPCDSRGQRMWWAFLASSMVTFFGGLFIILLWRTLKYLWTVCCHCGGKTKEAQKINNGSSQADGTLKPVDEKEEAVAAEVGWMTSVKDWAGVMISAQTLTGRVLVVLVFALSIGALVIYFIDSSNPIESCQNFYKDFTLQIDMAFNVFFLLYFGLRFIAANDKLWFWLEVNSVVDFFTVPPVFVSVYLNRSWLGLRFLRALRLIQFSEILQFLNILKTSNSIKLVNLLSIFISTWLTAAGFIHLVENSGDPWENFQNNQALTYWECVYLLMVTMSTVGYGDVYAKTTLGRLFMVFFILGGLAMFASYVPEIIELIGNRKKYGGSYSAVSGRKHIVVCGHITLESVSNFLKDFLHKDRDDVNVEIVFLHNISPNLELEALFKRHFTQVEFYQGSVLNPHDLARVKIESADACLILANKYCADPDAEDASNIMRVISIKNYHPKIRIITQMLQYHNKAHLLNIPSWNWKEGDDAICLAELKLGFIAQSCLAQGLSTMLANLFSMRSFIKIEEDTWQKYYLEGVSNEMYTEYLSSAFVGLSFPTVCELCFVKLKLLMIAIEYKSANRESRILINPGNHLKIQEGTLGFFIASDAKEVKRAFFYCKACHDDITDPKRIKKCGCKRLEDEQPSTLSPKKKQRNGGMRNSPNTSPKLMRHDPLLIPGNDQIDNMDSNVKKYDSTGMFHWCAPKEIEKVILTRSEAAMTVLSGHVVVCIFGDVSSALIGLRNLVMPLRASNFHYHELKHIVFVGSIEYLKREWETLHNFPKVSILPGTPLSRADLRAVNINLCDMCVILSANQNNIDDTSLQDKECILASLNIKSMQFDDSIGVLQANSQGFTPPGMDRSSPDNSPVHGMLRQPSITTGVNIPIITELVNDTNVQFLDQDDDDDPDTELYLTQPFACGTAFAVSVLDSLMSATYFNDNILTLIRTLVTGGATPELEALIAEENALRGGYSTPQTLANRDRCRVAQLALLDGPFADLGDGGCYGDLFCKALKTYNMLCFGIYRLRDAHLSTPSQCTKRYVITNPPYEFELVPTDLIFCLMQFDHNAGQSRASLSHSSHSSQSSSKKSSSVHSIPSTANRQNRPKSRESRDKQKYVQEERL

SEQ ID NO: 9654 - protein, 1178 aa, Homo sapiens
MANGGGGGGGSSGGGGGGGGSSLRMSSNIHANHLSLDASSSSSSSSSSSSSSSSSSSSSSVHEPKMDALIIPVTMEVPCDSRGQRMWWAFLASSMVTFFGGLFIILLWRTLKYLWTVCCHCGGKTKEAQKINNGSSQADGTLKPVDEKEEAVAAEVGWMTSVKDWAGVMISAQTLTGRVLVVLVFALSIGALVIYFIDSSNPIESCQNFYKDFTLQIDMAFNVFFLLYFGLRFIAANDKLWFWLEVNSVVDFFTVPPVFVSVYLNRSWLGLRFLRALRLIQFSEILQFLNILKTSNSIKLVNLLSIFISTWLTAAGFIHLVENSGDPWENFQNNQALTYWECVYLLMVTMSTVGYGDVYAKTTLGRLFMVFFILGGLAMFASYVPEIIELIGNRKKYGGSYSAVSGRKHIVVCGHITLESVSNFLKDFLHKDRDDVNVEIVFLHNISPNLELEALFKRHFTQVEFYQGSVLNPHDLARVKIESADACLILANKYCADPDAEDASNIMRVISIKNYHPKIRIITQMLQYHNKAHLLNIPSWNWKEGDDAICLAELKLGFIAQSCLAQGLSTMLANLFSMRSFIKIEEDTWQKYYLEGVSNEMYTEYLSSAFVGLSFPTVCELCFVKLKLLMIAIEYKSANRESRILINPGNHLKIQEGTLGFFIASDAKEVKRAFFYCKACHDDITDPKRIKKCGCKRLEDEQPSTLSPKKKQRNGGMRNSPNTSPKLMRHDPLLIPGNDQIDNMDSNVKKYDSTGMFHWCAPKEIEKVILTRSEAAMTVLSGHVVVCIFGDVSSALIGLRNLVMPLRASNFHYHELKHIVFVGSIEYLKREWETLHNFPKVSILPGTPLSRADLRAVNINLCDMCVILSANQNNIDDTSLQDKECILASLNIKSMQFDDSIGVLQANSQGFTPPGMDRSSPDNSPVHGMLRQPSITTGVNIPIITELVNDTNVQFLDQDDDDDPDTELYLTQPFACGTAFAVSVLDSLMSATYFNDNILTLIRTLVTGGATPELEALIAEENALRGGYSTPQTLANRDRCRVAQLALLDGPFADLGDGGCYGDLFCKALKTYNMLCFGIYRLRDAHLSTPSQCTKRYVITNPPYEFELVPTDLIFCLMQFDHNAGQSRASLSHSSHSSQSSSKKSSSVHSIPSTANRQNRPKSRESRDKQKYVQEERL

SEQ ID NO: 9655 - protein, 885 aa, Homo sapiens
NSGDPWENFQNNQALTYWECVYLLMVTMSTVGYGDVYAKTTLGRLFMVFFILGGLAMFASYVPEIIELIGNRKKYGGSYSAVSGRKHIVVCGHITLESVSNFLKDFLHKDRDDVNVEIVFLHNISPNLELEALFKRHFTQVEFYQGSVLNPHDLARVKIESADACLILANKYCADPDAEDASNIMRVISIKNYHPKIRIITQMLQYHNKAHLLNIPSWNWKEGDDAICLAELKLGFIAQSCLAQGLSTMLANLFSMRSFIKIEEDTWQKYYLEGVSNEMYTEYLSSAFVGLSFPTVCELCFVKLKLLMIAIEYKSANRESRILINPGNHLKIQEGTLGFFIASDAKEVKRAFFYCKACHDDITDPKRIKKCGCKRLKVAARSRYSKDPFEFKKETPNSRLVTEPVEDEQPSTLSPKKKQRNGGMRNSPNTSPKLMRHDPLLIPGNDQIDNMDSNVKKYDSTGMFHWCAPKEIEKVILTRSEAAMTVLSGHVVVCIFGDVSSALIGLRNLVMPLRASNFHYHELKHIVFVGSIEYLKREWETLHNFPKVSILPGTPLSRADLRAVNINLCDMCVILSANQNNIDDTSLQDKECILASLNIKSMQFDDSIGVLQANSQGFTPPGMDRSSPDNSPVHGMLRQPSITTGVNIPIITELVNDTNVQFLDQDDDDDPDTELYLTQPFACGTAFAVSVLDSLMSATYFNDNILTLIRTLVTGGATPELEALIAEENALRGGYSTPQTLANRDRCRVAQLALLDGPFADLGDGGCYGDLFCKALKTYNMLCFGIYRLRDAHLSTPSQCTKRYVITNPPYEFELVPTDLIFCLMQFDHNAGQSRASLSHSSHSSQSSSKKSSSVHSIPSTANRQNRPKSRESRDKQKYVQEERL

SEQ ID NO: 9656 - protein, 515 aa, Homo sapiens
MLLWASLLAFAPVCGQSAAAHKPVISVHPPWTTFFKGERVTLTCNGFQFYATEKTTWYHRHYWGEKLTLTPGNTLEVRESGLYRCQARGSPRSNPVRLLFSSDSLILQAPYSVFEGDTLVLRCHRRRKEKLTAVKYTWNGNILSISNKSWDLLIPQASSNNNGNYRCIGYGDENDVFRSNFKIIKIQELFPHPELKATDSQPTEGNSVNLSCETQLPPERSDTPLHFNFFRDGEVILSDWSTYPELQLPTVWRENSGSYWCGAETVRGNIHKHSPSLQIHVQRIPVSGVLLETQPSGGQAVEGEMLVLVCSVAEGTGDTTFSWHREDMQESLGRKTQRSLRAELELPAIRQSHAGGYYCTADNSYGPVQSMVLNVTVRETPGNRDGLVAAGATGGLLSALLLAVALLFHCWRRRKSGVGFLGDETRLPPAPGPGESSHSICPAQVELQSLYVDVHPKKGDLVYSEIQTTQLGEEEEANTSRTLLEDKDVSVVYSEVKTQHPDNSAGKISSKDEES

SEQ ID NO: 9657 - protein, 422 aa, Homo sapiens
RGSPRSNPVRLLFSSDSLILQAPYSVFEGDTLVLRCHRRRKEKLTAVKYTWNGNILSISNKSWDLLIPQASSNNNGNYRCIGYGDENDVFRSNFKIIKIQELFPHPELKATDSQPTEGNSVNLSCETQLPPERSDTPLHFNFFRDGEVILSDWSTYPELQLPTVWRENSGSYWCGAETVRGNIHKHSPSLQIHVQRIPVSGVLLETQPSGGQAVEGEMLVLVCSVAEGTGDTTFSWHREDMQESLGRKTQRSLRAELELPAIRQSHAGGYYCTADNSYGPVQSMVLNVTVRETPGNRDGLVAAGATGGLLSALLLAVALLFHCWRRRKSGVGFLGDETRLPPAPGPGESSHSICPAQVELQSLYVDGEDSLLGSCSWPQPWKDNALSALGNAPGLPKVSQIQIFPDIMCPRRVEMMLRKRHL

SEQ ID NO: 9658 - protein, 1502 aa, Homo sapiens
REIACIQKDKDIPAEDIICEYFEPKPLLEQACLIPCQQDCIVSEFSAWSECSKTCGSGLQHRTRHVVAPPQFGGSGCPNLTEFQVCQSSPCEAEELRYSLHVGPWSTCSMPHSRQVRQARRRGKNKEREKDRSKGVKDPEARELIKKKRNRNRQNRQENKYWDIQIGYQTREVMCINKTGKAADLSFCQQEKLPMTFQSCVITKECQVSEWSEWSPCSKTCHDMVSPAGTRVRTRTIRQFPIGSEKECPEFEEKEPCLSQGDGVVPCATYGWRTTEWTECRVDPLLSQQDKRRGNQTALCGGGIQTREVYCVQANENLLSQLSTHKNKEASKPMDLKLCTGPIPNTTQLCHIPCPTECEVSPWSAWGPCTYENCNDQQGKKGFKLRKRRITNEPTGGSGVTGNCPHLLEAIPCEEPACYDWKAVRLGDCEPDNGKECGPGTQVQEVVCINSDGEEVDRQLCRDAIFPIPVACDAPCPKDCVLSTWSTWSSCSHTCSGKTTEGKQIRARSILAYAGEEGGIRCPNSSALQEVRSCNEHPCTVYHWQTGPWGQCIEDTSVSSFNTTTTWNGEASCSVGMQTRKVICVRVNVGQVGPKKCPESLRPETVRPCLLPCKKDCIVTPYSDWTSCPSSCKEGDSSIRKQSRHRVIIQLPANGGRDCTDPLYEEKACEAPQACQSYRWKTHKWRRCQLVPWSVQQDSPGAQEGCGPGRQARAITCRKQDGGQAGIHECLQYAGPVPALTQACQIPCQDDCQLTSWSKFSSCNGDCGAVRTRKRTLVGKSKKKEKCKNSHLYPLIETQYCPCDKYNAQPVGNWSDCILPEGKVEVLLGMKVQGDIKECGQGYRYQAMACYDQNGRLVETSRCNSHGYIEEACIIPCPSDCKLSEWSNWSRCSKSCGSGVKVRSKWLREKPYNGGRPCPKLDHVNQAQVYEVVPCHSDCNQYLWVTEPWSICKVTFVNMRENCGEGVQTRKVRCMQNTADGPSEHVEDYLCDPEEMPLGSRVCKLPCPEDCVISEWGPWTQCVLPCNQSSFRQRSADPIRQPADEGRSCPNAVEKEPCNLNKNCYHYDYNVTDWSTCQLSEKAVCGNGIKTRMLDCVRSDGKSVDLKYCEALGLEKNWQMNTSCMVECPVNCQLSDWSPWSECSQTCGLTGKMIRRRTVTQPFQGDGRPCPSLMDQSKPCPVKPCYRWQYGQWSPCQVQEAQCGEGTRTRNISCVVSDGSADDFSKVVDEEFCADIELIIDGNKNMVLEESCSQPCPGDCYLKDWSSWSLCQLTCVNGEDLGFGGIQVRSRPVIIQELENQHLCPEQMLETKSCYDGQCYEYKWMASAWKGSSRTVWCQRSDGINVTGGCLVMSQPDADRSCNPPCSQPHSYCSETKTCHCEEGYTEVMSSNSTLEQCTLIPVVVLPTMEDKRGDVKTSRAVHPTQPSSNPAGRGRTWFLQPFGPDGRLKTWVYGVAAGAFVLLIFIVSMIYLACKKPKKPQRRQNNRLKPLTLAYDGDADM

SEQ ID NO: 9659 - protein, 370 aa, Homo sapiens
MANYSHAADNILQNLSPLTAFLKLTSLGFIIGVSVVGNLLISILLVKDKTLHRAPYYFLLDLCCSDILRSAICFPFVFNSVKNGSTWTYGTLTCKVIAFLGVLSCFHTAFMLFCISVTRYLAIAHHRFYTKRLTFWTCLAVICMVWTLSVAMAFPPVLDVGTYSFIREEDQCTFQHRSFRANDSLGFMLLLALILLATQLVYLKLIFFVHDRRKMKPVQFVAAVSQNWTFHGPGASGQAAANWLAGFGRGPTPPTLLGIRQNANTTGRRRLLVLDEFKMEKRISRMFYIMTFLFLTLWGPYLVACYWRVFARGPVVPGGFLTAAVWMSFAQAGINPFVCIFSNRELRRCFSTTLLYCRKSRLPREPYCVI

SEQ ID NO: 9660 - protein, 216 aa, Homo sapiens
MGWIRGRRSRHSWEMSEFHNYNLDLKKSDFSTRWQKQRCPVVKSKCRENASPFFFCCFIAVAMGIRFIIMVAIWSAVFLNSLFNQEVQIPLTESYCGPCPKNWICYKNNCYQFFDESKNWYESQASCMSQNASLLKVYSKEDQDLLKLVKSYHWMGLVHIPTNGSWQWEDGSILSPNLLTIIEMQKGDCALYASSFKGYIENCSTPNTYICMQRTV

SEQ ID NO: 9661 - protein, 633 aa, Homo sapiens
MALLLVSLLAFLSLGSGCHHRICHCSNRVFLCQESKVTEIPSDLPRNAIELRFVLTKLRVIQKGAFSGFGDLEKIEISQNDVLEVIEADVFSNLPKLHEIRIEKANNLLYINPEAFQNLPNLQYLLISNTGIKHLPDVHKIHSLQKVLLDIQDNINIHTIERNSFVGLSFESVILWLNKNGIQEIHNCAFNGTQLDELNLSDNNNLEELPNDVFHGASGPVILSELHPICNKSILRQEVDYMTQARGQRSSLAEDNESSYSRGFDMTYTEFDYDLCNEVVDVTCSPKPDAFNPCEDIMGYNILRVLIWFISILAITGNIIVLVILTTSQYKLTVPRFLMCNLAFADLCIGIYLLLIASVDIHTKSQYHNYAIDWQTGAGCDAAGFFTVFASELSVYTLTAITLERWHTITHAMQLDCKVQLRHAASVMVMGWIFAFAAALFPIFGISSYMKVSICLPMDIDSPLSQLYVMSLLVLNVLAFVVICGCYIHIYLTVRNPNIVSSSSDTRIAKRMAMLIFTDFLCMAPISFFAISASLKVPLITVSKAKILLVLFHPINSCANPFLYAIFTKNFRRDFFILLSKCGCYEMQAQIYRTETSSTVHNTHPRNGHCSSAPRVTSGSTYILVPLSHLAQN

SEQ ID NO: 9662 - protein, 958 aa, Homo sapiens [sequence omitted]

SEQ ID NO: 9663 - protein, 364 aa, Homo sapiens
MAAISTSIPVISQPQFTAMNEPQCFYNESIAFFYNRSGKHLATEWNTVSKLVMGLGITVCIFIMLANLLVMVAIYVNRRFHFPIYYLMANLAAADFFAGLAYFYLMFNTGPNTRRLTVSTWLLRQGLIDTSLTASVANLLAIAIERHITVFRMQLHTRMSNRRVVVVIVVIWTMAIVMGAIPSVGWNCICDIENCSNMAPLYSDSYLVFWAIFNLVTFVVMVVLYAHIFGYVRQRTMRMSRHSSGPRRNRDTMMSLLKTVVIVLGAFIICWTPGLVLLLLDVCCPQCDVLAYEKFFLLLAEFNSAMNPIIYSYRDKEMSATFRQILCCQRSENPTGPTEGSDRSASSLNHTILAGVHSNDHSVV

SEQ ID NO: 9664 - protein, 884 aa, Homo sapiens [sequence omitted]

SEQ ID NO: 9665 - protein, 749 aa, Homo sapiens
MEAETGSSVETGKKANRGTRIALVVFVGGTLVLGTILFLVSQGLLSLQAKQEYCLKPECIEAAAAILSKVNLSVDPCDNFFRFACDGWISNNPIPEDMPSYGVYPWLRHNVDLKLKELLEKSISRRRDTEAIQKAKILYSSCMNEKAIEKADAKPLLHILRHSPFRWPVLESNIGPEGVWSERKFSLLQTLATFRGQYSNSVFIRLYVSPDDKASNEHILKLDQATLSLAVREDYLDNSTEAKSYRDALYKFMVDTAVLLGANSSRAEHDMKSVLRLEIKIAEIMIPHENRTSEAMYNKMNISELSAMIPQFDWLGYIKKVIDTRLYPHLKDISPSENVVVRVPQYFKDLFRILGSERKKTIANYLVWRMVYSRIPNLSRRFQYRWLEFSRVIQGTTTLLPQWDKCVNFIESALPYVVGKMFVDVYFQEDKKEMMEELVEGVRWAFIDMLEKENEWMDAGTKRKAKEKARAVLAKVGYPEFIMNDTHVNEDLKAIKFSEADYFGNVLQTRKYLAQSDFFWLRKAVPKTEWFTNPTTVNAFYSASTNQIRFPAGELQKPFFWGTEYPRSLSYGAIGVIVGHEFTHGFDNNGRKYDKNGNLDPWWSTESEEKFKEKTKCMINQYSNYYWKKAGLNVKGKRTLGENIADNGGLREAFRAYRKWINDRRQGLEEPLLPGITFTNNQLFFLSYAHVRCNSYRPEAAREQVQIGAHSPPQFRVNGAISNFEEFQKAFNCPPNSTMNRGMDSCRLW

SEQ ID NO: 9666 - protein, 1185 aa, Homo sapiens
MGDMTNSDFYSKNQRNESSHGGEFGCTMEELRSLMELRGTEAVVKIKETYGDTEAICRRLKTSPVEGLPGTAPDLEKRKQIFGQNFIPPKKPKTFLQLVWEALQDVTLIILEIAAIISLGLSFYHPPGEGNEGCATAQGGAEDEGEAEAGWIEGAAILLSVICVVLVTAFNDWSKEKQFRGLQSRIEQEQKFTVVRAGQVVQIPVAEIVVGDIAQVKYGDLLPADGLFIQGNDLKIDESSLTGESDQVRKSVDKDPMLLSGTHVMEGSGRMLVTAVGVNSQTGIIFTLLGAGGEEEEKKDKKGVKKGDGLQLPAADGAAASNAADSANASLVNAKQQDGAAAMEMQPLKSAEGGDADDRKKASMHKKEKSVLQGKLTKLAVQIGKAGLVMSAITVIILVLYFTVDTFVVNKKPWLPECTPVYVQYFVKFFIIGVTVLVVAVPEGLPLAVTISLAYSVKKMMKDNNLVRHLDACETMGNATAICSDKTGTLTTNRMTVVQAYVGDVHYKEIPDPSSINTKTMELLINAIAINSAYTTKILPPEKEGALPRQVGNKTECGLLGFVLDLKQDYEPVRSQMPEEKLYKVYTFNSVRKSMSTVIKLPDESFRMYSKGASEIVLKKCCKILNGAGEPRVFRPRDRDEMVKKVIEPMACDGLRTICVAYRDFPSSPEPDWDNENDILNELTCICVVGIEDPVRPEVPEAIRKCQRAGITVRMVTGDNINTARAIAIKCGIIHPGEDFLCLEGKEFNRRIRNEKGEIEQERIDKIWPKLRVLARSSPTDKHTLVKGIIDSTHTEQRQVVAVTGDGTNDGPALKKADVGFAMGIAGTDVAKEASDIILTDDNFSSIVKAVMWGRNVYDSISKFLQFQLTVNVVAVIVAFTGACITQDSPLKAVQMLWVNLIMDTFASLALATEPPTETLLLRKPYGRNKPLISRTMMKNILGHAVYQLALIFTLLFVGEKMFQIDSGRNAPLHSPPSEHYTIIFNTFVMMQLFNEINARKIHGERNVFDGIFRNPIFCTIVLGTFAIQIVIVQFGGKPFSCSPLQLDQWMWCIFIGLGELVWGQVIATIPTSRLKFLKEAGRLTQKEEIPEEELNEDVEEIDHAERELRRGQILWFRGLNRIQTQIEVVNTFKSGASFQGALRRQSSVTSQSQDVANLSSPSRVSLSNALSSPTSLPPAAAGQG

SEQ ID NO: 9667 - protein, 180 aa, Homo sapiens
NNFSTEINTTSILVGPLVSNLEITHTSNLTCVKFSNTIDTTKSQCIRWVTPPTRIVCLPLGIFFVFGSLAYRCLNGFSEPMCFLSFLVPPMTIYTEQYLYNYVIPKPHNKTVLILPFVIRAGVLGGLSTGIGGITTSTQFYYKLSQELKGDMEQVTDSLVTLQDHHNSLAAVVLQNQRAL

SEQ ID NO: 9668 - protein, 179 aa, Homo sapiens
NNFSTEINTTSILVGPLVSNLEIIHTSNLTCVKFSNTIATANSQCIRRVTPPTRIVCLTSGIFFVCGTSAYRCLNGSSESMCFLSFLVPPMTIYTEQNLYNHVAPKPRNKRVPILPFVIGAGVLGGLGTGPGGITASTQFYKLSQELNGDMERVADSLVTLQDQLNSLAAVVLQNQTAL

SEQ ID NO: 9669 - protein, 315 aa, Homo sapiens
MVLASGNSSSHPVSFILLGIPGLESFQLWIAFPFCATYAVAVVGNITLLHVIRIDHTLHEPMYLFLAMLAITDLVLSSSTQPKMLAIFWFHAHEIQYHACLIQVFFIHAFSSVESGVLMAMALDCYVATCFPLRHSSILTPSVVIKLGTIVMLRGLLWVSPFCFMVSRMPFCQHQAIPQSYCEHMAVLKLVCADTSISRGYGLFVAFSVAGFDMIVIGMSYVMILRAVLQLPSGEARLKAFSTRASHICVILALYIPALFSFLTYRFGHDVPRVVHILFANLYLLIPPMLNPIIYGVRTKQIGDRVIQGCCGNIP

SEQ ID NO: 9670 - protein, 329 aa, Homo sapiens
MTLVSFFSFLSKPLIMLLSNSSWRLSQPSFLLVGIPGLEESQHWIALPLGILYLLALVGNVTILFIIWMDPSLHQSMYLFLSMLAAIDLVLASSTAPKALAVLLVHAHEIGYIVCLIQMFFIHAFSSMESGVLVAMALDCYVAICHPLHHSTILHPGVIGCIGMVVLVRGLLLLIPFPILLGKLIFCQATIIGHAYCEHMAVVKLACSETTVNRAYGLTMALLVIGLDVLAIGVSYAHILQAVLKVPGSEARLKAFSTCGSHICVILVFYVPGIFSFLTHRFGHHVPHHVHVLLATWYLLMPPALNPLVYGVKTQQIRQRVLRVFTQKD

SEQ ID NO: 9671 - protein, 62 aa, Homo sapiens
MSYQLYNYPNKTLLFSKHSFRIMHIFTTFINLYSFLHIQLNIFNKTIYWPGRVAHTHNPNIL

SEQ ID NO: 9672 - protein, 123 aa, Homo sapiens
MSTLSNFTQTLEDVFRRIFITYMDNWRQNTTAEQEALQAKVDAENFYYVILYLMVMIGMFSFIIVAILVSTVKSKRREHSNDPYHQYIVEDWQEKYKSQILNLEESKATIHENIGAAGFKMSP

SEQ ID NO: 9673 - protein, 513 aa, Homo sapiens
MSSKPEPKDVHQLNGTGPSASPCSSDGPGREPLAGTSEFLGPDGAGVEVVIESRANAKGVREEDALLENGSQSNESDDVSTDRGPAPPSPLKETSFSIGLQVLFPFLLAGFGTVAAGMVLDIVQHWEVFQKVTEVFILVPALLGLKGNLEMTLASRLSTAANIGHMDTPKELWRMITGNMALIQVQATVVGFLASIAAVVFGWIPDGHFSIPHAFLLCASSVATAFIASLVLGMIMIGVIIGSRKIGINPDNVATPIAASLGDLITLALLSASAGGLYLELNHWRYIYPLVCAFFVALLPVWVVLARRSPATREVLYSGWEPVIIAMAISSVGGLILDKTVSDPNFAGMAVFTPVINGVGGNLVAVQASRISTFLHMNGMPGENSEQAPRRCPSPCTTFFSPDVNSRSARVLFLLAVPGHLVFLYTISCMQGGHTTLTLIFIIFYMTAALLQVLILLYIADWMVHWMWGRGLDPDNFSIPYLTALGDLLGTGLLALSFHVLWLIGDRDTDVGD

SEQ ID NO: 9674 - protein, 205 aa, Homo sapiens [sequence omitted]

SEQ ID NO: 9675 - protein, 320 aa, Homo sapiens
MSFLNGTSLTPASFILNGIPGLEDVHLWISFPLCTMYSIAITGNFGLMYLIYCDEALHRPMYVFLALLSFTDVLMCTSTLPNTLFILWFNLKEIDFKACLAQMFFVHTFTGMESGVLMLMALDHCVAICFPLRYATILTNSVIAKAGFLTFLRGVMLVIPSTFLTKRLPYCKGNVIPHTYCDHMSVAKISCGNVRVNAIYGLIVALLIGGFDILCITISYTMILQAVVSLSSADARQKAFSTCTAHFCAIVLTYVPAFFTFFTHHFGGHTIPLHIHIIMANLYLLMPPTMNPIVYGVKTRQVRESVIRFFLKGKDNSHNF

SEQ ID NO: 9676 - protein, 379 aa, Homo sapiens
  VARIANT 179: Xaa = Any Amino Acid
MSAGNGTPWGSAAGEEVWAGSGVEVEGSELPTFSAAAKVRVGVTIVLFVSSAGGNLAVLWSVTRREPSQLRPSPVRRLFIHLAAADLLVTFVVMPLDATWNITVQWLAVDIACRTLMFLKLMATYSAAFLPVVIGLDRQAAVLNPLGSRSGVRKLLGAAWGLSFLLAFPQLFLFHTVHXAGPVPFTQCVTKGSFKAQWQETTYNLFTFCCLFLLPLTAMAICYSRIVLSVSRPQTRKGSHAPAGEFALPRSFDNCPRVRLRALRLALLILLTFILCWTPYYLLGMWYWFSPTMLTEVPPSLSHILFLLGLLNAPLDPLLYGAFTLGCRRGHQELSIDSSKEGSGRMLQEEIHAFRQLEVQKTVTSRRAGETKGISITSI

SEQ ID NO: 9677 - protein, 310 aa, Homo sapiens [sequence omitted]

SEQ ID NO: 9678 - protein, 319 aa, Homo sapiens [sequence omitted]

SEQ ID NO: 9679 - protein, 387 aa, Homo sapiens
MNVSGCPGAGNASQAGGGGGWHPEAVIVPLLFALIFLVGTVGNTLVLAVLLRGGQAVSTTNLFILNLGVADLCFILCCVPFQATIYTLDGWVFGSLLCKAVHFLIFLTMHASSFTLAAVSLDRYLAIRYPLHSRELRTPRNALAAIGLIWGLSLLFSGPYLSYYRQSQLANLTVCHPAWSAPRRRAMDICTFVFSYLLPVLVLGLTYARTLRYLWRAVDPVAAGSGARRAKRKVTRMILIVAALFCLCWMPHHALILCVWFGQFPLTRATYALRILSHLVSYANSCVNPIVYALVSKHFRKGFRTICAGLLGRAPGRASGRVCAAARGTHSGSVLERESSDLLHMSEAAGALRPCPGASQPCILEPCPGPSWQGPKAGDSILTVDVA

SEQ ID NO: 9680 - protein, 287 aa, Homo sapiens
MHRLMGVNSTAAAAAGQPNVSCTCNCKRSLFQSMEITELEFVQIIIIVVVMMVMVVVITCLLSHYKLSARSFISRHSQGRRREDALSSEGCLWPSESTVSGNGIPEPQVYAPPRPTDRLAVPPFAQRERFHRFQPTYPYLQHEIDLPPTISLSDGEEPPPYQGPCTLQLRDPEQQLELNRESVRAPPNRTIFDSDLMDSARLGGPCPPSSNSGISATCYGSGGRMEGPPPTYSEVIGHYPGSSFQHQQSSGPPSLLEGTRLHHTHIAPLESAAIWSKEKDKQKGHPL

SEQ ID NO: 9681 - protein, 312 aa, Homo sapiens
MGLNTSASTFQLTGFPGMEKAHHWIFIPLLAAYISILLGSGTLLFLIRNDHNLHEPMYYFLAMLAATDLGVTLTTMPTVLGVLWLDHRETGHGACFSQAYFIHTLSVMESGVLLAMAYDCFIAIHNPLRYISILTNTQVMKIGVGVLTRAGLSIMPIVVRLHWFPYCRAHVFSHAFCLHQDVIKLACADITLNRLYPVVVLFAMVLLDFLIIFFSYILILKTVMGIGSGGERAKALNTCVSHICCILVFYVTVVCLTFIHRFGKHVPHVVHITMRYIHFLFPPFMNPFIYSIKTKQIQSGILRLFSLPHSRA

SEQ ID NO: 9682 - protein, 391 aa, Homo sapiens
MFPNGTASSPSSSPSPSPGSCGEGGGSRGPGAGAADGMEEPGRNASQNGTLSEGQGSAILISFIYSVVCLVGLCGNSMVIYVILRYAKMKTATNIYILNLAIADELLMLSVPFLVTSTLLRHWPFGALLCRLVLSVDAVNMFTSIYCLTVLSVDRYVAVVHPIKAARYRRPTVAKVVNLGVWVLSLLVILPIVVFSRTAANSDGTVACNMLMPEPAQRWLVGFVLYTFLMGFLLPVGAICLCYVLIIAKMRMVALKAGWQQRKRSERKITLMVMMVVMVFVICWMPFYVVQLVNVFAEQDDATVSQLSVILGYANSCANPILYGFLSDNFKRSFQRILCLSWMDNAAEEPVDYYATALKSRAYSVEDFQPENLESGGVFRNGTCTSRITTL

SEQ ID NO: 9683 - protein, 399 aa, Homo sapiens
MENLQTNFSLVQGSTKKLNGMGDDGSPPAKKMITDIHVNGKTINKVPTVKKEHLDDYGEAPVETDGEHVKRTCTSVPETLHLNPSLKHTLAQFHLSSQSSLGGPAAFSARHSQESMSPTVFLPLPSPQVLPGPLLIPSDSSTELTQTVLEGESISCFQVGGEKRLCLPQVLNSVLREFTLQQINTVCDELYIYCSRCTSDQLHILKVLGILPFNAPSCGLITLTDAQRLCNALLRPRTFPQNGSVLPAKSSLAQLKETGSAFEVEHECLGKCQGLFAPQFYVQPDAPCIQCLECCGMFAPQTFVMHSHRSPDKRTCHWGFESAKWHCYLHVNQKYLGTPEEKKLKIILEEMKEKFSMRSGKRNQSKTDAPSGMELQSWYPVIKQEGDHVSQTHSFLHPS

SEQ ID NO: 9684 - protein, 415 aa, Homo sapiens
MENLQTNFSLVQGSTKKLNGMGDDGSPPAKKMITDIHVNGKTINKVPTVKKEHLDDYGEAPVETDGEHVKRTCTSVPETLHLNPSLKHTLAQFHLSSQSSLGGPAAFSARHSQESMSPTVFLPLPSPQVLPGPLLIPSDSSTELTQTVLEGESISCFQVGGEKRLCLPQVLNSVLREFTLQQINTVCDELYIYCSRCTSDQLHILKVLGILPFNAPSCGLITLTDAQRLCNALLRPRTFPQNGSVLPAKSSLAQLKETGSAFEVEHECLGKCQGLFAPQFYVQPDAPCIQCLECCGMFAPQTFVMHSHRSPDKRTCHWGFESAKWHCYLHVNQKYLGTPEEKKLKIILEEMKEKFSMRSGKRNQSKASFLYQFLIMVMVYFEMKILCLVCNLTCMLNIAHATTTKYRLIYLYCSF

SEQ ID NO: 9685 - protein, 639 aa, Homo sapiens
MENLQTNFSLVQGSTKKLNGMGDDGSPPAKKMITDIHVNGKTINKVPTVKKEHLDDYGEAPVETDGEHVKRTCTSVPETLHLNPSLKHTLAQFHLSSQSSLGGPAAFSARHSQESMSPTVFLPLPSPQVLPGPLLIPSDSSTELTQTVLEGESISCFQVGGEKRLCLPQVLNSVLREFTLQQINTVCDELYIYCSRCTSDQLHILKVLGILPFNAPSCGLITLTDAQRLCNALLRPRTFPQNGSVLPAKSSLAQLKETGSAFEVEHECLGKCQGLFAPQFYVQPDAPCIQCLECCGMFAPQTFVMHSHRSPDKRTCHWGFESAKWHCYLHVNQKYLGTPEEKKLKIILEEMKEKFSMRSGKRNQSKTDAPSGMELQSWYPVIKQEGDHVSQTHSFLHPSYYLYMCDKVVAPNVSLTSAVSQSKELTKTEANAASISNNSTSKRKSESATCNLVRDINKVGIGLVAAASSPLLVKDVICEDDKGKIMEEVMRTYLKQQEKLNLILQKKQQLQMEVKMLSSSKSMKELTEEQQNLQKELESLQNEHAQRMEEFYVEQKDLEKKLEQIMKQKCTCDSNLEKDKEAEYAGQLAELRQRLDHAEADRQELQDELRQEREARQKLEMMIKELKLQILKSSKTAKE

SEQ ID NO: 9686 - protein, 684 aa, Homo sapiens
MENLQTNFSLVQGSTKKLNGMGDDGSPPAKKMITDIHVNGKTINKVPTVKKEHLDDYGEAPVETDGEHVKRTCTSVPETLHLNPSLKHTLAQFHLSSQSSLGGPAAFSARHSQESMSPTVFLPLPSPQVLPGPLLIPSDSSTELTQTVLEGESISCFQVGGEKRLCLPQVLNSVLREFTLQQINTVCDELYIYCSRCTSDQLHILKVLGILPFNAPSCGLITLTDAQRLCNALLRPRTFPQNGSVLPAKSSLAQLKETGSAFEVEHECLGKCQGLFAPQFYVQPDAPCIQCLECCGMFAPQTFVMHSHRSPDKRTCHWGFESAKWHCYLHVNQKYLGTPEEKKLKIILEEMKEKFSMRSGKRNQSKTDAPSGMELQSWYPVIKQEGDHVSQTHSFLHPSYYLYMCDKVVAPNVSLTSAVSQSKELTKTEASKSISRQSEKAHSSGKLQKTVSYPDVSLEEQEKMDLKTSRELCSRLDASISNNSTSKRKSESATCNLVRDINKVGIGLVAAASSPLLVKDVICEDDKGKIMEEVMRTYLKQQEKLNLILQKKQQLQMEVKMLSSSKSMKELTEEQQNLQKELESLQNEHAQRMEEFYVEQKDLEKKLEQIMKQKCTCDSNLEKDKEAEYAGQLAELRQRLDHAEADRQELQDELRQEREARQKLEMMIKELKLQILKSSKTAKE

SEQ ID NO: 9687 - protein, 312 aa, Homo sapiens
MDGDNQSENSQFLLLGISESPEQQRILFWMFLSMYLVTVLGNVLIILAISSDSHLHTPMYFFLANLSFTDLFFVTNTIPKMLVNFQSQNKAISYAGCLTQLYFLVSLVTLDNLILAVMAYDRYVATCCPLHYVTAMSPGLCVLLLSLCWGLSVLYGLLLTFLLTRVTFCGPREIHYLFCDMYILLWLACSNTHIIHTALIATGCFIFLTPLGFMTTSYVRIVRTILQMPSASKKYKTFSTCASHLGVVSLFYGTLAMVYLQPLHTYSMKDSVATVMYAVLTPMMNPFIYRLRNKDMHGAPGRVLWRPFQRPK

SEQ ID NO: 9688 - protein, 2871 aa, Homo sapiens [sequence omitted]

SEQ ID NO: 9689 - protein, 418 aa, Homo sapiens [sequence omitted]

SEQ ID NO: 9690 - protein, 386 aa, Homo sapiens
MRAAPLLLARAASLSLGFLFLLFFWLDRSVLAKELKFVTLVFRHGDRSPIDTFPTDPIKESSWPQGFGQLTQLGMEQHYELGEYIRKRYRKFLNESYKHEQVYIRSTDVDRTLMSAMTNLAALFPPEGVSIWNPILLWQPIPVHTVPLSEDQLLYLPFRNCPRFQELESETLKSEEFQKRLHPYKDFIATLGKLSGLHGQDLFGIWSKVYDPLYCESVHNFTLPSWATEDTMTKLRELSELSLLSLYGIHKQKEKSRLQGGVLVNEILNHMKRATQIPSYKKLIMYSAHDTTVSGLQMALDVYNGLLPPYASCHLTELYFEKGEYFVEMYYRNETQHEPYPLMLPGCSPSCPLERFAELVGPVIPQDWSTECMTTNSHQGTEDSTD

SEQ ID NO: 9691 - protein, 492 aa, Homo sapiens [sequence omitted]

SEQ ID NO: 9692 - protein, 241 aa, Homo sapiens
MQCFSFIKTMMILFNLLIFLCGAALLAVGIWVSIDGASFLKIFGPLSSSAMQFVNVGYFLIAAGVVVFALGFLGCYGAKTESKCALVTFFFILLLIFIAEVAAAVVALVYTTMAEHFLTLLVVPAIKKDYGSQEDFTQVWNTTMKGLKCCGFTNYTDFEDSPYFKENSAFPPFCCNDNVTNTANETCTKQKAHDQKVEGCFNQLLYDIRTNAVTVGGVAAGIGGLELAAMIVSMYLYCNLQ

SEQ ID NO: 9693 - protein, 1609 aa, Homo sapiens [sequence omitted]

SEQ ID NO: 9694 - protein, 376 aa, Homo sapiens [sequence omitted]

SEQ ID NO: 9695 - protein, 376 aa, Homo sapiens
MQWTSLLLLAGLFSLSQAQYEDDPHWWFHYLRSQQSTYYDPYDPYPYETYEPYPYGVDEGPAYTYGSPSPPDPRDCPQECDCPPNFPTAMYCDNRNLKYLPFVPSRMKYVYFQNNQITSIQEGVFDNATGLLWIALHGNQITSDKVGRKVFSKLRHLERLYLDHNNLTRMPGPLPRSLRELHLDHNQISRVPNNALEGLENLTALYLQHNEIQEVGSSMRGLRSLILLDLSYNHLRKVPDGLPSALEQLYMEHNNVYTVPDSYFRGAPKLLYVRLSHNSLTNNGLASNTFNSSSLLELDLSYNQLQKIPPVNTNLENLYLQGNRINEFSISSFCTVVDVVNFSKLQVLRLDGNEIKRSAMPADAPLCLRLASLIEI

SEQ ID NO: 9696 - protein, 2911 aa, Homo sapiens
MGRRRRLCLQLYFLWLGCVVLWAQGTAGQPQPPPPKPPRPQPPPQQVRSATAGSEGGFLAPEYREEGAAVASRVRRRGQQDVLRGPNVCGSRFHSYCCPGWKTLPGGNQCIVPICRNSCGDGFCSRPNMCTCSSGQISSTCGSKSIQQCSVRCMNGGTCADDHCQCQKGYIGTYCGQPVCENGCQNGGRCIAQPCACVYGFTGPQCERDYRTGPCFTQVNNQMCQGQLTGIVCTKTLCCATTGRAWGHPCEMCPAQPQPCRRGFIPNIRTGACQDVDECQAIPGICQGGNCINTVGSFECRCPAGHKQSETTQKCEDIDECSIIPGICETGECSNTVGSYFCVCPRGYVTSTDGSRCIDQRTGMCFSGLVNGRCAQELPGRMTKMQCCCEPGRCWGIGTIPEACPVRGSEEYRRLCMDGLPMGGIPGSAGSRPGGTGGNGFAPSGNGNGYGPGGTGFIPIPGGNGFSPGVGGAGVGAGGQGPIITGLTILNQTIDICKHHANLCLNGRCIPTVSSYRCECNMGYKQDANGDCIDVDECTSNPCTNGDCVNTPGSYYCKCHAGFQRTPTKQACIDIDECIQNGVLCKNGRCVNSDGSFQCICNAGFELTTDGKNCVDHDECTTTNMCLNGMCINEDGSFKCICKPGFVLAPNGRYCTDVDECQTPGICMNGHCINSEGSFRCDCPPGLAVGMDGRVCVDTHMRSTCYGGIKKGVCVRPFPGAVTKSECCCANPDYGFGEPCQPCPAKNSAEFHGLCSSGVGITVDGRDINECALDPDICANGICENLRGSYRCNCNSGYEPDASGRNCIDIDECLVNRLLCDNGLCRNTPGSYSCTCPPGYVFRTETETCEDINECESNPCVNGACRNNLGSFNCECSPGSKLSSTGLICIDSLKGTCWLNIQDSRCEVNINGATLKSECCATLGAAWGSPCERCELDTACPRGLARIKGVTCEDVNECEVFPGVCPNGRCVNSKGSFHCECPEGLTLDGTGRVCLDIRMEQCYLKWDEDECIHPVPGKFRMDACCCAVGAAWGTECEECPKPGTKEYETLCPRGAGFANRGDVLTGRPFYKDINECKAFPGMCTYGKCRNTIGSFKCRCNSGFALDMEERNCTDIDECRISPDLCGSGICVNTPGSFECECFEGYESGFMMMKNCMDIDGCERNPLLCRGGTCVNTEGSFQCDCPLGHELSPSREDCVDINECSLSDNLCRNGKCVNMIGTYQCSCNPGYQATPDRQGCTDIDECMIMNGGCDTQCTNSEGSYECSCSEGYALMPDGRSCADIDECENNPDICDGGQCTNIPGEYRCLCYDGFMASMDMKTCIDVNECDLNSNICMFGECENTKGSFICHCQLGYSVKKGTTGCTDVDECEIGAHNCDMHASCLNIPGSFKCSCREGWIGNGIKCIDLDECSNGTHQCSINAQCVNTPGSYRCACSEGFTGDGFTCSDVDECAENINLCENGQCLNVPGAYRCECEMGFTPASDSRSCQDIDECSFQNICVSGTCNNLPGMFHCICDDGYELDRTGGNCTDIDECADPINCVNGLCVNTPGRYECNCPPDFQLNPTGVGCVDNRVGNCYLKFGPRGDGSLSCNTEIGVGVSRSSCCCSLGKAWGNPCETCPPVNSTEYYTLCPGGEGFRPNPITIILEDIDECQELPGLCQGGNCINTFGSFQCECPQGYYLSEDTRICEDIDECFAHPGVCGPGTCYNTLGNYTCICPPEYMQVNGGHNCMDMRKSFCYRSYNGTTCENELPFNVTKRMCCCTYNVGKAGNKPCEPCPTPGTADFKTICGNIPGFTFDIHTGKAVDIDECKEIPGICANGVCINQIGSFRCECPTGFSYNDLLLVCEDIDECSNGDNLCQRNADCINSPGSYRCECAAGFKLSPNGACVDRNECLEIPNVCSHGLCVDLQGSYQCICHNGFKASQDQTMCMDVDECERHPCGNGTCKNTVGSYNCLCYPGFELTHNNDCLDIDECSSFFGQVCRNGRCFNEIGSFKCLCNEGYELTPDGKNCIDTNECVALPGSCSPGTCQNLEGSFRCICPPGYEVKSENCIDINECDEDPNICLFGSCTNTPGGFQCLCPPGFVLSDNGRRCFDTRQSFCFTNFENGKCSVPKAFNTTKAKCCCSKMPGEGWGDPCELCPKDDEVAFQDLCPYGHGTVPSLHDTREDVNECLESPGICSNGQCINTDGSFRCECPMGYNLDYTGVRCVDTDECSIGNPCGNGTCTNVIGSFECNCNEGFEPGPMMNCEDINECAQNPLLCALRCMNTFGSYECTCPIGYALREDQKMCKDLDECAEGLHDCESRGMMCKNLIGTFMCICPPGMARRPDGEGCVDENECRTKPGICENGRCVNIIGSYRCECNEGFQSSSSGTECLDNRQGLCFAEVLQTICQMASSSRNLVTKSECCCDGGRGWGHQCELCPLPGTAQYKKICPHGPGYTTDGRDIDECKVMPNLCTNGQCINTMGSFRCFCKVGYTTDISGTSCIDLDECSQSPKPCNYICKNTEGSYQCSCPRGYVLQEDGKTCKDLDECQTKQHNCQFLCVNTLGGFTCKCPPGFTQHHTACIDNNECGSQPLLCGGKGICQNTPGSFSCECQRGFSLDATGLNCEDVDECDGNHRCQHGCQNILGGYRCGCPQGYIQHYQWNQCVDENECSNPNACGSASCYNTLGSYKCACPSGFSFDQFSSACHDVNECSSSKNPCNYGCSNTEGGYLCGCPPGYYRVGQGHCVSGMGFNKGQYLSLDTEVDEENALSPEACYECKINGYPKKDSRQKRSIHEPDPTAVEQISLESVDMDSPVNMKFNLSHLGSKEHILELRPAIQPLNNHIRYVISQGNDDSVFRIHQRNGLSYLHTAKKKLMPGTYTLEITSIPLYKKKELKKLEESNEDDYLLGELGEALRMRLQIQLY

SEQ ID NO: 9697 - protein, 2809 aa, Homo sapiens
MTLEGLYLARGPLARLLLAWSALLCMAGGQGRWDGALEAAGPGRVRRRGSPGILQGPNVCGSRFHAYCCPGWRTFPGRSQCVVPICRRACGEGFCSQPNLCTCADGTLAPSCGVSRGSGCSVSCMNGGTCRGASCLCQKGYTGTVCGQPICDRGCHNGGRCIGPNRCACVYGFMGPQCERDYRTGPCFGQVGPEGCQHQLTGLVCTKALCCATVGRAWGLPCELCPAQPHPCRRGFIPNIHTGACQDVDECQAVPGLCQGGSCVNMVGSFHCRCPVGHRLSDSSAACEDYRAGACFSVLFGGRCAGDLAGHYTRRQCCCDRGRCWAAGPVPELCPPRGSNEFQQLCAQRLPLLPGHPGLFPGLLGFGSNGMGPPLGPARLNPHGSDARGIPSLGPGNSNIGTATLNQTIDICRHFTNLCLNGRCLPTPSSYRCECNVGYTQDVRGECIDVDECTSSPCHHGDCVNIPGTYHCRCYPGFQATPTRQACVDVDECIVSGGLCHLGRCVNTEGSFQCVCNAGFELSPDGKNCVDHNECATSTMCVNGVCLNEDGSFSCLCKPGFLLAPGGHYCMDIDECQTPGICVNGHCTNTEGSFRCQCLGGLAVGTDGRVCVDTHVRSTCYGAIEKGSCARPFPGTVTKSECCCANPDHGFGEPCQLCPAKNSAEFQALCSSGLGITTDGRDINECALDPEVCANGVCENLRGSYRCVCNLGYEAGASGKDCTDVDECALNSLLCDNGWCQNSPGSYSCSCPPGFHFWQDTEICKDVDECLSSPCVSGVCRNLAGSYTCKCGPGSRLDPSGTFCLDSTKGTCWLKIQESRCEVNLQGASLRSECCATLGAAWGSPCERCEIDPACARGFARMTGVTCDDVNECESFPGVCPNGRCVNTAGSFRCECPEGLMLDASGRLCVDVRLEPCFLRWDEDECGVTLPGKYRMDVCCCSIGAVWGVECEACPDPESLEFASLCPRGLGFASRDFLSGRPFYKDVNECKVFPGLCTHGTCRNTVGSFHCACAGGFALDAQERNCTDIDECRISPDLCGQGTCVNTPGSFECECFPGYESGFMLMKNCMDVDECARDPLLCRGGTCTNTDGSYKCQCPPGHELTAKGTACEDIDECSLSDGLCPHGQCVNVIGAFQCSCHAGFQSTPDRQGCVDINECRVQNGGCDVHCINTEGSYRCSCGQGYSLMPDGRACADVDECEENPRVCDQGHCTNMPGGHRCLCYDGFMATPDMRTCVDVDECDLNPHICLHGDCENTKGSFVCHCQLGYMVRKGATGCSDVDECEVGGHNCDSHASCLNIPGSFSCRCLPGWVGDGFECHDLDECISQEHRCSPRGDCLNVPGSYRCTCRQGFAGDGFFCEDRDECAENVDLCDNGQCLNAPGGYRCECEMGFDPTEDHRACQDVDECAQGNLCAFGSCENLPGMFRCICNGGYELDRGGGNCTDINECADPVNCINGVCINTPGSYLCSCPQDFELNPSGVGCVDTRAGNCFLETHDRGDSGISCSAEIGVGVTRASCCCSLGRAWGNPCELCPMANTTEYRTLCPGGEGFQPNRITVILEDIDECQELPGLCQGGDCVNTFGSFQCECPPGYHLSEHTRICEDIDECSTHSGICGPGTCYNTLGNYTCVCPAEYLQVNGGNNCMDMRKSVCFRHYNGTCQNELAFNVTRKMCCCSYNIGQAWNRPCEACPTPISPDYQILCGNQAPGFLTDIHTGKPLDIDECGEIPAICANGICINQIGSFRCECPAGFNYNSILLACEDVDECGSRESPCQQNADCINIPGSYRCKCTRGYKLSPGGACVGQNECREIPNVCSHGDCMDTEGSYMCLCHRGFQASADQTLCMDIDECDRQPCGNGTCKNIIGSYNCLCFPGFVVTHNGDCVDFDECTTLVGQVCRFGHCLNTAGSFHCLCQDGFELTADGKNCVDTNECLSLAGTCLPGTCQNLEGSFRCICPPGFQVQSDHCIDIDECSEEPNLCLFGTCTNSPGSFQCLCPPGFVLSDNGHRCFDTRQSFCFTRFEAGKCSVPKAFNTTKTRCCCSKRPGEGWGDPCELCPQEGSAAFQELCPFGHGAVPGPDDSREDVNECAENPGVCTNGVCVNTDGSFRCECPFGYSLDFTGINCVDTDECSVGHPCGQGTCTNVIGGFECACADGFEPGLMMTCEDIDECSLNPLLCAFRCHNTEGSYLCTCPAGYTLREDGAMCRDVDECADGQQDCHARGMECKNLIGTFACVCPPGMRPLPGSGEGCTDDNECHAQPDLCVNGRCVNTAGSFRCDCDEGFQPSPTLTECHDIRQGPCFAEVLQTMCRSLSSSSEAVTRAECCCGGGRGWGPRCELCPLPGTSAYRKLCPHGSGYTAEGRDVDECRMLAHLCAHGECINSLGSFRCHCQAGYTPDATATTCLDMDECSQVPKPCTFLCKNTKGSFLCSCPRGYLLEEDGRTCKDLDECTSRQHNCQFLCVNTVGAFTCRCPPGFTQHHQACFDNDECSAQPGPCGAHGHCHNTPGSFRCECHQGFTLVSSGHGCEDVNECDGPHRCQHGCQNQLGGYRCSCPQGFTQHSQWAQCVDENECALSPPTCGSASCRNTLGGFRCVCPSGFDFDQALGGCQDVDECAGRRGPCSYSCANTPGGFLCGCPQGYFRAGQGHCVSGLGFSPGPQDTPDKEELLSSEACYECKINGLSPRDRPRRSAHRDHQVNLATLDSEALLTLGLNLSHLGRAERILELRPALEGLEGRIRYVIVRGNEQGFFRMHHLRGVSSLQLGRRRPGPGTYRLEVVSHMAGPWGVQPEGQPGPWGQALRLKVQLQLL

SEQ ID NO: 9698 - protein, 2809 aa, Homo sapiens
MTLEGLYLARGPLARLLLAWSALLCMAGGQGRWDGALEAAGPGRVRRRGSPGILQGPNVCGSRFHAYCCPGWRTFPGRSQCVVPICRRACGEGFCSQPNLCTCADGTLAPSCGVSRGSGCSVSCMNGGTCRGASCLCQKGYTGTVCGQPICDRGCHNGGRCIGPNRCACVYGFMGPQCERDYRTGPCFGQVGPEGCQHQLTGLVCTKALCCATVGRAWGLPCELCPAQPHPCRRGFIPNIHTGACQDVDECQAVPGLCQGGSCVNMVGSFHCRCPVGHRLSDSSAACEDYRAGACFSVLFGGRCAGDLAGHYTRRQCCCDRGRCWAAGPVPELCPPRGSNEFQQLCAQRLPLLPGHPGLFPGLLGFGSNGMGPPLGPARLNPHGSDARGIPSLGPGNSNIGTATLNQTIDICRHFTNLCLNGRCLPTPSSYRCECNVGYTQDVRGECIDVDECTSSPCHHGDCVNIPGTYHCRCYPGFQATPTRQACVDVDECIVSGGLCHLGRCVNTEGSFQCVCNAGFELSPDGKNCVDHNECATSTMCVNGVCLNEDGSFSCLCKPGFLLAPGGHYCMDIDECQTPGICVNGHCTNTEGSFRCQCLGGLAVGTDGRVCVDTHVRSTCYGAIEKGSCARPFPGTVTKSECCCANPDHGFGEPCQLCPAKNSAEFQALCSSGLGITTDGRDINECALDPEVCANGVCENLRGSYRCVCNLGYEAGASGKDCTDVDECALNSLLCDNGWCQNSPGSYSCSCPPGFHFWQDTEICKDVDECLSSPCVSGVCRNLAGSYTCKCGPGSRLDPSGTFCLDSTKGTCWLKIQESRCEVNLQGASLRSECCATLGAAWGSPCERCEIDPACARGFARMTGVTCDDVNECESFPGVCPNGRCVNTAGSFRCECPEGLMLDASGRLCVDVRLEPCFLRWDEDECGVTLPGKYRMDVCCCSIGAVWGVECEACPDPESLEFASLCPRGLGFASRDFLSGRPFYKDVNECKVFPGLCTHGTCRNTVGSFHCACAGGFALDAQERNCTDIDECRISPDLCGQGTCVNTPGSFECECFPGYESGFMLMKNCMDVDECARDPLLCRGGTCTNTDGSYKCQCPPGHELTAKGTACEDIDECSLSDGLCPHGQCVNVIGAFQCSCHAGFQSTPDRQGCVDINECRVQNGGCDVHCINTEGSYRCSCGQGYSLMPDGRACADVDECEENPRVCDQGHCTNMPGGHRCLCYDGFMATPDMRTCVDVDECDLNPHICLHGDCENTKGSFVCHCQLGYMVRKGATGCSDVDECEVGGHNCDSHASCLNIPGSFSCRCLPGWVGDGFECHDLDECVSQEHRCSPRGDCLNVPGSYRCTCRQGFAGDGFFCEDRDECAENVDLCDNGQCLNAPGGYRCECEMGFDPTEDHRACQDVDECAQGNLCAFGSCENLPGMFRCICNGGYELDRGGGNCTDINECADPVNCINGVCINTPGSYLCSCPQDFELNPSGVGCVDTRAGNCFLETHDRGDSGISCSAEIGVGVTRASCCCSLGRAWGNPCELCPMANTTEYRTLCPGGEGFQPNRITVILEDIDECQELPGLCQGGDCVNTFGSFQCECPPGYHLSEHTRICEDIDECSTHSSICGPGTCYNTLGNYTCVCPAEYLQVNGGNNCMDMRKSVCFRHYNGTCQNELAFNVTRKMCCCSYNIGQAWNRPCEACPTPISPDYQILCGNQAPGFLTDIHTGKPLDIDECGEIPAICANGICINQIGSFRCECPAGFNYNSILLACEDVDECGSRESPCQQNADCINIPGSYRCKCTRGYKLSPGGACVGRNECREIPNVCSHGDCMDTEGSYMCLCHRGFQASADQTLCMDIDECDRQPCGNGTCKNIIGSYNCLCFPGFVVTHNGDCVDFDECTTLVGQVCRFGHCLNTAGSFHCLCQDGFELTADGKNCVDTNECLSLAGTCLPGTCQNLEGSFRCICPPGFQVQSDHCIDIDECSEEPNLCLFGTCTNSPGSFQCLCPPGFVLSDNGHRCFDTRQSFCFTRFEAGKCSVPKAFNTTKTRCCCSKRPGEGWGDPCELCPQEGSAAFQELCPFGHGAVPGPDDSREDVNECAENPGVCTNGVCVNTDGSFRCECPFGYSLDFTGINCVDTDECSVGHPCGQGTCTNVIGGFECACADGFEPGLMMTCEDIDECSLNPLLCAFRCHNTEGSYLCTCPAGYTLREDGAMCRDVDECADGQQDCHARGMECKNLIGTFACVCPPGMRPLPGSGEGCTDDNECHAQPDLCVNGRCVNTAGSFRCDCDEGFQPSPTLTECHDIRQGPCFAEVLQTMCRSLSSSSEAVTRAECCCGGGRGWGPRCELCPLPGTSAYRKLCPHGSGYTAEGRDVDECRMLAHLCAHGECINSLGSFRCHCQAGYTPDATATTCLDMDECSQVPKPCTFLCKNTKGSFLCSCPRGYLLEEDGRTCKDLDECTSRQHNCQFLCVNTVGAFTCRCPPGFTQHHQACFDNDECSAQPGPCGAHGHCHNTPGSFRCECHQGFTLVSSGHGCEDVNECDGPHRCQHGCQNQLGGYRCSCPQGFTQHSQWAQCVDENECALSPPTCGSASCRNTLGGFRCVCPSGFDFDQALGGCQDVDECAGRRGPCSYSCANTPGGFLCGCPQGYFRAGQGHCVSGLGFSPGPQDTPDKEELLSSEACYECKINGLSPRDRPRRSAHRDHQVNLATLDSEALLTLGLNLSHLGRAERILELRPALEGLEGRIRYVIVRGNEQGFFRMHHLRGVSSLQLGRRRPGPGTYRLEVVSHMAGPWGVQPEGQPGPWGQALRLKVQLQLL

SEQ ID NO: 9699 - protein, 128 aa, Homo sapiens
MGIQGGSVLFGLLLVLAVFCHSGHSLQCYNCPNPTADCKTAVNCSSDFDACLITKAGLQVYNKCWKFEHCNFNDVTTRLRENELTYYCCKKDLCNFNEQLENGGTSLSEKTVLLLVTPFLAAAWSLHP

SEQ ID NO: 9700 - protein, 516 aa, Homo sapiens
MDAMKRGLCCVLLLCGAVFVSPSQEIHARFRRGARSYQGCSEPRCFNGGTCQQALYFSDFVCQCPEGFAGKCCEIDTRATCYEDQGISYRGTWSTAESGAECTNWNSSALAQKPYSGRRPDAIRLGLGNHNYCRNPDRDSKPWCYVFKAGKYSSEFCSTPACSEGNSDCYFGNGSAYRGTHSLTESGASCLPWNSMILIGKVYTAQNPSAQALGLGKHNYCRNPDGDAKPWCHVLKNRRLTWEYCDVPSCSTCGLRQYSQPQFRIKGGLFADIASHPWQAAIFAKHRRSPGERFLCGGILISSCWILSAAHCFQERFPPHHLTVILGRTYRVVPGEEEQKFEVEKYIVHKEFDDDTYDNDIALLQLKSDSSRCAQESSVVRTVCLPPADLQLPDWTECELSGYGKHEALSPFYSERLKEAHVRLYPSSRCTSQHLLNRTVTDNMLCAGDTRSGGPQANLHDACQGDSGGPLVCLNDGRMTLVGIISWGLGCGQKDVPGVYTKVTNYLDWIRDNMRP

SEQ ID NO: 9701 - protein, 291 aa, Homo sapiens
MDAMKRGLCCVLLLCGAVFVSPSQEIHARFRRGARSYQVICRDEKTQMIYQQHQSWLRPVLRSNRVEYCWCNSGRAQCHSVPVKSCSEPRCFNGGTCQQALYFSDFVCQCPEGFAGKCCEIDTRATCYEDQGISYRGTWSTAESGAECTNWNSSALAQKPYSGRRPDAIRLGLGNHNYCRNPDRDSKPWCYVFKAGKYSSEFCSTPACSEGNSDCYFGNGSAYRGTHSLTESGASCLPWNSMILIGKVYTAQNPSAQALGLGKHNYCRTGRSVSSPATASMRPCPLSIRSG

SEQ ID NO: 9702 - protein, 562 aa, Homo sapiens
MDAMKRGLCCVLLLCGAVFVSPSQEIHARFRRGARSYQVICRDEKTQMIYQQHQSWLRPVLRSNRVEYCWCNSGRAQCHSVPVKSCSEPRCFNGGTCQQALYFSDFVCQCPEGFAGKCCEIDTRATCYEDQGISYRGTWSTAESGAECTNWNSSALAQKPYSGRRPDAIRLGLGNHNYCRNPDRDSKPWCYVFKAGKYSSEFCSTPACSEGNSDCYFGNGSAYRGTHSLTESGASCLPWNSMILIGKVYTAQNPSAQALGLGKHNYCRNPDGDAKPWCHVLKNRRLTWEYCDVPSCSTCGLRQYSQPQFRIKGGLFADIASHPWQAAIFAKHRRSPGERFLCGGILISSCWILSAAHCFQERFPPHHLTVILGRTYRVVPGEEEQKFEVEKYIVHKEFDDDTYDNDIALLQLKSDSSRCAQESSVVRTVCLPPADLQLPDWTECELSGYGKHEALSPFYSERLKEAHVRLYPSSRCTSQHLLNRTVTDNMLCAGDTRSGGPQANLHDACQGDSGGPLVCLNDGRMTLVGIISWGLGCGQKDVPGVYTKVTNYLDWIRDNMRP

SEQ ID NO: 9703 - protein, 411 aa, Homo sapiens
MNCCIGLGEKARGSHRASYPSLSALFTEASILGFGSFAVKAQWTEDCRKSTYPPSGPTYRGAVPWYTINLDLPPYKRWHELMLDKAPMLKVIVNSLKNMINTFVPSGKVMQVVDEKLPGLLGNFPGPFEEEMKGIAAVTDIPLGEIISFNIFYELFTICTSIVAEDKKGHLIHGRNMDFGVFLGWNINNDTWVITEQLKPLTVNLDFQRNNKTVFKASSFAGYVGMLTGFKPGLFSLTLNERFSINGGYLGILEWILGKKDAMWIGFLTRTVLENSTSYEEAKNLLTKTKILAPAYFILGGNQSGEGCVITRDRKESLDVYELDAKQGRWYVVQTNYDRWKHPFFLDDRRTPAKMCLNRTSQENISFETMYDVLSTKPVLNKLTVYTTLIDVTKGQFETYLRDCPDPCIGW

SEQ ID NO: 9704 - protein, 389 aa, Homo sapiens
MNCCIGLGEKARGSHRASYPSLSALFTEASILGFGSFAVKAQWTEDCRKSTYPPSGPTVFPAVIRYRGAVPWYTINLDLPPYKRWHELMLDKAPVPGLLGNFPGPFEEEMKGIAAVTDIPLGEIISFNIFYELFTVCTSIVAEDKKGHLIHGRNMDFGVFLGWNINNDTWVITEQLKPLTVNLDFQRNNKTVFKASSFAGYVGMLTGFKPGLFSLTLNERFSINGGYLGILEWILGKKDAMWIGFLTRTVLENSTSYEEAKNLLTKTKILAPAYFILGGNQSGEGCVITRDRKESLDVYELDAKQGRWYVVQTNYDRWKHPFFLDDRRTPAKMCLNRTSQENISFETMYDVLSTKPVLNKLTVYTTLIDVTKGQFETYLRDCPDPCIGW

SEQ ID NO: 9705 - protein, 395 aa, Homo sapiens
MPGRSCVALVLLAAAVSCAVAQHAPPWTEDCRKSTYPPSGPTYRGAVPWYTINLDLPPYKRWHELMLDKAPMLKVIVNSLKNMINTFVPSGKVMQVVDEKLPGLLGNFPGPFEEEMKGIAAVTDIPLGEIISFNIFYELFTICTSIVAEDKKGHLIHGRNMDFGVFLGWNINNDTWVITEQLKPLTVNLDFQRNNKTVFKASSFAGYVGMLTGFKPGLFSLTLNERFSINGGYLGILEWILGKKDAMWIGFLTRTVLENSTSYEEAKNLLTKTKILAPAYFILGGNQSGEGCVITRDRKESLDVYELDAKQGRWYVVQTNYDRWKHPFFLDDRRTPAKMCLNRTSQENISFETMYDVLSTKPVLNKLTVYTTLIDVTKGQFETYLRDCPDPCIGW

SEQ ID NO: 9706 - protein, 836 aa, Homo sapiens
MIPFLPMFSLLLLLIVNPINANNHYDKILAHSRIRGRDQGPNVCALQQILGTKKKYFSTCKNWYKKSICGQKTTVLYECCPGYMRMEGMKGCPAVLPIDHVYGTLGIVGATTTQRYSDASKLREEIEGKGSFTYFAPSNEAWDNLDSDIRRGLESNVNVELLNALHSHMINKRMLTKDLKNGMIIPSMYNNLGLFINHYPNGVVTVNCARIIHGNQIATNGVVHVIDRVLTQIGTSIQDFIEAEDDLSSFRAAAITSDILEALGRDGHFTLFAPTNEAFEKLPRGVLERFMGDKVASEALMKYHILNTLQCSESIMGGAVFETLEGNTIEIGCDGDSITVNGIKMVNKKDIVTNNGVIHLIDQVLIPDSAKQVIELAGKQQTTFTDLVAQLGLASALRPDGEYTLLAPVNNAFSDDTLSMVQRLLKLILQNHILKVKVGLNELYNGQILETIGGKQLRVFVYRTAVCIENSCMEKGSKQGRNGAIHIFREIIKPAEKSLHEKLKQDKRFSTFLSLLEAADLKELLTQPGDWTLFVPTNDAFKGMTSEEKEILIRDKNALQNIILYHLTPGVFIGKGFEPGVTNILKTTQGSKIFLKEVNDTLLVNELKSKESDIMTTNGVIHVVDKLLYPADTPVGNDQLLEILNKLIKYIQIKFVRGSTFKEIPVTVYTTKIITKVVEPKIKVIEGSLQPIIKTEGPTLTKVKIEGEPEFRLIKEGETITEVIHGEPIIKKYTKIIDGVPVEITEKETREERIITGPEIKYTRISTGGGETEETLKKLLQEEVTKVTKFIEGGDGHLFEDEEIKRLLQGDTPVRKLQANKKVQGSRRRLREGRSQ

SEQ ID NO: 9707 - protein, 779 aa, Homo sapiens [sequence omitted]

SEQ ID NO: 9708 - protein, 655 aa, Homo sapiens
MFINIKSILWMCSTLIVTHALHKVKVGKSPPVRGSLSGKVSLPCHFSTMPTLPPSYNTSEFLRIKWSKIEVDKNGKDLKETTVLVAQNGNIKIGQDYKGRVSVPTHPEAVGDASLTVVKLLASDAGLYRCDVMYGIEDTQDTVSLTVDGVVFHYRAATSRYTLNFEAAQKACLDVGAVIATPEQLFAAYEDGFEQCDAGWLADQTVRYPIRAPRVGCYGDKMGKAGVRTYGFRSPQETYDVYCYVDHLDGDVFHLTVPSKFTFEEAAKECENQDARLATVGELQAAWRNGFDQCDYGWLSDASVRHPVTVARAQCGGGLLGVRTLYRFENQTGFPPPDSRFDAYCFKRPDRCKMNPCLNGGTCYPTETSYVCTCVPGYSGDQCELDFDECHSNPCRNGATCVDGFNTFRCLCLPSYVGALCEQDTETCDYGWHKFQGQCYKYFAHRRTWDAAERECRLQGAHLTSILSHEEQMFVNRVGHDYQWIGLNDKMFEHDFRWTDGSTLQYENWRPNQPDSFFSAGEDCVVIIWHENGQWNDVPCNYHLTYTCKKGTVACGQPPVVENAKTFGKMKPRYEINSLIRYHCKDGFIQRHLPTIRCLGNGRWAIPKITCMNPSAYQRTYSMKYFKNSSSAKDNSINTSKHDHRWSRRWQESRR

SEQ ID NO: 9709 - protein, 1642 aa, Homo sapiens
MFINIKSILWMCSTLIVTHALHKVKVGKSPPVRGSLSGKVSLPCHFSTMPTLPPSYNTSEFLRIKWSKIEVDKNGKDLKETTVLVAQNGNIKIGQDYKGRVSVPTHPEAVGDASLTVVKLLASDAGLYRCDVMYGIEDTQDTVSLTVDGVVFHYRAATSRYTLNFEAAQKACLDVGAVIATPEQLFAAYEDGFEQCDAGWLADQTVRYPIRAPRVGCYGDKMGKAGVRTYGFRSPQETYDVYCYVDHLDGDVFHLTVPSKFTFEEAAKECENQDARLATVGELQAAWRNGFDQCDYGWLSDASVRHPVTVARAQCGGGLLGVRTLYRFENQTGFPPPDSRFDAYCFKPKEATTIDLSILAETASPSLSKEPQMVSDRTTPIIPLVDELPVIPTEFPPVGNIVSFEQKATVQPQAITDSLATKLPTPTGSTKKPWDMDDYSPSASGPLGKLDISEIKEEVLQSTTGVSHYATDSWDGVVEDKQTQESVTQIEQIEVGPLVTSMEILKHIPSKEFPVTETPLVTARMILESKTEKKMVSTVSELVTTGHYGFTLGEEDDEDRTLTVGSDESTLIFDQIPEVITVSKTSEDTIHTHLEDLESVSASTTVSPLIMPDNNGSSMDDWEERQTSGRITEEFLGKYLSTTPFPSQHRTEIELFPYSGDKILVEGISTVIYPSLQTEMTHRRERTETLIPEMRTDTYTDEIQEEITKSPFMGKTEEEVFSGMKLSTSLSEPIHVTESSVEMTKSFDFPTLITKLSAEPTEVRDMEEDFTATPGTTKYDENITTVLLAHGTLSVEAATVSKWSWDEDNTTSKPLESTEPSASSKLPPALLTTVGMNGKDKDIPSFTEDGADEFTLIPDSTQKQLEEVTDEDIAAHGKFTIRFQPTTSTGIAEKSTLRDSTTEEKVPPITSTEGQVYATMEGSALGEVEDVDLSKPVSTVPQFAHTSEVEGLAFVSYSSTQEPTTYVDSSHTIPLSVIPKTDWGVLVPSVPSEDEVLGEPSQDILVIDQTRLEATISPETMRTTKITEGTTQEEFPWKEQTAEKPVPALSSTAWTPKEAVTPLDEQEGDGSAYTVSEDELLTGSERVPVLETTPVGKIDHSVSYPPGAVTEHKVKTDEVVTLTPRIGPKVSLSPGPEQKYETEGSSTTGFTSSLSPFSTHITQLMEETTTEKTSLEDIDLGSGLFEKPKATELIEFSTIKVTVPSDITTAFSSVDRLHTTSAFKPSSAITKKPPLIDREPGEETTSDMVIIGESTSHVPPTTLEDIVAKETETDIDREYFTTSSPPATQPTRPPTVEDKEAFGPQALSTPQPPASTKFHPDINVYIIEVRENKTGPDRCKMNPCLNGGTCYPTETSYVCTCVPGYSGDQCELDFDECHSNPCRNGATCVDGFNTFRCLCLPSYVGALCEQDTETCDYGWHKFQGQCYKYFAHRRTWDAAERECRLQGAHLTSILSHEEQMFVNRVGHDYQWIGLNDKMFEHDFRWTDGSTLQYENWRPNQPDSFFSAGEDCVVIIWHENGQWNDVPCNYHLTYTCKKGTVACGQPPVVENAKTFGKMKPRYEINSLIRYHCKDGFIQRHLPTIRCLGNGRWAIPKITCMNPSAYQRTYSMKYFKNSSSAKDNSINTSKHDHRWSRRWQESRR

SEQ ID NO: 9710 - protein, 1899 aa, Homo sapiens
MRSRLPPALAALGAALLLSSIEAEGMECLTRAEADIVLLVDGSWSIGRANFRTVRSFISRIVEVFDIGPKRVQIALAQYSGDPRTEWQLNAHRDKKSLLQAVANLPYKGGNTLTGMALNFIRQQNFRTQAGMRPRARKIGVLITDGKSQDDVEAPSKKLKDEGVELFAIGIKNADEVELKMIATDPDDTHDYNVADFESLSRIVDDLTINLCNSVKGPGDLEAPSNLVISERTHRSFRVSWTPPSDSVDRYKVEYYPVSGGKRQEFYVSRMETSTVLKDLKPETEYVVNVYSVVEDEYSEPLKGTEKTLPVPVVSLNIYDVGPTTMHVQWQPVGGATGYILSYKPVKDTEPTRPKEVRLGPTVNDMQLTDLVPNTEYAVTVQAVLHDLTSEPVTVREVTLPLPRPQDLKLRDVTHSTMNVFWEPVPGKVRKYIVRYKTPEEDVKEVEVDRSETSTSLKDLFSQTLYTVSVSAVHDEGESPPVTAQETTRPVPAPTNLKITEVTSEGFRGTWDHGASDVSLYRITWGPFGSSDKMETILNGDENTLVFENLNPNTIYEVSITAIYADESESDDLIGSERTLPILTTQAPKSGPRNLQVYNATSNSLTVKWDPASGRVQKYRITYQPSTGEGNEQTTTIGGRQNSVVLQKLKPDTPYTITVSSLYPDGEGGRMTGRGKTKPLNTVRNLRVYDPSTSTLNVRWDHAEGNPRQYKLFYAPAAGGPEELVPIPGNTNYAILRNLQPDTSYTVTVVPVYTEGDGGRTSDTGRTLMRGLARNVQVYNPTPNRLGVRWDPAPGPVLQYRVVYSPVDGTRPSESIVVPGNTRMVHLERLIPDTLYSVNLVALYSDGEGNPSPAQGRTLPRSGPRNLRVFGETTNSLSVAWDHADGPVQQYRIIYSPTVGDPIDEYTTVPGRRNNVILQPLQPDTPYKITVIAVYEDGDGGHLTGNGRTVGLLPPQNIHISDEWYTRFRVSWDPSPSPVLGYKIVYKPVGSNEPMEAFVGEMTSYTLHNLNPSTTYDVNVYAQYDSGLSVPLTDQGTTLYLNVTDLKTYQIGWDTFCVKWSPHRAATSYRLKLSPADGTRGQEITVRGSETSHCFTGLSPDTDYGVTVFVQTPNLEGPGVSVKEHTTVKPTEAPTEPPTPPPPPTIPPARDVCKGAKADIVFLTDASWSIGDDNFNKVVKFIFNTVGGFDEISPAGIQVSFVQYSDEVKSEFKLNTYNDKALALGALQNIRYRGGNTRTGKALTFIKEKVLTWESGMRKNVPKVLVVVTDGRSQDEVKKAALVIQQSGFSVFVVGVADVDYNELANIASKPSERHVFIVDDFESFEKIEDNLITFVCETATSSCPLIYLDGYTSPGFKMLEAYNLTEKNFASVQGVSLESGSFPSYSAYRIQKNAFVNQPTADLHPNGLPPSYTIILLFRLLPETPSDPFAIWQITDRDYKPQVGVIADPSSKTLSFFNKDTRGEVQTVTFDTEEVKTLFYGSFHKVHIVVTSKSVKIYIDCYEIIEKDIKEAGNITTDGYEILGKLLKGERKSAAFQIQSFDIVCSPVWTSRDRCCDIPSRRDEGKCPAFPNSCTCTQDSVGPPGPPGPAGGPGAKGPRGERGISGAIGPPGPRGDIGPPGPQGPPGPQGPNGLSIPGEQGRQGMKGDAGEPGLPGRTGTPGLPGPPGPMGPPGDRGFTGKDSAMGPRGPPGRPGSPGSPGVTGPSGKPGKPGDHGRPGPSGLKGEKGDRGDIASQNMMRAVARQVCEQLISGQMNRFNQMLNQIPNDYQSSRNQPGPPGPPGPPGSAGARGEPGPGGRPGFPGTPGMQGPPGERGLPGEKGERGTGSSGPRGLPGPPGPQGESRTGPPGSTGSRGPPGPPGRPGNSGIQGPPGPPGYCDSSQCASIPYNGQSYPGSG

SEQ ID NO: 9711 - protein, 3064 aa, Homo sapiens
MRSRLPPALAALGAALLLSSIEAEVDPPSDLNFKIIDENTVHMSWAKPVDPIVGYRITVDPTTDGPTKEFTLSASTTETLLSELVPETEYVVTITSYDEVEESVPVIGQLTIQTGSSTKPVEKKPGKTEIQKCSVSAWTDLVFLVDGSWSVGRNNFKYILDFIAALVSAFDIGEEKTRVGVVQYSSDTRTEFNLNQYYQRDELLAAIKKIPYKGGNTMTGDAIDYLVKNTFTESAGARVGFPKVAIIITDGKSQDEVEIPARELRNVGVEVFSLGIKAADAKELKQIASTPSLNHVFNVANFDAIVDIQNEIISQVCSGVDEQLGELVSGEEVVEPPSNLIAMEVSSKYVKLNWNPSPSPVTGYKVILTPMTAGSRQHALSVGPQTTTLSVRDLSADTEYQISVSAMKGMTSSEPISIMEKTQPMKVQVECSRGVDIKADIVFLVDGSYSIGIANFVKVRAFLEVLVKSFEISPNRVQISLVQYSRDPHTEFTLKKFTKVEDIIEAINTFPYRGGSTNTGKAMTYVREKIFVPSKGSRSNVPKVMILITDGKSSDAFRDPAIKLRNSDVEIFAVGVKDAVRSELEAIASPPAETHVFTVEDFDAFQRISFELTQSICLRIEQELAAIKKKAYVPPKDLSFSEVTSYGFKTNWSPAGENVFSYHITYKEAAGDDEVTVVEPASSTSVVLSSLKPETLYLVNVTAEYEDGFSIPLAGEETTEEVKGAPRNLKVTDETTDSFKITWTQAPGRVLRYRIIYRPVAGGESREVTTPPNQRRRTLENLIPDTKYEVSVIPEYFSGPGTPLTGNAATEEVRGNPRDLRVSDPTTSTMKLSWSGAPGKVKQYLVTYTPVAGGETQEVTVRGDTTNTVLQGLKEGTQYALSVTALYASGAGDALFGEGTTLEERGSPQDLVTKDITDTSIGAYWTSAPGMVRGYRVSWKSLYDDVDTGEKNLPEDAIHTMIENLQPETKYRISVFATYSSGEGEPLTGDATTELSQDSKTLKVDEETENTMRVTWKPAPGKVVNYRVVYRPHGRGKQMVAKVPPTVTSTVLKRLQPQTTYDITVLPIYKMGEGKLRQGSGTTASRFKSPRNLKTSDPTMSSFRVTWEPAPGEVKGYKVTFHPTGDDRRLGELVVGPYDNTVVLEELRAGTTYKVNVFGMFDGGESSPLVGQEMTTLSDTTVMPILSSGMECLTRAEADIVLLVDGSWSIGRANFRTVRSFISRIVEVFDIGPKRVQIALAQYSGDPRTEWQLNAHRDKKSLLQAVANLPYKGGNTLTGMALNFIRQQNFRTQAGMRPRARKIGVLITDGKSQDDVEAPSKKLKDEGVELFAIGIKNADEVELKMIATDPDDTHAYNVADFESLSRIVDDLTINLCNSVKGPGDLEAPSNLVISERTHRSFRVSWTPPSDSVDRYKVEYYPVSGGKRQEFYVSRMETSTVLKDLKPETEYVVNVYSVVEDEYSEPLKGTEKTLPVPVVSLNIYDVGPTTMHVQWQPVGGATGYILSYKPVKDTEPTRPKEVRLGPTVNDMQLTDLVPNTEYAVTVQAVLHDLTSEPVTVREVTLPLPRPQDLKLRDVTHSTMNVFWEPVPGKVRKYIVRYKTPEEDVKEVEVDRSETSTSLKDLFSQTLYTVSVSAVHDEGESPPVTAQETTRPVPAPTNLKITEVTSEGFRGTWDHGASDVSLYRITWAPFGSSDKMETILNGDENTLVFENLNPNTIYEVSITAIYPDESESDDLIGSERTLPILTTQAPKSGPRNLQVYNATSNSLTVKWDPASGRVQKYRITYQPSTGEGNEQTTTIGGRQNSVVLQKLKPDTPYTITVSSLYPDGEGGRMTGRGKTKPLNTVRNLRVYDPSTSTLNVRWDHAEGNPRQYKLFYAPAAGGPEELVPIPGNTNYAILRNLQPDTSYTVTVVPVYTEGDGGRTSDTGRTLMRGLARNVQVYNPTPNSLDVRWDPAPGPVLQYRVVYSPVDGTRPSESIVVPGNTRMVHLERLIPDTLYSVNLVALYSDGEGNPSPAQGRTLPRSGPRNLRVFGETTNSLSVAWDHADGPVQQYRIIYSPTVGDPIDEYTTVPGRRNNVILQPLQPDTPYKITVIAVYEDGDGGHLTGNGRTVGLLPPQNIHISDEWYTRFRVSWDPSPSPVLGYKIVYKPVGSNEPMEAFVGEMTSYTLHNLNPSTTYDVNVYAQYDSGLSVPLTDQGTTLYLNVTDLKTYQIGWDTFCVKWSPHRAATSYRLKLSPADGTRGQEITVRGSETSHCFTGLSPDTDYGVTVFVQTPNLEGPGVSVKEHTTVKPTEAPTEPPTPPPPPTIPPARDVCKGAKADIVFLTDASWSIGDDNFNKVVKFIFNTVGGFDEISPAGIQVSFVQYSDEVKSEFKLNTYNDKALALGALQNIRYRGGNTRTGKALTFIKEKVLTWESGMRKNVPKVLVVVTDGRSQDEVKKAALVIQQSGRFSVFVVGVADVDYNELANIASKPSERHVFIVDDFESFEKIEDNLITFVCETATSSCPLIYLDGYTSPGFKMLEAYNLTEKNFASVQGVSLESGSFPSYSAYRIQKNAFVNQPTADLHPNGLPPSYTIILLFRLLPETPSDPFAIWQITDRDYKPQVGVIADPSSKTLSFFNKDTRGEVQTVTFDTEEVKTLFYGSFHKVHIVVTSKSVKIYIDCYEIIEKDIKEAGNITTDGYEILGKLLKGERKSAAFQIQSFDIVCSPVWTSRDRCCDIPSRRDEGKCPAFPNSCTCTQDSVGPPGPPGPAGGPGAKGPRGERGISGAIGPPGPRGDIGPPGPQGPPGPQGPNGLSIPGEQGRQGMKGDAGEPGLPGRTGTPGLPGPPGPMGPPGDRGFTGKDGAMGPRGPPGPPGSPGSPGVTGPSGKPGKPGDHGRPGPSGLKGEKGDRGDIASQNMMRAVARQVCEQLISGQMNRFNQMLNQIPNDYQSSRNQPGPPGPPGPPGSAGARGEPGPGGRPGFPGTPGMQGPPGERGLPGEKGERGTGSSGPRGLPGPPGPQGESRTGPPGSTGSRGPPGPPGRPGNSGIRGPPGPPGYCDSSQCASIPYNGQGYPGSG

SEQ ID NO: 9712 - protein, 182 aa, Homo sapiens
LGSSPGPPRQVCLVTAGGRCFFPELGTSLSAMRFLAATFLLLALSTAAQAEPVQFKDCGSVDGVIKEVNVSPCPTQPCQLSKGQSYSVNVTFTSNIQSKSSKAVVHGILMGVPVPFPIPEPDGCKSGINCPIQKDKTYSYLNKLPVKSEYPSIKLVVEWQLQDDKNQSLFCWEIPVQIVSHL

SEQ ID NO: 9713 - protein, 535 aa, Homo sapiens
IPKAGLSSGFIGCVRELRIQGEEIVFHDLNLTAHGISHCPTCRDRPCQNGGQCHDSESSSYVCVCPAGFTGSRCEHSQALHCHPEACGPDATCVNRPDGRGYTCRCHLGRSGLRCEEAVAAAGVTVTTPSLSGAGSYLALPALTNTHHELRLDVEFKPLAPDGVLLFSGGKSGPVEDFVSLAMVGGHLEFRYELGSGLAVLRSAEPLALGRWHRVSAERLNKDGSLRVNGGRPVLRSSPGKSQGLNLHTLLYLGGVEPSVPLSPATNMSAHFRGCVGEVSVNGKRLDLTYSFLGSQGIGQCYDSSPCERQPCQHGATCMPAGEYEFQCLCRDGFKGGETGIGRAHGPNGEDGNLGLLSPHPLFLRSLPEVPETIELEVRTSTASGLLLWQGVEVGEAGQGKDFISLGLQDGHLVFRYQLGSGEARLVSEDPINDGEWHRVTALREGRRGSIQVDGEELVSGRSPGPNVAVNAKGSVYIGGAPDVATLTGGRFSSGITGCVKNLVLHSARPGAPPPQPLDLQHRAQAGANTRPCPS

SEQ ID NO: 9714 - protein, 670 aa, Homo sapiens
MGVSLRDKKVHWVYQLGEAGPAVLSIDEDIGEQFAAVSLDRTLQFGHMSVTVERQMIQETKGDTVAPGAEGLLNLRPDDFVFYVGGYPSTFTPPPLLRFPGYRGCIEMDTLNEEVVSLYNFERTFQLDTAVDRPCARSKSTGDPWLTDGSYLDGTGFARISFDSQISTTKRFEQELRLVSYSGVLFFLKQQIQVFLLGGSRKRVLVRVERATVYSVEQDNDLELADAYYLGGVPPDQLPPSLRRLFPTGGSVRGCVKGIKALGKYVDLKRLNTTGVSAGCTADLLVGRAMTFHGHGFLRLALSNVAPLTGNVYSGFGFHSAQDSALLYYRASPDGLCQVSLQQGRVSLQLLRTEVKTQAGFADGAPHYVAFYSNATGVWLYVDDQLQQMKPHRGPPPELQPQPEGPPRLLLGGLPESGTIYNFSGCISNVFVQRLLGPQRVFDLQQNLGSVNVSTGCAPALQAQTPGLGPRGLQATARKASRRSRQPARHPACMLPPHLRTTRDSYQFGGSLSSHLEFVGILARHRNWPSLSMHVLPRSSRGLLLFTARLRPGSPSLALFLSNGHFVAQMEGLGTRLRAQSRQRSRPGRWHKVSVRWEKNRILLVTDGARAWSQEGPHRQHQGAEHPQPHTLFVGGLPASSHSSKLPTSQELHCLMWAWNWRCGPWQSPD

SEQ ID NO: 9715 - protein, 1016 aa, Homo sapiens
MAPRTLWSCYLCCLLTAAAGAASYPPRGFSLYTGSSGALSPGGPQAQIAPRPASRHRNWCAYVVTRTVSCVLEDGVETYVKYQPCAWGQPQCPQSIMYRRFLRPRYRVAYKTVTDMEWRCCQGYGGDDCAESPAPALGPASSTPRPLARPARPNLSGSSAGSPLSGLGGEGPGESEKVQQLEEQVQSLTKELQGLRGVLQGLSGRLAEDVQRAVETAFNGRQQPADAAARPGVHETLNEIQHQLQLLDTRVSTHDQELGHLNNHHGGSSSSGGSRAPAPASAPPGPSEELLRQLEQRLQESCSVCLAGLDGFRRQQQEDRERLRAMEKLLASVEERQRHLAGLAVGRRPPQECCSPELGRRLAELERRLDVVAGSVTVLSGRRGTELGGAAGQGGHPPGYTSLASRLSRLEDRFNSTLGPSEEQEESWPGAPGGLSHWLPAARGRLEQLGGLLANVSGELGGRLDLLEEQVAGAMQACGQLCSGAPGEQDSQVSEILSALERRVLDSEGQLRLVGSGLHTVEAAGEARQATLEGLQEVVGRLQDRVDAQDETAAEFTLRLNLTAARLGQLEGLLQAHGDEGCGACGGVQEELGRLRDGVERCSCPLLPPRGPGAGPGVGGPSRGPLDGFSVFGGSSGSALQALQGELSEVILSFSSLNDSLNELQTTVEGQGADLADLGATKDRIISEINRLQQEATEHATESEERFRGLEEGQAQAGQCPSLEGRLGRLEGVCERLDTVAGGLQGLREGLSRHVAGLWAGLRETNTTSQMQAALLEKLVGGQAGLGRRLGALNSSLQLLEDRLHQLSLKDLTGPAGEAGPPGPPGLQGPPGPAGPPGSPGKDGQEGPIGPPGPQGEQGVEGAPAAPVPQVAFSAALSLPRSEPGTVPFDRVLLNDGGYYDPETGVFTAPLAGRYLLSAVLTGHRHEKVEAVLSRSNQGVARVDSGGYEPEGLENKPVAESQPSPGTLGVFSLILPLQAGDTVCVDLVMGQLAHSEEPLTIFSGALLYGDPELEHA

SEQ ID NO: 9716 - protein, 502 aa, Homo sapiens
MSCPVPACCALLLVLGLCRARPRNALLLLADDGGFESGAYNNSAIATPHLDALARRSLLFRNAFTSVSSCSPSRASLLTGLPQHQNGMYGLHQDVHHFNSFDKVRSLPLLLSQAGVRTGIIGKKHVGPETVYPFDFAYTEENGSVLQVGRNITRIKLLVRKFLQTQDDRPFFLYVAFHDPHRCGHSQPQYGTFCEKFGNGESGMGRIPDWTPQAYDPLDVLVPYFVPNTPAARADLAAQYTTVGRMDQGVGLVLQELRDAGVLNDTLVIFTSDNGIPFPSGRTNLYWPGTAEPLLVSSPEHPKRWGQVSEAYVSLLDLTPTILDWFSIPYPSYAIFGSKTIHLTGRSLLPALEAEPLWATVFGSQSHHEVTMSYPMRSVQHRHFRLVHNLNFKMPFPIDQDFYVSPTFQDLLNRTTAGQPTGWYKDLRHYYYRARWELYDRSRDPHETQNLATDPRFAQLLEMLRDQLAKWQWETHDPWVCAPDGVLEEKLSPQCQPLHNEL

SEQ ID NO: 9717 - protein, 1030 aa, Homo sapiens
MKIFQRKMRYWLLPPFLAIVYFCTIVQGQVAPPTRLRYNVISHDSIQISWKAPRGKFGGYKLLVTPTSGGKTNQLNLQNTATKAIIQGLMPDQNYTVQIIAYNKDKESKPAQGQFRIKDLEKRKDPKPRVKVVDRGNGSRPSSPEEVKFVCQTPAIADIVILVDGSWSIGRFNFRLVRHFLENLVTAFDVGSEKTRIGLAQYSGDPRIEWHLNAFSTKDEVIEAVRNLPYKGGNTLTGLALNYIFENSFKPEAGSRTGVSKIGILITDGKSQDDIIPPSRNLRESGVELFAIGVKNADVNELQEIASEPDSTHVYNVAEFDLMHTVVESLTRTLCSRVEEQDREIKASAHAITGPPTELITSEVTARSFMVNWTHAPGNVEKYRVVYYPTRGGKPDEVVVDGTVSSTVLKNLMSLTEYQIAVFAIYAHTASEGLRGTETTLALPMASDLLLYDVTENSMRVKWDAVPGASGYLILYAPLTEGLAGDEKEMKIGETHTDIELSGLLPNTEYTVTVYAMFGEEASDPVTGQETTLALSPPRNLRISNVGSNSARLTWDPTSRQINGYRIVYNNADGTEINEVEVDPITTFPLKGLTPLTEYTIAIFSIYDEGQSEPLTGVFTTEEVPAQQYLEIDEVTTDSFRVTWHPLSADEGLHKLMWIPVYGGKTEEVVLKEEQDSHVIEGLEPGTEYEVSLLAVLDDGSESEVVTAVGTTLDSFWTEPATTIVPTTSVTSVFQTGIRNLVVGDETTSSLRVKWDISDSDVQQFRVTYMTAQGDPEEEVIGTVMVPGSQNNLLLKPLLPDTEYKVTVTPIYTDGEGVSVSAPGKTLPSSGPQNLRVSEEWYNRLRITWDPPSSPVKGYRIVYKPVSVPGPTLETFVGADINTILITNLLSGMDYNVKIFASQASGFSDALTGMVKTLFLGVTNLQAKHVEMTSLCAHWQVHRHATAYRVVIESLQDRQKQESTVGGGTTRHCFYGLQPDSEYKISVYTKLQEIEGPSVSIMEKTQSLPTRPPTFPPTIPPAKEGKRIIE

SEQ ID NO: 9718 - protein, 445 aa, Homo sapiens
GVCQTPAIADIVILVDGSWSIGRFNFRLVRHFLENLVTAFDVGSEKTRIGVKNADVNELQEIASEPDSTHVYNVAEFDLMHTVVESLTRTLCSRVEEQDREIKASAHAITGPPTELITSEVTARSFMVNWTHAPGNVEKYRVVYYPTRGGKPDEVVVDGTVSSTVLKNLMSLTEYQIAVFAIYAHTASEGLRGTETTLALPMASDLLLYDVTENSMRVKWDAVPGASGYLILYAPLTEGLAGDEKEMKIGETHTDIELSGLLPNTEYTVTVYAMFGEEASDPVTGQETTLALSPPRNLRISNVGSNSARLTWDPTSRQINGYRIVYNNADGTEINEVQILLKLWSNGFSLDDGELRPYNEPTNAQFLESVKRGLTPEIVSTPSSPEEEDKSILNAVVLIDDSVPTTKIQIRLADGSRLIQRFNSTHRILDVRNFIVQSRPEFAGS

SEQ ID NO: 9719 - protein, 1823 aa, Homo sapiens
MALSSAWRSVLPLWLLWSAACSRAASGDDNAFPFDIEGSSAVGRQDPPETSEPRVALGRLPPAAEKCNAGFFHTLSGECVPCDCNGNSNECLDGSGYCVHCQRNTTGEHCEKCLDGYIGDSIRGAPQFCQPCPCPLPHLANFAESCYRKNGAVRCICNENYAGPNCERCAPGYYGNPLLIGSTCKKCDCSGNSDPNLIFEDCDEVTGQCRNCLRNTTGFKCERCAPGYYGDARIAKNCAVCNCGGGPCDSVTGECLEEGFEPPTGMDCPTISCDKCVWDLTDALRLAALSIEEGKSGVLSVSSGAAAHRHVNEINATIYLLKTKLSERENQYALRKIQINNAENTMKSLLSDVEELVEKENQASRKGQLVQKESMDTINHASQLVEQAHDMRDKIQEINNKMLYYGEEHELSPKEISEKLVLAQKMLEEIRSRQPFFTQRELVDEEADEAYELLSQAESWQRLHNETRTLFPVVLEQLDDYNAKLSDLQEALDQALNYVRDAEDMNRATAARQRDHEKQQERVREQMEVVNMSLSTSADSLTTPRLTLSELDDIIKNASGIYAEIDGAKSELQVKLSNLSNLSHDLVQEAIDHAQDLQQEANELSRKLHSSDMNGLVQKALDASNVYENIVNYVSEANETAEFALNTTDRIYDAVSGIDTQIIYHKDESENLLNQARELQAKAESSSDEAVADTSRRVGGALARKSALKTRLSDAVKQLQAAERGDAQQRLGQSRLITEEANRTTMEVQQATAPMANNLTNWSQNLQHFDSSAYNTAVNSARDAVRNLTEVVPQLLDQLRTVEQKRPASNVSASIQRIRELIAQTRSVASKIQVSMMFDGQSAVEVHSRTSMDDLKAFTSLSLYMKPPVKRPELTETADQFILYLGSKNAKKEYMGLAIKNDNLVYVYNLGTKDVEIPLDSKPVSSWPAYFSIVKIERVGKHGKVFLTVPSLSSTAEEKFIKKGEFSGDDSLLDLDPEDTVFYVGGVPSNFKLPTSLNLPGFVGCLELATLNNDVISLYNFKHIYNMDPSTSVPCARDKLAFTQSRAASYFFDGSGYAVVRDITRRGKFGQVTRFDIEVRTPADNGLILLMVNGSMFFRLEMRNGYLHVFYDFGFSGGPVHLEDTLKKAQINDAKYHEISIIYHNDKKMILVVDRRHVKSMDNEKMKIPFTDIYIGGAPPEILQSRALRAHLPLDINFRGCMKGFQFQKKDFNLLEQTETLGVGYGCPEDSLISRRAYFNGQSFIASIQKISFFDGFEGGFNFRTLQPNGLLFYYASGSDVFSISLDNGTVIMDVKGIKVQSVDKQYNDGLSHFVISSVSPTRYELIVDKSRVGSKNPTKGKIEQTQASEKKFYFGGSPISAQYANFTGCISNAYFTRVDRDVEVEDFQRYTEKVHTSLYECPIESSPLFLLHKKGKNLSKPKASQNKKGGKSKDAPSWDPVALKLPERNTPRNSHCHLSNSPRAIEHAYQYGGTANSRQEFEHLKGDFGAKSQFSIRLRTRSSHGMIFYVSDQEENDFMTLFLAHGRLVYMFNVGHKKLKIRSQEKYNDGLWHDVIFIRERSSGRLVIDGLRVLEESLPPTEATWKIKGPIYLGGVAPGKAVKNVQINSIYSFSGCLSNLQLNGASITSASQTFSVTPCFEGPMETGTYFSTEGGYVVLDESFNIGLKFEIAFEVRPRSSSGTLVHGHSVNGEYLNVHMKNGQVIVKVNNGIRDFSTSVTPKQSLCDGRWHRITVIRDSNVVQLDVDSEVNHVVGPLNPKPIDHREPVFVGGVPESLLTPRLAPSKPFTGCIRHFVIDGHPVSFSKAALVSGAVSINSCPAA

SEQ ID NO: 9720 - protein, 240 aa, Homo sapiens
MLALLCSCLLLAAGASDAWTGEDSAEPNSDSAEWIRDMYAKVTEIWQEVMQRRDDDGTLHAACQVQPSATLDAAQPRVTGVVLFRQLAPRAKLDAFFALEGFPTEPNSSSRAIHVHQFGDLSQGCESTGPHYNPLAVPHPQHPGDFGNFAVRDGSLWRYRAGLAASLAGPHSIVGRAVVVHAGEDDLGRGGNQASVENGNAGRRLACCVVGVCGPGLWERQAREHSERKKRRRESECKAA

SEQ ID NO: 9721 - protein, 164 aa, Homo sapiens
MWDLVLSIALSVGCTGAVPLIQSRIVGGWECEKHSQPWQVAVYSHGWAHCGGVLVHPQWVLTAAHCLKKNSQVWLGRHNLFEPEDTGQRVPVSHSFPHPLYNMSLLKHQSLRPDEDSSHDLMLLRLSEPAKITDVVKVLGLPTQEPALGTTCYASGWGSIEPEE

SEQ ID NO: 9722 - protein, 261 aa, Homo sapiens
MWDLVLSIALSVGCTGAVPLIQSRIVGGWECEKHSQPWQVAVYSHGWAHCGGVLVHPQWVLTAAHCLKKNSQVWLGRHNLFEPEDTGQRVPVSHSFPHPLYNMSLLKHQSLRPDEDSSHDLMLLRLSEPAKITDVVKVLGLPTQEPALGTTCYASGWGSIEPEEFLRPRSLQCVSLHLLSNDMCARAYSEKVTEFMLCAGLWTGGKDTCGGDSGGPLVCNGVLQGITSWGPEPCALPEKPAVYTKVVHYRKWIKDTIAANP

SEQ ID NO: 9723 - protein, 222 aa, Homo sapiens
MWDLVLSIALSVGCTGAVPLIQSRIVGGWECEKHSQPWQVAVYSHGWAHCGGVLVHPQWVLTAAHCLKKNSQVWLGRHNLFEPEDTGQRVPVSHSFPHPLYNMSLLKHQSLRPDEDSSHDLMLLRLSEPAKITDVVKVLGLPTQEPALGTTCYASGWGSIEPEEFLRPRSLQCVSLHLLSNDMCARAYSEKVTEFMLCAGLWTGGKDTCGVSHPYSQHLEGK

SEQ ID NO: 9724 - protein, 541 aa, Homo sapiens
MKFLIFAFFGGVHLLSLCSGKAICKNGISKRTFEEIKEEIASCGDVAKAIINLAVYGKAQNRSYERLALLVDTVGPRLSGSKNLEKAIQIMYQNLQQDGLEKVHLEPVRIPHWERGEESAVMLEPRIHKIAILGLGSSIGTPPEGITAEVLVVTSFDELQRRASEARGKIVVYNQPYINYSRTVQYRTQGAVEAAKVGALASLIRSVASFSIYSPHTGIQEYQDGVPKIPTACITVEDAEMMSRMASHGIKIVIQLKMGAKTYPDTDSFNTVAEITGSKYPEQVVLVSGHLDSWDVGQGAMDDGGGAFISWEALSLIKDLGLRPKRTLRLVLWTAEEQGGVGAFQYYQLHKVNISNYSLVMESDAGTFLPTGLQFTGSEKARAIMEEVMSLLQPLNITQVLSHGEGTDINFWIQAGVPGASLLDDLYKYFFFHHSHGDTMTVMDPSRWMLLLLFGLLFLMLLQTWKKCCLGPRNSKKETFSCFWPGILGLQLWKTPLHITISSNSSSKHNSISCFLLLSFLILSKFSDSRKRNHSPLPPTT

SEQ ID NO: 9725 - protein, 472 aa, Homo sapiens
MKFLIFAFFGGVHLLSLCSGKAICKNGISKRTFEEIKEEIASCGDVAKAIINLAVYGKAQNRSYERLALLVDTVGPRLSGSKNLEKAIQIMYQNLQQDGLEKVHLEPVRIPHWERGEESAVMLEPRIHKIAILGLGSSIGTPPEGITAEVLVVTSFDELQRRASEARGKIVVYNQPYINYSRTVQYRTQGAVEAAKVGALASLIRSVASFSIYSPHTGIQEYQDGVPKIPTACITVEDAEMMSRMASHGIKIVIQLKMGAKTYPDTDSFNTVAEITGSKYPEQVVLVSGHLDSWDVGQGAMDDGGGAFISWEALSLIKDLGLRPKRTLRLVLWTAEEQGGVGAFQYYQLHKVNISNYSLVMESDAGTFLPTGLQFTGSEKARAIMEEVMSLLQPLNITQVLSHGEGTDINFWIQAGVPGASLLDDLYKYFFFHHSHGDTMTVMDPKQMNVAAAVWAVVSYVVADMEEMLPRS

SEQ ID NO: 9726 - protein, 467 aa, Homo sapiens
MWRCPLGLLLLLPLAGHLALGAQQGRGRRELAPGLHLRGIRDAGGRYCQEQDLCCRGRADDCALPYLGAICYCDLFCNRTVSDCCPDFWDFCLGVPPPFPPIQGCMHGGRIYPVLGTYWDNCNRCTCQENRQWQCDQEPCLVDPDMIKAINQGNYGWQAGNHSAFWGMTLDEGIRYRLGTIRPSSSVMNMHEIYTVLNPGEVLPTAFEASEKWPNLIHEPLDQGNCAGSWAFSTAAVASDRVSIHSLGHMTPVLSPQNLLSCDTHQQQGCRGGRLDGAWWFLRRRGVVSDHCYPFSGRERDEAGPAPPCMMHSRAMGRGKRQATAHCPNSYVNNNDIYQVTPVYRLGSNDKEIMKELMENGPVQALMEVHEDFFLYKGGIYSHTPVSLGRPERYRRHGTHSVKITGWGEETLPDGRTLKYWTAANSWGPAWGERGHFRIVRGVNECDIESFVLGVWGRVGMEDMGHH

SEQ ID NO: 9727 - protein, 984 aa, Homo sapiens
MEGDRVAGRPVLSSLPVLLLLPLLMLRAAALHPDELFPHGESWGDQLLQEGDDESSAVVKLANPLHFYEARFSNLYVGTNGIISTQDFPRETQYVDYDFPTDFPAIAPFLADIDTSHGRGRVLMTSKPNWICCLLGAPHRVNGKVSGHLHVGHTPVHFTDVDLHAYIVGNDGRAYTAISHIPQPAAQALLPLTPIGGLFGWLFALEKPGSENGFSLAGAAFTHDMEVTFYPGEETVRITQTAEGLDPENYLSIKTNIQGQVPYVSANFTAHISPYKELYHYSDSTVTSTSSRDYSLTFGAINQTWSYRIHQNITYQVCRHAPRHPSFPTTQQLNVDRVFALYNDEERVLRFAVTNQIGPVKEDSDPTPGNPCYDGSHMCDTTARCHPGTGVDYTCECASGYQGDGRNCVDENECATGFHRCGPNSVCINLPGSYRCECRSGYEFADDRHTCILITPPANPCEDGSHTCAPAGQARCVHHGGSTFSCACLPGYAGDGHQCTDVDECSENRCHPAATCYNTPGSFSCRCQPGYYGDGFQCIPDSTSSLTPCEQQQRHAQAQYAYPGARFHIPQCDEQGNFLPLQCHGSTGFCWCVDPDGHEVPGTQTPPGSTPPHCGPSPEPTQRPPTICERWRENLLEHYGGTPRDDQYVPQCDDLGHFIPLQCHGKSDFCWCVDKDGREVQGTRSQPGTTPACIPTVAPPMVRPTPRPDVTPPSVGTFLLYTQGQQIGYLPLNGTRLQKDAAKTLLSLHGSIIVGIDYDCRERMVYWTDVAGRTISRAGLELGAEPETIVNSGLISPEGLAIDHIRRTMYWTDSVLDKIESALLDGSERKVLFYTDLVNPRAIAVDPIRGNLYWTDWNREAPKIETSSLDGENRRILINTDIGLPNGLTFDPFSKLLCWADAGTKKLECTLPDGTGRRVIQNNLKYPFSIVSYADHFYHTDWRRDGVVSVNKHSGQFTDEYLPEQRSHLYGITAVYPYCPTGRK

SEQ ID NO: 9728 - protein, 1375 aa, Homo sapiens
MEGDRVAGRPVLSSLPVLLLLQLLMLRAAALHPDELFPHGESWGDQLLQEGDDESSAVVKLANPLHFYEARFSNLYVGTNGIISTQDFPRETQYVDYDFPTDFPAIAPFLADIDTSHGRGRVLYREDTSPAVLGLAARYVRAGFPRSARFTPTHAFLATWEQVGAYEEVKRGALPSGELNTFQAVLASDGSDSYALFLYPANGLQFLGTRPKESYNVQLQLPARVGFCRGEADDLKSEGPYFSLTSTEQSVKNLYQLSNLGIPGVWAFHIGSTSPLDNVRPAAVGDLSAAHSSVPLGRSFSHATALESDYNEDNLDYYDVNEEEAEYLPGEPEEALNGHSSIDVSFQSKVDTKPLEESSTLDPHTKEGTSLGEVGGPDLKGQVEPWDERETRSPAPPEVDRDSLAPSWETPPPYPENGSIQPYPDGGPVPSEMDVPPAHPEEEIVLRSYPASDHTTPLSRGTYEVGLEDNIGSNTEVFTYNAANKETCEHNHRQCSRHAFCTDYATGFCCHCQSKFYGNGKHCLPEGAPHRVNGKVSGHLHVGHTPVHFTDVDLHAYIVGNDGRAYTAISHIPQPAAQALLPLTPIGGLFGWLFALEKPGSENGFSLAGAAFTHDMEVTFYPGEETVRITQTAEGLDPENYLSIKTNIQGQVPYVPANFTAHISPYKELYHYSDSTVTSTSSRDYSLTFGAINQTWSYRIHQNITYQVCRHAPRHPSFPTTQQLNVDRVFALYNDEERVLRFAVTNQIGPVKEDSDPTPVNPCYDGSHMCDTTARCHPGTGVDYTCECASGYQGDGRNCVDENECATGFHRCGPNSVCINLPGSYRCECRSGYEFADDRHTCILITPPANPCEDGSHTCAPAGQARCVHHGGSTFSCACLPGYAGDGHQCTDVDECSENRCHPAATCYNTPGSFSCRCQPGYYGDGFQCIPDSTSSLTPCEQQQRHAQAQYAYPGARFHIPQCDEQGNFLPLQCHGSTGFCWCVDPDGHEVPGTQTPPGSTPPHCGPSPEPTQRPPTICERWRENLLEHYGGTPRDDQYVPQCDDLGHFIPLQCHGKSDFCWCVDKDGREVQGTRSQPGTTPACIPTVAPPMVRPTPRPDVTPPSVGTFLLYTQGQQIGYLPLNGTRLQKDAAKTLLSLHGSIIVGIDYDCRERMVYWTDVAGRTISRAGLELGAEPETIVNSGLISPEGLAIDHIRRTMYWTDSVLDKIESALLDGSERKVLFYTDLVNPRAIAVDPIRGNLYWTDWNREAPKIETSSLDGENRRILINTDIGLPNGLTFDPFSKLLCWADAGTKKLECTLPDGTGRRVIQNNLKYPFSIVSYADHFYHTDWRRDGVVSVNKHSGQFTDEYLPEQRSHLYGITAVYPYCPTGRK

SEQ ID NO: 9729 - protein, 275 aa, Homo sapiens
MRILQLILLALATGLVGGETRIIKGFECKPHSQPWQAALFEKTRLLCGATLIAPRWLLTAAHCLKPWVSLTSPTHVSPDLSSSNYCLSHLSRYIVHLGQHNLQKEEGCEQTRTATESFPHPGFNNSLPNKDHRNDIMLVKMASPVSITWAVRPLTLSSRCVTAGTSCLISGWGSTSSPQLRLPHTLRCANITIIEHQKCENAYPGNITDTMVCASVQEGGKDSCQGDSGGPLVCNQSLQGIISWGQDPCAITRKPGVYTKVCKYVDWIQETMKNN

SEQ ID NO: 9730 - protein, 282 aa, Homo sapiens
MQRLRWLRDWKSSGRGLTAAKEPGARSSPLQAMRILQLILLALATGLVGGETRIIKGFECKPHSQPWQAALFEKTRLLCGATLIAPRWLLTAAHCLKPRYIVHLGQHNLQKEEGCEQTRTATESFPHPGFNNSLPNKDHRNDIMLVKMASPVSITWAVRPLTLSSRCVTAGTSCLISGWGSTSSPQLRLPHTLRCANITIIEHQKCENAYPGNITDTMVCASVQEGGKDSCQGDSGGPLVCNQSLQGIISWGQDPCAITRKPGVYTKVCKYVDWIQETMKNN

SEQ ID NO: 9731 - protein, 250 aa, Homo sapiens
MRILQLILLALATGLVGGETRIIKGFECKPHSQPWQAALFEKTRLLCGATLIAPRWLLTAAHCLKPRYIVHLGQHNLQKEEGCEQTRTATESFPHPGFNNSLPNKDHRNDIMLVKMASPVSITWAVRPLTLSSRCVTAGTSCLISGWGSTSSPQLRLPHTLRCANITIIEHQKCENAYPGNITDTMVCASVQEGGKDSCQGDSGGPLVCNQSLQGIISWGQDPCAITRKPGVYTKVCKYVDWIQETMKNN

SEQ ID NO: 9732 - protein, 261 aa, Homo sapiens [sequence omitted]

SEQ ID NO: 9733 - protein, 828 aa, Homo sapiens
MLQGTCSVLLLWGILGAIQAQQQEVISPDTTERNNNCPEKTDCPIHVYFVLDTSESVTMQSPTDILLFHMKQFVPQFISQLQNEFYLDQVALSWRYGGLHFSDQVEVFSPPGSDRASFIKNLQGISSFRRGTFTDCALANMTEQIRQDRSKGTVHFAVVITDGHVTGSPCGGIKLQAERAREEGIRLFAVAPNQNLKEQGLRDIASTPHELYRNDYATMLPDSTEINQDTINRIIKVMKHEAYGECYKVSCLEIPGPSGPKGYRGQKGAKGNMGEPGEPGQKGRQGDPGIEGPIGFPGPKGVPGFKGEKGEFGADGRKGAPGLAGKNGTDGQKGKLGRIGPPGCKGDPGNRGPDGYPGEAGSPGERGDQGGKGDPGRPGRRGPPGEIGAKGSKGYQGNNGAPGSPGVKGAKGGPGPRGPKGEPGRRGDPGTKGSPGSDGPKGEKGDPGPEGPRGLAGEVGNKGAKGDRGLPGPRGPQGALGEPGKQGSRGDPGDAGPRGDSGQPGPKGDPGRPGFSYPGPRGAPGEKGEPGPRGPEGGRGDFGLKGEPGRKGEKGEPADPGPPGEPGPRGPRGVPGPEGEPGPPGDPGLTECDVMTYVRETCGCCDCEKRCGALDVVFVIDSSESIGYTNFTLEKNFVINVVNRLGAIAKDPKSETGTRVGVVQYSHEGTFEAIQLDDEHIDSLSSFKEAVKNLEWIAGGTWTPSALKFAYDRLIKESRRQKTRVFAVVITDGRHDPRDDDLNLRALCDRDVTVTAIGIGDMFHEKHESENLYSIACDKPQQVRNMTLFSDLVAEKFIDDMEDVLCPDPQIVCPDLPCQTGLDGAVLC

SEQ ID NO: 9734 - protein, 918 aa, Homo sapiens
MLQGTCSVLLLWGILGAIQAQQQEVISPDTTERNNNCPEKTDCPIHVYFVLDTSESVTMQSPTDILLFHMKQFVPQFISQLQNEFYLDQVALSWRYGGLHFSDQVEVFSPPGSDRASFIKNLQGISSFRRGTFTDCALANMTEQIRQDRSKGTVHFAVVITDGHVTGSPCGGIKLQAERAREEGIRLFAVAPNQNLKEQGLRDIASTPHELYRNDYATMLPDSTEINQDTINRIIKVMKHEAYGECYKVSCLEIPGPSGPKGYRGQKGAKGNMGEPGEPGQKGRQGDPGIEGPIGFPGPKGVPGFKGEKGEFGADGRKGAPGLAGKNGTDGQKGKLGRIGPPGCKGDPGNRGPDGYPGEAGSPGERGDQGGKGDPGRPGRRGPPGEIGAKGSKGYQGNNGAPGSPGVKGAKGGPGPRGPKGEPGRRGDPGTKGSPGSDGPKGEKGDPGPEGPRGLAGEVGNKGAKGDRGLPGPRGPQGALGEPGKQGSRGDPGDAGPRGDSGQPGPKGDPGRPGFSYPGPRGAPGEKGEPGPRGPEGGRGDFGLKGEPGRKGEKGEPADPGPPGEPGPRGPRGVPGPEGEPGPPGDPGLTECDVMTYVRETCGCCDCEKRCGALDVVFVIDSSESIGYTNFTLEKNFVINVVNRLGAIAKDPKSETGTRVGVVQYSHEGTFEAIQLDDEHIDSLSSFKEAVKNLEWIAGGTWTPSALKFAYDRLIKESRRQKTRVFAVVITDGRHDPRDDDLNLRALCDRDVTVTAIGIGDMFHEKHESENLYSIACDKPQQVRNMTLFSDLVAEKFIDDMEDVLCPDPQIVCPDLPCQTDAPWPGGEPPVTFLRTEEGPDATFPRTIPLIQQLLNATELTQDPAAYSQLVAVLVYTAERAKFATGVERQDWMELFIDTFKLVHRDIVGDPETALALC

SEQ ID NO: 9735 - protein, 1019 aa, Homo sapiens [sequence omitted]

SEQ ID NO: 9736 - protein, 957 aa, Homo sapiens
MGVRHPPCSHRLLAVCALVSLATAALLGHILLHDFLLVPRELSGSSPVLEETHPAHQQGASRPGPRDAQAHPGRPRAVPTQCDVPPNSRFDCAPDKAITQEQCEARGCCYIPAKQGLQGAQMGQPWCFFPPSYPSYKLENLSSSEMGYTATLTRTTPTFFPKDILTLRLDVMMETENRLHFTIKDPANRRYEVPLETPHVHSRAPSPLYSVEFSEEPFGVIVRRQLDGRVLLNTTVAPLFFADQFLQLSTSLPSQYITGLAEHLSPLMLSTSWTRITLWNRDLAPTPGANLYGSHPFYLALEDGGSAHGVFLLNSNAMDVVLQPSPALSWRSTGGILDVYIFLGPEPKSVVQQYLDVVGYPFMPPYWGLGFHLCRWGYSSTAITRQVVENMTRAHFPLDVQWNDLDYMDSRRDFTFNKDGFRDFPAMVQELHQGGRRYMMIVDPAISSSGPAGSYRPYDEGLRRGVFITNETGQPLIGKVWPGSTAFPDFTNPTALAWWEDMVAEFHDQVPFDGMWIDMNEPSNFIRGSEDGCPNNELENPPYVPGVVGGTLQAATICASSHQFLSTHYNLHNLYGLTEAIASHRALVKARGTRPFVISRSTFAGHGRYAGHWTGDVWSSWEQLASSVPEILQFNLLGVPLVGADVCGFLGNTSEELCVRWTQLGAFYPFMRNHNSLLSLPQEPYSFSEPAQQAMRKALTLRYALLPHLYTLFHQAHVAGETVARPLFLEFPKDSSTWTVDHQLLWGEALLITPVLQAGKAEVTGYFPLGTWYDLQTVPVEALGSLPPPPAAPREPAIHSEGQWVTLPAPLDTINVHLRAGYIIPLQGPGLTTTESRQQPMALAVALTKGGEARGELFWDDGESLEVLERGAYTQVIFLARNNTIVNELVRVTSEGAGLQLQKVTVLGVATAPQQVLSNGVPVSNFTYSPDTKARGPRVLDICVSLLMGEQFLVSWC

SEQ ID NO: 9737 - protein, 385 aa, Homo sapiens
MAAALFVLLGFALLGTHGASGAAGFVQAPLSQQRWVGGSVELHCEAVGSPVPEIQWWFEGQGPNDTCSQLWDGARLDRVHIHATYHQHAASTISIDTLVEEDTGTYECRASNDPDRNHLTRAPRVKWVRAQAVVLVLEPGTVFTTVEDLGSKILLTCSLNDSATEVTGHRWLKGGVVLKEDALPGQKTEFKVDSDDQWGEYSCVFLPEPMGTANIQLHGPPRVKAVKSSEHINEGETAMLVCKSESVPPVTDWAWYKITDSEDKALMNGSESRFFVSSSQGRSELHIENLNMEADPGQYRCNGTSSKGSDQAIITLRVRSHLAALWPFLGIVAEVLVLVTIIFIYEKRRKPEDVLDDDDAGSAPLKSSGQHQNDKGKNVRQRNSS

SEQ ID NO: 9738 - protein, 269 aa, Homo sapiens
MAAALFVLLGFALLGTHGASGAAGTVFTTVEDLGSKILLTCSLNDSATEVTGHRWLKGGVVLKEDALPGQKTEFKVDSDDQWGEYSCVFLPEPMGTANIQLHGPPRVKAVKSSEHINEGETAMLVCKSESVPPVTDWAWYKITDSEDKALMNGSESRFFVSSSQGRSELHIENLNMEADPGQYRCNGTSSKGSDQAIITLRVRSHLAALWPFLGIVAEVLVLVTIIFIYEKRRKPEDVLDDDDAGSAPLKSSGQHQNDKGKNVRQRNSS

SEQ ID NO: 9739 - protein, 1185 aa, Homo sapiens
MAPRPRARPGVAVACCWLLTVVLRCCVSFNVDVKNSMTFSGPVEDMFGYTVQQYENEEGKWVLIGSPLVGQPKNRTGDVYKCPVGRGESLPCVKLDLPVNTSIPNVTEVKENMTFGSTLVTNPNGGFLACGPLYAYRCGHLHYTTGICSDVSPTFQVVNSIAPVQECSTQLDIVIVLDGSNSIYPWDSVTAFLNDLLERMDIGPKQTQVGIVQYGENVTHEFNLNKYSSTEEVLVAAKKIVQRGGRQTMTALGIDTARKEAFTEARGARRGVKKVMVIVTDGESHDNHRLKKVIQDCEDENIQRFSIAILGSYNRGNLSTEKFVEEIKSIASEPTEKHFFNVSDELALVTIVKTLGERIFALEATADQSAASFEMEMSQTGFSAHYSQDWVMLGAVGAYDWNGTVVMQKASQIIIPRNTTFNVESTKKNEPLASYLGYTVNSATASSGDVLYIAGQPRYNHTGQVIIYRMEDGNIKILQTLSGEQIGSYFGSILTTTDIDKDSNTDILLVGAPMYMGTEKEEQGKVYVYALNQTRFEYQMSLEPIKQTCCSSRQHNSCTTENKNEPCGARFGTAIAAVKDLNLDGFNDIVIGAPLEDDHGGAVYIYHGSGKTIRKEYAQRIPSGGDGKTLKFFGQSIHGEMDLNGDGLTDVTIGGLGGAALFWSRDVAVVKVTMNFEPNKVNIQKKNCHMEGKETVCINATVCFDVKLKSKEDTIYEADLQYRVTLDSLRQISRSFFSGTQERKVQRNITVRKSECTKHSFYMLASKSYIDKHDFQDSVRITLDFNLTDPENGPVLDDSLPNSVHEYIPFAKDCGNKEKCISDLSLHVATTEKDLLIVRSQNDKFNVSLTVKNTKDSAYNTRTIVHYSPNLVFSGIEAIQKDSCESNHNITCKVGYPFLRRGEMVTFKILFQFNTSYLMENVTIYLSATSDSEEPPETLSDNVVNISIPVKYEVGLQFYSSASEYHISIAANETVPEVINSTEDIGNEINIFYLIRKSGSFPMPELKLSISFPNMTSNGYPVLYPTGLSSSENANCRPHIFEDPFSINSGKKMTTSTDHLKRGTILDCNTCKFATITCNLTSSDISQVNVSLILWKPTFIKSYFSSLNLTIRGELRSENASLVLSSSNQKRELAIQISKDGLPGRVPLWVILLSAFAGLLLLMLLILALWKIGFFKRPLKKKMEK

SEQ ID NO: 9740 - protein, 251 aa, Homo sapiens
MTRLTVLALLAGLLASSRAGSSPLLDIVGGRKARPRQFPFLASIQNQGRHFCGGALIHARFVMTAASCFQSQNPGVSTVVLGAYDLRRRERQSRQTFSISSMSENGYDPQQNLNDLMLLQLDREANLTSSVTILPLPLQNATVEAGTRCQVAGWGSQRSGGRLSRFPRFVNVTVTPEDQCRPNNVCTGVLTRRGGICNGDGGTPLVCEGLAHGVASFSLGPCGRGPDFFTRVALFRDWIDGVLNNPGPGPA

SEQ ID NO: 9741 - protein, 226 aa, Homo sapiens
AEGKWGLAHGRAEAHVWPGQGGWRLGPPQGRWTGSSPLLDIVGGRKARPRQFPFLASIQNQGRHFCGGALIHARFVMTAASCFQSQNPGVSTVVLGAYDLRRRERQSRQTFSISSMSENGYDPQQNLNDLMLLQLDREANLTSSVTILPLPLQNATVEAGTRCQVAGWGSQRSGGRLSRFPRFVNVTVTPEDQCRPNNVCTGVLTRRGGICNVSAPCGGRRGPERY

SEQ ID NO: 9742 - protein, 510 aa, Homo sapiens
SAVAGRTPALSPCPLHDSLGPSGIKHPRAPRAQRRPTCPSSSGGPARELSSRLRISSSRVLDMPGIKRILTVTILALCLPSPGNAQAQCTNGFDLDRQSGQCLDIDECRTIPEACRGDMMCVNQNGGYLCIPRTNPVYRGPYSNPYSTPYSGPYPAAAPPLSAPNYPTISRPLICRFGYQMDESNQCVDVDECATDSHQCNPTQICINTEGGYTCSCTDGYWLLEGQCLDIDECRYGYCQQLCANVPGSYSCTCNPGFTLNEDGRSCQDVNECATENPCVQTCVNTYGSFICRCDPGYELEEDGVHCSDMDECSFSEFLCQHECVNQPGTYFCSCPPGYILLDDNRSCQDINECEHRNHTCNLQQTCYNLQGGFKCIDPIRCEEPYLRISDNRCMCPAENPGCRDQPFTILYRDMDVVSGRSVPADIFQMQATTRYPGAYYIFQIKSGNEGREFYMRQTGPISATLVMTRPIKGPREIQLDLEMITVNTVINFRGSSVIRLRIYVSQYPF

SEQ ID NO: 9743 - protein, 555 aa, Homo sapiens
TPALSPCPLHDSLGPSGIKHPRAPRAQRRPTCPSSSGGPARELSSRLRISSSRVLDMPGIKRILTVTILALCLPSPGNAQAQCTNGFDLDRQSGQCLDGVSLSSPRLECNGAISAHCNLCLPGSSDSSASASQVAGITGMCHHTHLIFDIDECRTIPEACRGDMMCVNQNGGYLCIPRTNPVYRGPYSNPYSTPYSGPYPAAAPPLSAPNYPTISRPLICRFGYQMDESNQCVDVDECATDSHQCNPTQICINTEGGYTCSCTDGYWLLEGQCLDIDECRYGYCQQLCANVPGSYSCTCNPGFTLNEDGRSCQDVNECATENPCVQTCVNTYGSFICRCDPGYELEEDGVHCSDMDECSFSEFLCQHECVNQPGTYFCSCPPGYILLDDNRSCQDINECEHRNHTCNLQQTCYNLQGGFKCIDPIRCEEPYLRISDNRCMCPAENPGCRDQPFTILYRDMDVVSGRSVPADIFQMQATTRYPGAYYIFQIKSGNEGREFYMRQTGPISATLVMTRPIKGPREIQLDLEMITVNTVINFRGSSVIRLRIYVSQYPF

SEQ ID NO: 9744 - protein, 362 aa, Homo sapiens
MEPPGRRECPFPSWRFPGLLLAAMVLLLYSFSDACEEPPTFEAMELIGKPKPYYEIGERVDYKCKKGYFYIPPLATHTICDRNHTWLPVSDDACYRETCPYIRDPLNGQAVPANGTYEFGYQMHFICNEGYYLIGEEILYCELKGSVAIWSGKPPICEKVLCTPPPKIKNGKHTFSEVEVFEYLDAVTYSCDPAPGPDPFSLIGESTIYCGDNSVWSRAAPECKVVKCRFPVVENGKQISGFGKKFYYKATVMFECDKGFYLDGSDTIVCDSNSTWDPPVPKCLKGPRPTYKPPVSNYPGYPKPEEGILDSLDVWVIAVIVIAIVVGVAVICVVPYRYLQRRKKKGTYLTDETHREVKFTSL

SEQ ID NO: 9745 - protein, 392 aa, Homo sapiens [sequence omitted]

SEQ ID NO: 9746 - protein, 377 aa, Homo sapiens
MEPPGRRECPFPSWRFPGLLLAAMVLLLYSFSDACEEPPTFEAMELIGKPKPYYEIGERVDYKCKKGYFYIPPLATHTICDRNHTWLPVSDDACYRETCPYIRDPLNGQAVPANGTYEFGYQMHFICNEGYYLIGEEILYCELKGSVAIWSGKPPICEKVLCTPPPKIKNGKHTFSEVEVFEYLDAVTYSCDPAPGPDPFSLIGESTIYCGDNSVWSRAAPECKVVKCRFPVVENGKQISGFGKKFYYKATVMFECDKGFYLDGSDTIVCDSNSTWDPPVPKCLKVSTSSTTKSPASSASGPRPTYKPPVSNYPGYPKPEEGILDSLDVWVIAVIVIAIVVGVAVICVVPYRYLQRRKKKGTYLTDETHREVKFTSL

SEQ ID NO: 9747 - protein, 370 aa, Homo sapiens
MEPPGRRECPFPSWRFPGLLLAAMVLLLYSFSDACEEPPTFEAMELIGKPKPYYEIGERVDYKCKKGYFYIPPLATHTICDRNHTWLPVSDDACYRETCPYIRDPLNGQAVPANGTYEFGYQMHFICNEGYYLIGEEILYCELKGSVAIWSGKPPICEKVLCTPPPKIKNGKHTFSEVEVFEYLDAVTYSCDPAPGPDPFSLIGESTIYCGDNSVWSRAAPECKVVKCRFPVVENGKQISGFGKKFYYKATVMFECDKGFYLDGSDTIVCDSNSTWDPPVPKCLKVSTSSTTKSPASSASGYPKPEEGILDSLDVWVIAVIVIAIVVGVAVICVVPYRYLQRRKKKGKADGGAEYATYQTKSTTPAEQRG

SEQ ID NO: 9748 - protein, 355 aa, Homo sapiens
MEPPGRRECPFPSWRFPGLLLAAMVLLLYSFSDACEEPPTFEAMELIGKPKPYYEIGERVDYKCKKGYFYIPPLATHTICDRNHTWLPVSDDACYRETCPYIRDPLNGQAVPANGTYEFGYQMHFICNEGYYLIGEEILYCELKGSVAIWSGKPPICEKVLCTPPPKIKNGKHTFSEVEVFEYLDAVTYSCDPAPGPDPFSLIGESTIYCGDNSVWSRAAPECKVVKCRFPVVENGKQISGFGKKFYYKATVMFECDKGFYLDGSDTIVCDSNSTWDPPVPKCLKGYPKPEEGILDSLDVWVIAVIVIAIVVGVAVICVVPYRYLQRRKKKGKADGGAEYATYQTKSTTPAEQRG

SEQ ID NO: 9749 - protein, 373 aa, Homo sapiens
MEPPGRRECPFPSWRFPGLLLAAMVLLLYSFSDACEEPPTFEAMELIGKPKPYYEIGERVDYKCKKGYFYIPPLATHTICDRNHTWLPVSDDACYRETCPYIRDPLNGQAVPANGTYEFGYQMHFICNEGYYLIGEEILYCELKGSVAIWSGKPPICEKVLCTPPPKIKNGKHTFSEVEVFEYLDAVTYSCDPAPGPDPFSLIGESTIYCGDNSVWSRAAPECKVVKCRFPVVENGKQISGFGKKFYYKATVMFECDKGFYLDGSDTIVCDSNSTWDPPVPKCLKVSTSSTTKSPASSASGPRPTYKPPVSNYPGYPKPEEGILDSLDVWVIAVIVIAIDIFKGGRRKGKQMVELNMPLTRLNQPLQQSREAE

SEQ ID NO: 9750 - protein, 399 aa, Homo sapiens
MEPPGRRECPFPSWRFPGLLLAAMVLLLYSFSDACEEPPTFEAMELIGKPKPYYEIGERVDYKCKKGYFYIPPLATHTICDRNHTWLPVSDDACYRETCPYIRDPLNGQAVPANGTYEFGYQMHFICNEGYYLIGEEILYCELKGSVAIWSGKPPICEKVLCTPPPKIKNGKHTFSEVEVFEYLDAVTYSCDPAPGPDPFSLIGESTIYCGDNSVWSRAAPECKVVKCRFPVVENGKQISGFGKKFYYKATVMFECDKGFYLDGSDTIVCDSNSTWDPPVPKCLKVLPPSSTKPPALSHSVSTSSTTKSPASSASGPRPTYKPPVSNYPGYPKPEEGILDSLDVWVIAVIVIAIVVGVAVICVVPYRYLQRRKKKGKADGGAEYATYQTKSTTPAEQRG

SEQ ID NO: 9751 - protein, 348 aa, Homo sapiens
MEPPGRRECPFPSWRFPGLLLAAMVLLLYSFSDACEEPPTFEAMELIGKPKPYYEIGERVDYKCKKGYFYIPPLATHTICDRNHTWLPVSDDACYRETCPYIRDPLNGQAVPANGTYEFGYQMHFICNEGYYLIGEEILYCELKGSVAIWSGKPPICEKVLCTPPPKIKNGKHTFSEVEVFEYLDAVTYSCDPAPGPDPFSLIGESTIYCGDNSVWSRAAPECKVVKCRFPVVENGKQISGFGKKFYYKATVMFECDKGFYLDGSDTIVCDSNSTWDPPVPKCLKGYPKPEEGILDSLDVWVIAVIVIAIVVGVAVICVVPYRYLQRRKKKGTYLTDETHREVKFTSL

SEQ ID NO: 9752 - protein, 364 aa, Homo sapiens
MEPPGRRECPFPSWRFPGLLLAAMVLLLYSFSDACEEPPTFEAMELIGKPKPYYEIGERVDYKCKKGYFYIPPLATHTICDRNHTWLPVSDDACYRETCPYIRDPLNGQAVPANGTYEFGYQMHFICNEGYYLIGEEILYCELKGSVAIWSGKPPICEKVLCTPPPKIKNGKHTFSEVEVFEYLDAVTYSCDPAPGPDPFSLIGESTIYCGDNSVWSRAAPECKVVKCRFPVVENGKQISGFGKKFYYKATVMFECDKGFYLDGSDTIVCDSNSTWDPPVPKCLKVSTSSTTKSPASSASGPRPTYKPPVSNYPGYPKPEEGILDSLDVWVIAVIVIAIGKQMVELNMPLTRLNQPLQQSREAE

SEQ ID NO: 9753 - protein, 384 aa, Homo sapiens
MEPPGRRECPFPSWRFPGLLLAAMVLLLYSFSDACEEPPTFEAMELIGKPKPYYEIGERVDYKCKKGYFYIPPLATHTICDRNHTWLPVSDDACYRETCPYIRDPLNGQAVPANGTYEFGYQMHFICNEGYYLIGEEILYCELKGSVAIWSGKPPICEKVLCTPPPKIKNGKHTFSEVEVFEYLDAVTYSCDPAPGPDPFSLIGESTIYCGDNSVWSRAAPECKVVKCRFPVVENGKQISGFGKKFYYKATVMFECDKGFYLDGSDTIVCDSNSTWDPPVPKCLKVSTSSTTKSPASSASGPRPTYKPPVSNYPGYPKPEEGILDSLDVWVIAVIVIAIVVGVAVICVVPYRYLQRRKKKGKADGGAEYATYQTKSTTPAEQRG

SEQ ID NO: 9754 - protein, 363 aa, Homo sapiens
MEPPGRRECPFPSWRFPGLLLAAMVLLLYSFSDACEEPPTFEAMELIGKPKPYYEIGERVDYKCKKGYFYIPPLATHTICDRNHTWLPVSDDACYRETCPYIRDPLNGQAVPANGTYEFGYQMHFICNEGYYLIGEEILYCELKGSVAIWSGKPPICEKVLCTPPPKIKNGKHTFSEVEVFEYLDAVTYSCDPAPGPDPFSLIGESTIYCGDNSVWSRAAPECKVVKCRFPVVENGKQISGFGKKFYYKATVMFECDKGFYLDGSDTIVCDSNSTWDPPVPKCLKVSTSSTTKSPASSASGYPKPEEGILDSLDVWVIAVIVIAIVVGVAVICVVPYRYLQRRKKKGTYLTDETHREVKFTSL

SEQ ID NO: 9755 - protein, 385 aa, Homo sapiens
MEPPGRRECPFPSWRFPGLLLAAMVLLLYSFSDACEEPPTFEAMELIGKPKPYYEIGERVDYKCKKGYFYIPPLATHTICDRNHTWLPVSDDACYRETCPYIRDPLNGQAVPANGTYEFGYQMHFICNEGYYLIGEEILYCELKGSVAIWSGKPPICEKVLCTPPPKIKNGKHTFSEVEVFEYLDAVTYSCDPAPGPDPFSLIGESTIYCGDNSVWSRAAPECKVVKCRFPVVENGKQISGFGKKFYYKATVMFECDKGFYLDGSDTIVCDSNSTWDPPVPKCLKVLPPSSTKPPALSHSVSTSSTTKSPASSASGYPKPEEGILDSLDVWVIAVIVIAIVVGVAVICVVPYRYLQRRKKKGKADGGAEYATYQTKSTTPAEQRG

SEQ ID NO: 9756 - protein, 349 aa, Homo sapiens
MEPPGRRECPFPSWRFPGLLLAAMVLLLYSFSDACEEPPTFEAMELIGKPKPYYEIGERVDYKCKKGYFYIPPLATHTICDRNHTWLPVSDDACYRETCPYIRDPLNGQAVPANGTYEFGYQMHFICNEGYYLIGEEILYCELKGSVAIWSGKPPICEKVLCTPPPKIKNGKHTFSEVEVFEYLDAVTYSCDPAPGPDPFSLIGESTIYCGDNSVWSRAAPECKVVKCRFPVVENGKQISGFGKKFYYKATVMFECDKGFYLDGSDTIVCDSNSTWDPPVPKCLKGPRPTYKPPVSNYPGYPKPEEGILDSLDVWVIAVIVIAIGKQMVELNMPLTRLNQPLQQSREAE

SEQ ID NO: 9757 - protein, 369 aa, Homo sapiens
MEPPGRRECPFPSWRFPGLLLAAMVLLLYSFSDACEEPPTFEAMELIGKPKPYYEIGERVDYKCKKGYFYIPPLATHTICDRNHTWLPVSDDACYRETCPYIRDPLNGQAVPANGTYEFGYQMHFICNEGYYLIGEEILYCELKGSVAIWSGKPPICEKVLCTPPPKIKNGKHTFSEVEVFEYLDAVTYSCDPAPGPDPFSLIGESTIYCGDNSVWSRAAPECKVVKCRFPVVENGKQISGFGKKFYYKATVMFECDKGFYLDGSDTIVCDSNSTWDPPVPKCLKGPRPTYKPPVSNYPGYPKPEEGILDSLDVWVIAVIVIAIVVGVAVICVVPYRYLQRRKKKGKADGGAEYATYQTKSTTPAEQRG

SEQ ID NO: 9758 - protein, 378 aa, Homo sapiens
MEPPGRRECPFPSWRFPGLLLAAMVLLLYSFSDACEEPPTFEAMELIGKPKPYYEIGERVDYKCKKGYFYIPPLATHTICDRNHTWLPVSDDACYRETCPYIRDPLNGQAVPANGTYEFGYQMHFICNEGYYLIGEEILYCELKGSVAIWSGKPPICEKVLCTPPPKIKNGKHTFSEVEVFEYLDAVTYSCDPAPGPDPFSLIGESTIYCGDNSVWSRAAPECKVVKCRFPVVENGKQISGFGKKFYYKATVMFECDKGFYLDGSDTIVCDSNSTWDPPVPKCLKVLPPSSTKPPALSHSVSTSSTTKSPASSASGYPKPEEGILDSLDVWVIAVIVIAIVVGVAVICVVPYRYLQRRKKKGTYLTDETHREVKFTSL

SEQ ID NO: 9759 - protein, 1786 aa, Homo sapiens
MGLLQLLAFSFLALCRARVRAQEPEFSYGCAEGSCYPATGDLLIGRAQKLSVTSTCGLHKPEPYCIVSHLQEDKKCFICNSQDPYHETLNPDSHLIENVVTTFAPNRLKIWWQSENGVENVTIQLDLEAEFHFTHLIMTFKTFRPAAMLIERSSDFGKTWGVYRYFAYDCEASFPGISTGPMKKVDDIICDSRYSDIEPSTEGEVIFRALDPAFKIEDPYSPRIQNLLKITNLRIKFVKLHTLGDNLLDSRMEIREKYYYAVYDMVVRGNCFCYGHASECAPVDGFNEEVEGMVHGHCMCRHNTKGLNCELCMDFYHDLPWRPAEGRNSNACKKCNCNEHSISCHFDMAVYLATGNVSGGVCDDCQHNTMGRNCEQCKPFYYQHPERDIRDPNFCERCTCDPAGSQNEGICDSYTDFSTGLIAGQCRCKLNVEGEHCDVCKEGFYDLSSEDPFGCKSCACNPLGTIPGGNPCDSETGHCYCKRLVTGQHCDQCLPEHWGLSNDLDGCRPCDCDLGGALNNSCFAESGQCSCRPHMIGRQCNEVEPGYYFATLDHYLYEAEEANLGPGVSIVERQYIQDRIPSWTGAGFVRVPEGAYLEFFIDNIPYSMEYDILIRYEPQLPDHWEKAVITVQRPGRIPTSSRCGNTIPDDDNQVVSLSPGSRYVVLPRPVCFEKGTNYTVRLELPQYTSSDSDVESPYTLIDSLVLMPYCKSLDIFTVGGSGDGVVTNSAWETFQRYRCLENSRSVVKTPMTDVCRNIIFSISALLHQTGLACECDPQGSLSSVCDPNGGQCQCRPNVVGRTCNRCAPGTFGFGPSGCKPCECHLQGSVNAFCNPVTGQCHCFQGVYARQCDRCLPGHWGFPSCQPCQCNGHADDCDPVTGECLNCQDYTMGHNCERCLAGYYGDPIIGSGDHCRPCPCPDGPDSGRQFARSCYQDPVTLQLACVCDPGYIGSRCDDCASGYFGNPSEVGGSCQPCQCHNNIDTTDPEACDKETGRCLKCLYHTEGEHCQFCRFGYYGDALRQDCRKCVCNYLGTVQEHCNGSDCQCDKATGQCLCLPNVIGQNCDRCAPNTWQLASGTGCDPCNCNAAHSFGPSCNEFTGQCQCMPGFGGRTCSECQELFWGDPDVECRACDCDPRGIETPQCDQSTGQCVCVEGVEGPRCDKCTRGYSGVFPDCTPCHQCFALWDVIIAELTNRTHRFLEKAKALKISGVIGPYRETVDSVERKVSEIKDILAQSPAAEPLKNIGNLFEEAEKLIKDVTEMMAQVEVKLSDTTSQSNSTAKELDSLQTEAESLDNTVKELAEQLEFIKNSDIRGALDSITKYFQMSLEAEERVNASTTEPNSTVEQSALMRDRVEDVMMERESQFKEKQEEQARLLDELAGKLQSLDLSAAAEMTCGTPPGASCSETECGGPNCRTDEGERKCGGPGCGGLVTVAHNAWQKAMDLDQDVLSALAEVEQLSKMVSEAKLRADEAKQSAEDILLKTNATKEKMDKSNEELRNLIKQIRNFLTQDSADLDSIEAVANEVLKMEMPSTPQQLQNLTEDIRERVESLSQVEVILQHSAADIARAEMLLEEAKRASKSATDVKVTADMVKEALEEAEKAQVAAEKAIKQADEDIQGTQNLLTSIESETAASEETLFNASQRISELERNVEELKRKAAQNSGEAEYIEKVVYTVKQSAEDVKKTLDGELDEKYKKVENLIAKKTEESADARRKAEMLQNEAKTLLAQANSKLQLLKDLERKYEDNQRYLEDKAQELARLEGEVRSLLKDISQKVAVYSTCL

SEQ ID NO: 9760 - protein, 275 aa, Homo sapiens
MLSLLLLALPVLASRAYAAPAPVQALQQAGIVGGQEAPRSKWPWQVSLRVRDRYWMHFCGGSLIHPQWVLTAAHCLGPDVKDLATLRVQLREQHLYYQDQLLPVSRIIVHPQFYIIQTGADIALLELEEPVNISSRVHTVMLPPASETFPPGMPCWVTGWGDVDNDEPLPPPFPLKQVKVPIMENHICDAKYHLGAYTGDDVRIIRDDMLCAGNTRRDSCKGDSGGPLVCKVNGTWLQAGVVSWDEGCAQPNRPGIYTRVTYYLDWIHHYVPKKP

SEQ ID NO: 9761 - protein, 266 aa, Homo sapiens
MLSLLLLALPVLASRAYAAPAPVQALQQAGIVGGQEAPRSKWPWQVSLRVRDRYWMHFCGGSLIHPQWVLTAAHCLGPVQLREQHLYYQDQLLPVSRIIVHPQFYIIQTGADIALLELEEPVNISSRVHTVMLPPASETFPPGMPCWVTGWGDVDNDEPLPPPFPLKQVKVPIMENHICDAKYHLGAYTGDDVRIIRDDMLCAGNTRRDSCKGDSGGPLVCKVNGTWLQAGVVSWDEGCAQPNRPGIYTRVTYYLDWIHHYVPKKP

SEQ ID NO: 9762 - protein, 552 aa, Homo sapiens
MRLLPLAPGRLRRGSPRHLPSCSPALLLLVLGGCLGVFGVAAGTRRPNVVLLLTDDQDEVLGGMTPLKKTKALIGEMGMTFSSAYVPSALCCPSRASILTGKYPHNHHVVNNTLEGNCSSKSWQKIQEPNTFPAILRSMCGYQTFFAGKYLNEYGAPDAGGLEHVPLGWSYWYALEKNSKYYNYTLSINGKARKHGENYSVDYLTDVLANVSLDFLDYKSNFEPFFMMIATPAPHSPWTAAPQYQKAFQNVFAPRNKNFNIHGTNKHWLIRQAKTPMTNSSIQFLDNAFRKRWQTLLSVDDLVEKLVKRLEFTGELNNTYIFYTSDNGYHTGQFSLPIDKRQLYEFDIKVPLLVRGPGIKPNQTSKMLVANIDLGPTILDIAGYDLNKTQMDGMSLLPILRGASNLTWRSDVLVEYQGEGRNVTDPTCPSLSPGVSQCFPDCVCEDAYNNTYACVRTMSALWNLQYCEFDDQEVFVEVYNLTADPDQITNIAKTIDPELLGKMNYRLMMLQSCSGPTCRTPGVFDPGYRFDPRLMFSNRGSVRTRRFSKHLL

SEQ ID NO: 9763 - protein, 215 aa, Homo sapiens
MAVEGGMKCVKFLLYVLLLAFCGATPGSLLPVVIIAVGVFLFLVAFVGCCGACKENYCLMITFAIFLSLIMLVEVAAAIAGYVFRDKVMSEFNNNFRQQMENYPKNNHTASILDRMQADFKCCGAANYTDWEKIPSMSKNRVPDSCCINVTVGCGINFNEKAIHKEGCVEKIGGWLRKNVLVVAAAALGIAFVEVLGIVFACCLVKSIRSGYEVM

SEQ ID NO: 9764 - protein, 238 aa, Homo sapiens
MAVEGGMKCVKFLLYVLLLAFCACAVGLIAVGVGAQLVLSQTIIQGATPGSLLPVVIIAVGVFLFLVAFVGCCGACKENYCLMITFAIFLSLIMLVEVAAAIAGYVFRDKVMSEFNNNFRQQMENYPKNNHTASILDRMQADFKCCGAANYTDWEKIPSMSKNRVPDSCCINVTVGCGINFNEKAIHKEGCVEKIGGWLRKNVLVVAAAALGIAFVEVLGIVFACCLVKSIRSGYEVM

SEQ ID NO: 9765 - protein, 522 aa, Homo sapiens
MAAVVAATRWWQLLLVLSAAGMGASGAPQPPNILLLLMDDMGWGDLGVYGEPSRETPNLDRMAAEGLLFPNFYSANPLCSPSRAALLTGRLPIRNGFYTTNAHARNAYTPQEIVGGIPDSEQLLPELLKKAGYVSKIVGKWHLGHRPQFHPLKHGFDEWFGSPNCHFGPYDNKARPNIPVYRDWEMVGRYYEEFPINLKTGEANLTQIYLQEALDFIKRQARHHPFFLYWAVDATHAPVYASKPFLGTSQRGRYGDAVREIDDSIGKILELLQDLHVADNTFVFFTSDNGAALISAPEQGGSNGPFLCGKQTTFEGGMREPALAWWPGHVTAGQVSHQLGSIMDLFTTSLALAGLTPPSDRAIDGLNLLPTLLQGRLMDRPIFYYRGDTLMAATLGQHKAHFWTWTNSWENFRQGIDFCPGQNVSGVTTHNLEDHTKLPLIFHLGRDPGERFPLSFASAEYQEALSRITSVVQQHQEALVPAQPQLNVCNWAVMNWAPPGCEKLGKCLTPPESIPKKCLWSH

SEQ ID NO: 9766 - protein, 937 aa, Homo sapiens [sequence omitted]

SEQ ID NO: 9767 - protein, 1016 aa, Homo sapiens
ETEAEAEAGAPSSPPTSDPRGEPRPSARRRGRRGRPGWLRPCLASQAPAAAALPLLLALKMEKMLAGCFLLILGQIVLLPAEARERSRGRSISRGRHARTHPQTALLESSCENKRADLVFIIDSSRSVNTHDYAKVKEFIVDILQFLDIGPDVTRVGLLQYGSTVKNEFSLKTFKRKSEVERAVKRMRHLSTGTMTGLAIQYALNIAFSEAEGARPLRENVPRVIMIVTDGRPQDSVAEVAAKARDTGILIFAIGVGQVDFNTLKSIGSEPHEDHVFLVANFSQIETLTSVFQKKLCTAHMCSTLEHNCAHFCINIPGSYVCRCKQGYILNSDQTTCRIQDLCAMEDHNCEQLCVNVPGSFVCQCYSGYALAEDGKRCVAVDYCASENHGCEHECVNADGSYLCQCHEGFALNPDEKTCTKIDYCASSNHGCQHECVNTDDSYSCHCLKGFTLNPDKKTCRRINYCALNKPGCEHECVNMEESYYCRCHRGYTLDPNGKTCSRVDHCAQQDHGCEQLCLNTEDSFVCQCSEGFLINEDLKTCSRVDYCLLSDHGCEYSCVNMDRSFACQCPEGHVLRSDGKTCAKLDSCALGDHGCEHSCVSSEDSFVCQCFEGYILREDGKTCRRKDVCQAIDHGCEHICVNSDDSYTCECLEGFRLAEDGKRCRRKDVCKSTHHGCEHICVNNGNSYICKCSEGFVLAEDGRRCKKCTEGPIDLVFVIDGSKSLGEENFEVVKQFVTGIIDSLTISPKAARVGLLQYSTQVHTEFTLRNFNSAKDMKKAVAHMKYMGKGSMTGLALKHMFERSFTQGEGARPLSTRVPRAAIVFTDGRAQDDVSEWASKAKANGITMYAVGVGKAIEEELQEIASEPTNKHLFYAEDFSTMDEISEKLKKGICEALEDSDGRQDSPAGELPKTVQQPTESEPVTINIQDLLSCSNFAVQHRYLFEEDNLLRSTQKLSHSTKPSGSPLEEKHDQCKCENLIMFQNLANEEVRKLTQRLEEMTQRMEALENRLRYR

SEQ ID NO: 9768 - protein, 234 aa, Homo sapiens
VVFLTLSVTWIGAAPLILSRIVGGWECEKHSQPWQVLVASRGRAVCGGVLVHPQWVLTAAHCIRNKSVILLGRHSLFHPEDTGQVFQVSHSFPHPLYDMSLLKNRFLRPGDDSSHDLMLLRLSEPAELTDAVKVMDLPTQEPALGTTCYASGWGSIEPEEFLTPKKLQCVDLHVISNDVCAQVHPQKVTKFMLCAGRWTGGKSTCSWVILITELTMPALPMVLHGSLVPWRGGV

SEQ ID NO: 9769 - protein, 180 aa, Homo sapiens
MWVPVVFLTLSVTWIGAAPLILSRIVGGWECEKHSQPWQVLVASRGRAVCGGVLVHPQWVLTAAHCIRNKSVILLGRHSLFHPEDTGQVFQVSHSFPHPLYDMSLLKNRFLRPGDDSSHDLMLLRLSEPAELTDAVKVMDLPTQEPALGTTCYASGWGSIEPEECTPGPDGAAGSPDAWV

SEQ ID NO: 9770 - protein, 220 aa, Homo sapiens
MWVPVVFLTLSVTWIGAAPLILSRIVGGWECEKHSQPWQVLVASRGRAVCGGVLVHPQWVLTAAHCIRNKSVILLGRHSLFHPEDTGQVFQVSHSFPHPLYDMSLLKNRFLRPGDDSSIEPEEFLTPKKLQCVDLHVISNDVCAQVHPQKVTKFMLCAGRWTGGKSTCSGDSGGPLVCNGVLQGITSWGSEPCALPERPSLYTKVVHYRKWIKDTIVANP

SEQ ID NO: 9771 - protein, 227 aa, Homo sapiens
MWVPVVFLTLSVTWIGAAPLILSRIVGGWECEKHSQPWQVLVASRGRAVCGGVLVHPQWVLTAAHCIRNKSVILLGRHSLFHPEDTGQVFQVSHSFPHPLYDMSLLKNRFLRPGDDSSHDLMLLRLSEPAELTDAVKVMDLPTQEPALGTTCYASGWGSIEPEEFLTPKKLQCVDLHVISNDVCAQVHPQKVTKFMLCAGRWTGGKSTCSVSHPYSQDLEGKGEWGP

SEQ ID NO: 9772 - protein, 261 aa, Homo sapiens
MWVPVVFLTLSVTWIGAAPLILSRIVGGWECEKHSQPWQVLVASRGRAVCGGVLVHPQWVLTAAHCIRNKSVILLGRHSLFHPEDTGQVFQVSHSFPHPLYDMSLLKNRFLRPGDDSSHDLMLLRLSEPAELTDAVKVMDLPTQEPALGTTCYASGWGSIEPEEFLTPKKLQCVDLHVISNDVCAQVHPQKVTKFMLCAGRWTGGKSTCSGDSGGPLVCNGVLQGITSWGSEPCALPERPSLYTKVVHYRKWIKDTIVANP

SEQ ID NO: 9773 - protein, 798 aa, Homo sapiens
MNLQPIFWIGLISSVCCVFAQTDENRCLKANAKSCGECIQAGPNCGWCTNSTFLQEGMPTSARCDDLEALKKKGCPPDDIENPRGSKDIKKNKNVTNRSKGTAEKLKPEDITQIQPQQLVLRLRSGEPQTFTLKFKRAEDYPIDLYYLMDLSYSMKDDLENVKSLGTDLMNEMRRITSDFRIGFGSFVEKTVMPYISTTPAKLRNPCTSEQNCTSPFSYKNVLSLTNKGEVFNELVGKQRISGNLDSPEGGFDAIMQVAVCGSLIGWRNVTRLLVFSTDAGFHFAGDGKLGGIVLPNDGQCHLENNMYTMSHYYDYPSIAHLVQKLSENNIQTIFAVTEEFQPVYKELKNLIPKSAVGTLSANSSNVIQLIIDAYNSLSSEVILENGKLSEGVTISYKSYCKNGVNGTGENGRKCSNISIGDEVQFEISITSNKCPKKDSDSFKIRPLGFTEEVEVILQYICECECQSEGIPESPKCHEGNGTFECGACRCNEGRVGRHCECSTDEVNSEDMDAYCRKENSSEICSNNGECVCGQCVCRKRDNTNEIYSGKFCECDNFNCDRSNGLICGGNGVCKCRVCECNPNYTGSACDCSLDTSTCEASNGQICNGRGICECGVCKCTDPKFQGQTCEMCQTCLGVCAEHKECVQCRAFNKGEKKDTCTQECSYFNITKVESRDKLPQPVQPDPVSHCKEKDVDDCWFYFTYSVNGNNEVMVHVVENPECPTGPDIIPIVAGVVAGIVLIGLALLLIWKLLMIIHDRREFAKFEKEKMNAKWDTGENPIYKSAVTTVVNPKYEGK

SEQ ID NO: 9774 - protein, 488 aa, Homo sapiens
MVLQKEPAGAVIWGFGTPGATVTVTLRQGQETIMKKVTSVKAHSDTWMVVLDPMKPGGPFEVMAQQTLEKINFTLRVHDVLFGDVWLCSGQSNMQMTVLQIFNATRELSNTAAYQSVRILSVSPIQAEQELEDLVAVDLQWSKPTSENLGHGYFKYMSAVCWLFGRHLYDTLQYPIGLIASSWGGTPIEAWSSGRSLKACGVPKQGSIPYDSVTGPSKHSVLWNAMIHPLCNMTLKGVVWYQGESNINYNTDLYNCTFPALIEDWRETFHRGSQGQTERFFPFGLVQLSSDLSKKSSDDGFPQIRWHQTADFGYVPNPKMPNTFMAVAMDLCDRDSPFGSIHPRDKQTVAYRLHLGARALAYGEKNLTFEGPLPEKIELLAHKGLLNLTYYQQIQVQKKDNKIFEISCCSDHRCKWLPASMNTVSTQSLTLAIDSCHGTVVALRYAWTTWPCEYKQCPLYHPSSALPAPPFIAFITDQGPGHQSNVAK

SEQ ID NO: 9775 - protein, 523 aa, Homo sapiens
MVAPGLVLGLVLPLILWADRSAGIGFRFASYINNDMVLQKEPAGAVIWGFGTPGATVTVTLRQGQETIMKKVTSVKAHSDTWMVVLDPMKPGGPFEVMAQQTLEKINFTLRVHDVLFGDVWLCSGQSNMQMTVLQIFNATRELSNTAAYQSVRILSVSPIQAEQELEDLVAVDLQWSKPTSENLGHGYFKYMSAVCWLFGRHLYDTLQYPIGLIASSWGGTPIEAWSSGRSLKACGVPKQGSIPYDSVTGPSKHSVLWNAMIHPLCNMTLKGVVWYQGESNINYNTDLYNCTFPALIEDWRETFHRGSQGQTERFFPFGLVQLSSDLSKKSSDDGFPQIRWHQTADFGYVPNPKMPNTFMAVAMDLCDRDSPFGSIHPRDKQTVAYRLHLGARALAYGEKNLTFEGPLPEKIELLAHKGLLNLTYYQQIQVQKKDNKIFEISCCSDHRCKWLPASMNTVSTQSLTLAIDSCHGTVVALRYAWTTWPCEYKQCPLYHPSSALPAPPFIAFITDQGPGHQSNVAK

SEQ ID NO: 9776 - protein, 1009 aa, Homo sapiens
MGQLCWLPLLAPLLLLRPPGVQSAGPIRAFVVPHSHMDVGWVYTVQESMRAYAANVYTSVVEELARGQQRRFIAVEQEFFRLWWDGVASDQQKYQVRQLLEEGRLEFVIGGQVMHDEAVTHLDDQILQLTEGHGFLYETFGIRPQFSWHVDPFGASATTPTLFALAGFNAHLGSRIDYDLKAAMQEARGLQFVWRGSPSLSERQEIFTHIMDQYSYCTPSHIPFSNRSGFYWNGVAVFPKPPPDGVYPNMSEPVTPANINLYAEALVANVKQRAAWFRTPHVLWPWGCDKQFFNASVQFANMDPLLDHINSHAAELGVSVQYATLGDYFRALHALNVTWRVRDHHDFLPYSTEPFQAWTGFYTSRSSLKGLARRASALLYAGESMFTRYLWPAPRGHLDPTWALQQLQQLRWAVSEVQHHDAITGTESPKVRDMYATHLASGMLGVRKLMASIVLDELQPQAPMAASSDAGPAGHFASVYNPLAWTVTTIVTLTVGFPGVRVTDEAGHPVPSQIQNSTETPSAYDLLILTTIPGLSYRHYSIRPTAGAQEGTQEPAATVASTLQFGRRLRRRTSHAGRYLVPVANDCYIVLLDQDTNLMHSIWERQSNRTVRVTQEFLEYHVNRDVKQGPISDNYLFTPGKAAVPAWEAVEMEIVAGQLVTEIRQYFYRNMTAQNYTYAIRSRLTHVPQGHDGELLCHRIEQEYQAGPLELNREAVLRTSTNLNSQQVIYSDNNGYQMQRRPYVSYVNNSIARNYYPMVQSAFMEDGKSRLVLLSERAHGISSQGNGQVEVMLHRRLWNNFDWDLGYNLTLNDTSVVHPVLWLLLGSWSLTTALRQRSALALQHRPVVLFGDLAGTAPKLPGPQQQEAVTLPPNLHLQILSIPGWRYSSNHTEHSQNLRKGHRGEAQADLRRVLLRLYHLYEVGEDPVLSQPVTVNLQAVLQALGSVVAVEERSLTGTWDLSMLHRWSWRTGPGRHRGDTTSPSRPPGGPIITVHPKEIRTFFIHFQQQ

SEQ ID NO: 9777 - protein, 1009 aa, Homo sapiens [sequence omitted]

SEQ ID NO: 9778 - protein, 335 aa, Homo sapiens [sequence omitted]

SEQ ID NO: 9779 - protein, 323 aa, Homo sapiens
MWATLPLLCAAELCVNSLEKFHFKSWMSKHRKTYSTEEYHHRLQTFASNWRKINAHNNGNHTFKMALNQFSDMSFAEIKHKYLWSEPQNCSATKSNYLRGTGPYPPSVDWRKKGNFVSPVKNQGACGSCWTFSTTGALESAIAIATGKMLSLAEQQLVDCAQDFNNHGCQGGLPSQAFEYILYNKGIMGEDTYPYQGKDGYCKFQPGKAIGFVKDVANITIYDEEAMVEAVALYNPVSFAFEVTQDFMMYRTGIYSSTSCHKTPDKVNHAVLAVGYGEKNGIPYWIVKNSWGPQWGMNGYFLIERGKNMCGLAACASYPIPLV

SEQ ID NO: 9780 - protein, 589 aa, Homo sapiens
MVGQMYCYPGSHLARALTRALALALVLALLVGPFLSGLAGAIPAPGGRWARDGQVPPASRSRSVLLDVSAGQLLMVDGRHPDAVAWANLTNAIRETGWAFLELGTSGQYNDSLQAYAAGVVEAAVSEELIYMHWMNTVVNYCGPFEYEVGYCERLKSFLEANLEWMQEEMESNPDSPYWHQVRLTLLQLKGLEDSYEGRVSFPAGKFTIKPLGFLLLQLSGDLEDLELALNKTKIKPSLGSGSCSALIKLLPGQSDLLVAHNTWNNYQHMLRVIKKYWLQFREGPWGDYPLVPGNKLVFSSYPGTIFSCDDFYILGSGLVTLETTIGNKNPALWKYVRPRGCVLEWVRNIVANRLASDGATWADIFKRFNSGTYNNQWMIVDYKAFIPGGPSPGSRVLTILEQIPGMVVVADKTSELYQKTYWASYNIPSFETVFNASGLQALVAQYGDWFSYDGSPRAQIFRRNQSLVQDMDSMVRLMRYNDFLHDPLSLCKACNPQPNGENAISARSDLNPANGSYPFKALRQRSHGGIDVKVTSMSLARILSLLAASGPTWDQVPPFQWSTSPFSGLLHMGQPDLWKFAPVKVSWD

SEQ ID NO: 9781 - protein, 529 aa, Homo sapiens
MTSSRLWFSLLLAAAFAGRATALWPWPQNFQTSDQRYVLYPNNFQFQYDVSSAAQPGCSVLDEAFQRYRDLLFGSGSWPRPYLTGKRHTLEKNVLVVSVVTPGCNQLPTLESVENYTLTINDDQCLLLSETVWGALRGLETFSQLVWKSAEGTFFINKTEIEDFPRFPHRGLLLDTSRHYLPLSSILDTLDVMAYNKLNVFHWHLVDDPSFPYESFTFPELMRKGSYNPVTHIYTAQDVKEVIEYARLRGIRVLAEFDTPGHTLSWGPGIPGLLTPCYSGSEPSGTFGPVNPSLNNTYEFMSTFFLEVSSVFPDFYLHLGGDEVDFTCWKSNPEIQDFMRKKGFGEDFKQLESFYIQTLLDIVSSYGKGYVVWQEVFDNKVKIQPDTIIQVWREDIPVNYMKELELVTKAGFRALLSAPWYLNRISYGPDWKDFYVVEPLAFEGTPEQKALVIGGEACMWGEYVDNTNLVPRLWPRAGAVAERLWSNKLTSDLTFAYERLSHFRCELLRRGVQAQPLNVGFCEQEFEQT

SEQ ID NO: 9782 - protein, 1746 aa, Homo sapiens
MGAMTQLLAGVFLAFLALATEGGVLKKVIRHKRQSGVNATLPEENQPVVFNHVYNIKLPVGSQCSVDLESASGEKDLAPPSEPSESFQEHTVDGENQIVFTHRINIPRRACGCAAAPDVKELLSRLEELENLVSSLREQCTAGAGCCLQPATGRLDTRPFCSGRGNFSTEGCGCVCEPGWKGPNCSEPECPGNCHLRGRCIDGQCICDDGFTGEDCSQLACPSDCNDQGKCVNGVCICFEGYAGADCSREICPVPCSEEHGTCVDGLCVCHDGFAGDDCNKPLCLNNCYNRGRCVENECVCDEGFTGEDCSELICPNDCFDRGRCINGTCYCEEGFTGEDCGKPTCPHACHTQGRCEEGQCVCDEGFAGLDCSEKRCPADCHNRGRCVDGRCECDDGFTGADCGELKCPNGCSGHGRCVNGQCVCDEGYTGEDCSQLRCPNDCHSRGRCVEGKCVCEQGFKGYDCSDMSCPNDCHQHGRCVNGMCVCDDGYTGEDCRDRQCPRDCSNRGLCVDGQCVCEDGFTGPDCAELSCPNDCHGQGRCVNGQCVCHEGFMGKDCKEQRCPSDCHGQGRCVDGQCICHEGFTGLDCGQHSCPSDCNNLGQCVSGRCICNEGYSGEDCSEVSPPKDLVVTEVTEETVNLAWDNEMRVTEYLVVYTPTHEGGLEMQFRVPGDQTSTIIQELEPGVEYFIRVFAILENKKSIPVSARVATYLPAPEGLKFKSIKETSVEVEWDPLDIAFETWEIIFRNMNKEDEGEITKSLRRPETSYRQTGLAPGQEYEISLHIVKNNTRGPGLKRVTTTRLDAPSQIEVKDVTDTTALITWFKPLAEIDGIELTYGIKDVPGDRTTIDLTEDENQYSIGNLKPDTEYEVSLISRRGDMSSNPAKETFTTGLDAPRNLRRVSQTDNSITLEWRNGKAAIDSYRIKYAPISGGDHAEVDVPKSQQATTKTTLTGLRPGTEYGIGVSAVKEDKESNPATINAATELDTPKDLQVSETAETSLTLLWKTPLAKFDRYRLNYSLPTGQWVGVQLPRNTTSYVLRGLEPGQEYNVLLTAEKGRHKSKPARVKASTAKEPEIGNLNVSDITPESFNLSWMATDGIFETFTIEIIDSNRLLETVEYNISGAERTAHISGLPPSTDFIVYLSGLAPSIRTKTISATATTEAEPEVDNLLVSDATPDGFRLSWTADEGVFDNFVLKIRDTKKQSEPLEITLLAPERTRDLTGLREATEYEIELYGISKGRRSQTVSAIATTAMGSPKEVIFSDITENSATVSWRAPTAQVESFRITYVPITGGTPSMVTVDGTKTQTRLVKLIPGVEYLVSIIAMKGFEESEPVSGSFTTALDGPSGLVTANITDSEALARWQPAIATVDSYVISYTGEKVPEITRTVSGNTVEYALTDLEPATEYTLRIFAEKGPQKSSTITAKFTTDLDSPRDLTATEVQSETALLTWRPPRASVTGYLLVYESVDGTVKEVIVGPDTTSYSLADLSPSTHYTAKIQALNGPLRSNMIQTIFTTIGLLYPFPKDCSQAMLNGDTTSGLYTIYLNGDKAQALEVFCDMTSDGGGWIVFLRRKNGRENFYQNWKAYAAGFGDRREEFWLGLDNLNKITAQGQYELRVDLRDHGETAFAVYDKFSVGDAKTRYKLKVEGYSGTAGDSMAYHNGRSFSTFDKDTDSAITNCALSYKGAFWYRNCHRVNLMGRYGDNNHSQGVNWFHWKGHEHSIQFAEMKLRPSNFRNLEGRRKRA

SEQ ID NO: 9783 - protein, 1655 aa, Homo sapiens
MGAMTQLLAGVFLAFLALATEGGVLKKVIRHKRQSGVNATLPEENQPVVFNHVYNIKLPVGSQCSVDLESASGEKDLAPPSEPSESFQEHTVDGENQIVFTHRINIPRRACGCAAAPDVKELLSRLEELENLVSSLREQCTAGAGCCLQPATGRLDTRPFCSGRGNFSTEGCGCVCEPGWKGPNCSEPECPGNCHLRGRCIDGQCICDDGFTGEDCSQLACPSDCNDQGKCVNGVCICFEGYAGADCSREICPVPCSEEHGTCVDGLCVCHDGFAGDDCNKPLCLNNCYNRGRCVENECVCDEGFTGEDCSELICPNDCFDRGRCINGTCYCEEGFTGEDCGKPTCPHACHTQGRCEEGQCVCDEGFAGLDCSEKRCPADCHNRGRCVDGRCECDDGFTGADCGELKCPNGCSGHGRCVNGQCVCDEGYTGEDCSQLRCPNDCHSRGRCVEGKCVCEQGFKGYDCSDMSCPNDCHQHGRCVNGMCVCDDGYTGEDCRDRQCPRDCSNRGLCVDGQCVCEDGFTGPDCAELSCPNDCHGQGRCVNGQCVCHEGFMGKDCKEQRCPSDCHGQGRCVDGQCICHEGFTGLDCGQHSCPSDCNNLGQCVSGRCICNEGYSGEDCSEVSPPKDLVVTEVTEETVNLAWDNEMRVTEYLVVYTPTHEGGLEMQFRVPGDQTSTIIQELEPGVEYFIRVFAILENKKSIPVSARVATYLPAPEGLKFKSIKETSVEVEWDPLDIAFETWEIIFRNMNKEDEGEITKSLRRPETSYRQTGLAPGQEYEISLHIVKNNTRGPGLKRVTTTRLDAPSQIEVKDVTDTTALITWFKPLAEIDGIELTYGIKDVPGDRTTIDLTEDENQYSIGNLKPDTEYEVSLISRRGDMSSNPAKETFTTGLDAPRNLRRVSQTDNSITLEWRNGKAAIDSYRIKYAPISGGDHAEVDVPKSQQATTKTTLTGLRPGTEYGIGVSAVKEDKESNPATINAATELDTPKDLQVSETAETSLTLLWKTPLAKFDRYRLNYSLPTGQWVGVQLPRNTTSYVLRGLEPGQEYNVLLTAEKGRHKSKPARVKASTEAEPEVDNLLVSDATPDGFRLSWTADEGVFDNFVLKIRDTKKQSEPLEITLLAPERTRDLTGLREATEYEIELYGISKGRRSQTVSAIATTAMGSPKEVIFSDITENSATVSWRAPTAQVESFRITYVPITGGTPSMVTVDGTKTQTRLVKLIPGVEYLVSIIAMKGFEESEPVSGSFTTALDGPSGLVTANITDSEALARWQPAIATVDSYVISYTGEKVPEITRTVSGNTVEYALTDLEPATEYTLRIFAEKGPQKSSTITAKFTTDLDSPRDLTATEVQSETALLTWRPPRASVTGYLLVYESVDGTVKEVIVGPDTTSYSLADLSPSTHYTAKIQALNGPLRSNMIQTIFTTIGLLYPFPKDCSQAMLNGDTTSGLYTIYLNGDKAQALEVFCDMTSDGGGWIVFLRRKNGRENFYQNWKAYAAGFGDRREEFWLGLDNLNKITAQGQYELRVDLRDHGETAFAVYDKFSVGDAKTRYKLKVEGYSGTAGDSMAYHNGRSFSTFDKDTDSAITNCALSYKGAFWYRNCHRVNLMGRYGDNNHSQGVNWFHWKGHEHSIQFAEMKLRPSNFRNLEGRRKRA

SEQ ID NO: 9784 - protein, 1837 aa, Homo sapiens
MGAMTQLLAGVFLAFLALATEGGVLKKVIRHKRQSGVNATLPEENQPVVFNHVYNIKLPVGSQCSVDLESASGEKDLAPPSEPSESFQEHTVDGENQIVFTHRINIPRRACGCAAAPDVKELLSRLEELENLVSSLREQCTAGAGCCLQPATGRLDTRPFCSGRGNFSTEGCGCVCEPGWKGPNCSEPECPGNCHLRGRCIDGQCICDDGFTGEDCSQLACPSDCNDQGKCVNGVCICFEGYAGADCSREICPVPCSEEHGTCVDGLCVCHDGFAGDDCNKPLCLNNCYNRGRCVENECVCDEGFTGEDCSELICPNDCFDRGRCINGTCYCEEGFTGEDCGKPTCPHACHTQGRCEEGQCVCDEGFAGLDCSEKRCPADCHNRGRCVDGRCECDDGFTGADCGELKCPNGCSGHGRCVNGQCVCDEGYTGEDCSQLRCPNDCHSRGRCVEGKCVCEQGFKGYDCSDMSCPNDCHQHGRCVNGMCVCDDGYTGEDCRDRQCPRDCSNRGLCVDGQCVCEDGFTGPDCAELSCPNDCHGQGRCVNGQCVCHEGFMGKDCKEQRCPSDCHGQGRCVDGQCICHEGFTGLDCGQHSCPSDCNNLGQCVSGRCICNEGYSGEDCSEVSPPKDLVVTEVTEETVNLAWDNEMRVTEYLVVYTPTHEGGLEMQFRVPGDQTSTIIQELEPGVEYFIRVFAILENKKSIPVSARVATYLPAPEGLKFKSIKETSVEVEWDPLDIAFETWEIIFRNMNKEDEGEITKSLRRPETSYRQTGLAPGQEYEISLHIVKNNTRGPGLKRVTTTRLDAPSQIEVKDVTDTTALITWFKPLAEIDGIELTYGIKDVPGDRTTIDLTEDENQYSIGNLKPDTEYEVSLISRRGDMSSNPAKETFTTGLDAPRNLRRVSQTDNSITLEWRNGKAAIDSYRIKYAPISGGDHAEVDVPKSQQATTKTTLTGLRPGTEYGIGVSAVKEDKESNPATINAATELDTPKDLQVSETAETSLTLLWKTPLAKFDRYRLNYSLPTGQWVGVQLPRNTTSYVLRGLEPGQEYNVLLTAEKGRHKSKPARVKASTAKEPEIGNLNVSDITPESFNLSWMATDGIFETFTIEIIDSNRLLETVEYNISGAERTAHISGLPPSTDFIVYLSGLAPSIRTKTISATATTEALPLLENLTISDINPYGFTVSWMASENAFDSFLVTVVDSGKLLDPQEFTLSGTQRKLELRGLITGIGYEVMVSGFTQGHQTKPLRAEIVTEAEPEVDNLLVSDATPDGFRLSWTADEGVFDNFVLKIRDTKKQSEPLEITLLAPERTRDLTGLREATEYEIELYGISKGRRSQTVSAIATTAMGSPKEVIFSDITENSATVSWRAPTAQVESFRITYVPITGGTPSMVTVDGTKTQTRLVKLIPGVEYLVSIIAMKGFEESEPVSGSFTTALDGPSGLVTANITDSEALARWQPAIATVDSYVISYTGEKVPEITRTVSGNTVEYALTDLEPATEYTLRIFAEKGPQKSSTITAKFTTDLDSPRDLTATEVQSETALLTWRPPRASVTGYLLVYESVDGTVKEVIVGPDTTSYSLADLSPSTHYTAKIQALNGPLRSNMIQTIFTTIGLLYPFPKDCSQAMLNGDTTSGLYTIYLNGDKAQALEVFCDMTSDGGGWIVFLRRKNGRENFYQNWKAYAAGFGDRREEFWLGLDNLNKITAQGQYELRVDLRDHGETAFAVYDKFSVGDAKTRYKLKVEGYSGTAGDSMAYHNGRSFSTFDKDTDSAITNCALSYKGAFWYRNCHRVNLMGRYGDNNHSQGVNWFHWKGHEHSIQFAEMKLRPSNFRNLEGRRKRA

SEQ ID NO: 9785 - protein, 2201 aa, Homo sapiens
MGAMTQLLAGVFLAFLALATEGGVLKKVIRHKRQSGVNATLPEENQPVVFNHVYNIKLPVGSQCSVDLESASGEKDLAPPSEPSESFQEHTVDGENQIVFTHRINIPRRACGCAAAPDVKELLSRLEELENLVSSLREQCTAGAGCCLQPATGRLDTRPFCSGRGNFSTEGCGCVCEPGWKGPNCSEPECPGNCHLRGRCIDGQCICDDGFTGEDCSQLACPSDCNDQGKCVNGVCICFEGYAGADCSREICPVPCSEEHGTCVDGLCVCHDGFAGDDCNKPLCLNNCYNRGRCVENECVCDEGFTGEDCSELICPNDCFDRGRCINGTCYCEEGFTGEDCGKPTCPHACHTQGRCEEGQCVCDEGFAGLDCSEKRCPADCHNRGRCVDGRCECDDGFTGADCGELKCPNGCSGHGRCVNGQCVCDEGYTGEDCSQLRCPNDCHSRGRCVEGKCVCEQGFKGYDCSDMSCPNDCHQHGRCVNGMCVCDDGYTGEDCRDRQCPRDCSNRGLCVDGQCVCEDGFTGPDCAELSCPNDCHGQGRCVNGQCVCHEGFMGKDCKEQRCPSDCHGQGRCVDGQCICHEGFTGLDCGQHSCPSDCNNLGQCVSGRCICNEGYSGEDCSEVSPPKDLVVTEVTEETVNLAWDNEMRVTEYLVVYTPTHEGGLEMQFRVPGDQTSTIIQELEPGVEYFIRVFAILENKKSIPVSARVATYLPAPEGLKFKSIKETSVEVEWDPLDIAFETWEIIFRNMNKEDEGEITKSLRRPETSYRQTGLAPGQEYEISLHIVKNNTRGPGLKRVTTTRLDAPSQIEVKDVTDTTALITWFKPLAEIDGIELTYGIKDVPGDRTTIDLTEDENQYSIGNLKPDTEYEVSLISRRGDMSSNPAKETFTTGLDAPRNLRRVSQTDNSITLEWRNGKAAIDSYRIKYAPISGGDHAEVDVPKSQQATTKTTLTGLRPGTEYGIGVSAVKEDKESNPATINAATELDTPKDLQVSETAETSLTLLWKTPLAKFDRYRLNYSLPTGQWVGVQLPRNTTSYVLRGLEPGQEYNVLLTAEKGRHKSKPARVKASTEQAPELENLTVTEVGWDGLRLNWTAADQAYEHFIIQVQEANKVEAARNLTVPGSLRAVDIPGLKAATPYTVSIYGVIQGYRTPVLSAEASTGETPNLGEVVVAEVGWDALKLNWTAPEGAYEYFFIQVQEADTVEAAQNLTVPGGLRSTDLPGLKAATHYTITIRGVTQDFSTTPLSVEVLTEEVPDMGNLTVTEVSWDALRLNWTTPDGTYDQFTIQVQEADQVEEAHNLTVPGSLRSMEIPGLRAGTPYTVTLHGEVRGHSTRPLAVEVVTEDLPQLGDLAVSEVGWDGLRLNWTAADNAYEHFVIQVQEVNKVEAAQNLTLPGSLRAVDIPGLEAATPYRVSIYGVIRGYRTPVLSAEASTAKEPEIGNLNVSDITPESFNLSWMATDGIFETFTIEIIDSNRLLETVEYNISGAERTAHISGLPPSTDFIVYLSGLAPSIRTKTISATATTEALPLLENLTISDINPYGFTVSWMASENAFDSFLVTVVDSGKLLDPQEFTLSGTQRKLELRGLITGIGYEVMVSGFTQGHQTKPLRAEIVTEAEPEVDNLLVSDATPDGFRLSWTADEGVFDNFVLKIRDTKKQSEPLEITLLAPERTRDLTGLREATEYEIELYGISKGRRSQTVSAIATTAMGSPKEVIFSDITENSATVSWRAPTAQVESFRITYVPITGGTPSMVTVDGTKTQTRLVKLIPGVEYLVSIIAMKGFEESEPVSGSFTTALDGPSGLVTANITDSEALARWQPAIATVDSYVISYTGEKVPEITRTVSGNTVEYALTDLEPATEYTLRIFAEKGPQKSSTITAKFTTDLDSPRDLTATEVQSETALLTWRPPRASVTGYLLVYESVDGTVKEVIVGPDTTSYSLADLSPSTHYTAKIQALNGPLRSNMIQTIFTTIGLLYPFPKDCSQAMLNGDTTSGLYTIYLNGDKAQALEVFCDMTSDGGGWIVFLRRKNGRENFYQNWKAYAAGFGDRREEFWLGLDNLNKITAQGQYELRVDLRDHGETAFAVYDKFSVGDAKTRYKLKVEGYSGTAGDSMAYHNGRSFSTFDKDTDSAITNCALSYKGAFWYRNCHRVNLMGRYGDNNHSQGVNWFHWKGHEHSIQFAEMKLRPSNFRNLEGRRKRA

SEQ ID NO: 9786 - protein, 1564 aa, Homo sapiens
MGAMTQLLAGVFLAFLALATEGGVLKKVIRHKRQSGVNATLPEENQPVVFNHVYNIKLPVGSQCSVDLESASGEKDLAPPSEPSESFQEHTVDGENQIVFTHRINIPRRACGCAAAPDVKELLSRLEELENLVSSLREQCTAGAGCCLQPATGRLDTRPFCSGRGNFSTEGCGCVCEPGWKGPNCSEPECPGNCHLRGRCIDGQCICDDGFTGEDCSQLACPSDCNDQGKCVNGVCICFEGYAGADCSREICPVPCSEEHGTCVDGLCVCHDGFAGDDCNKPLCLNNCYNRGRCVENECVCDEGFTGEDCSELICPNDCFDRGRCINGTCYCEEGFTGEDCGKPTCPHACHTQGRCEEGQCVCDEGFAGLDCSEKRCPADCHNRGRCVDGRCECDDGFTGADCGELKCPNGCSGHGRCVNGQCVCDEGYTGEDCSQLRCPNDCHSRGRCVEGKCVCEQGFKGYDCSDMSCPNDCHQHGRCVNGMCVCDDGYTGEDCRDRQCPRDCSNRGLCVDGQCVCEDGFTGPDCAELSCPNDCHGQGRCVNGQCVCHEGFMGKDCKEQRCPSDCHGQGRCVDGQCICHEGFTGLDCGQHSCPSDCNNLGQCVSGRCICNEGYSGEDCSEVSPPKDLVVTEVTEETVNLAWDNEMRVTEYLVVYTPTHEGGLEMQFRVPGDQTSTIIQELEPGVEYFIRVFAILENKKSIPVSARVATYLPAPEGLKFKSIKETSVEVEWDPLDIAFETWEIIFRNMNKEDEGEITKSLRRPETSYRQTGLAPGQEYEISLHIVKNNTRGPGLKRVTTTRLDAPSQIEVKDVTDTTALITWFKPLAEIDGIELTYGIKDVPGDRTTIDLTEDENQYSIGNLKPDTEYEVSLISRRGDMSSNPAKETFTTGLDAPRNLRRVSQTDNSITLEWRNGKAAIDSYRIKYAPISGGDHAEVDVPKSQQATTKTTLTGLRPGTEYGIGVSAVKEDKESNPATINAATELDTPKDLQVSETAETSLTLLWKTPLAKFDRYRLNYSLPTGQWVGVQLPRNTTSYVLRGLEPGQEYNVLLTAEKGRHKSKPARVKASTAMGSPKEVIFSDITENSATVSWRAPTAQVESFRITYVPITGGTPSMVTVDGTKTQTRLVKLIPGVEYLVSIIAMKGFEESEPVSGSFTTALDGPSGLVTANITDSEALARWQPAIATVDSYVISYTGEKVPEITRTVSGNTVEYALTDLEPATEYTLRIFAEKGPQKSSTITAKFTTDLDSPRDLTATEVQSETALLTWRPPRASVTGYLLVYESVDGTVKEVIVGPDTTSYSLADLSPSTHYTAKIQALNGPLRSNMIQTIFTTIGLLYPFPKDCSQAMLNGDTTSGLYTIYLNGDKAQALEVFCDMTSDGGGWIVFLRRKNGRENFYQNWKAYAAGFGDRREEFWLGLDNLNKITAQGQYELRVDLRDHGETAFAVYDKFSVGDAKTRYKLKVEGYSGTAGDSMAYHNGRSFSTFDKDTDSAITNCALSYKGAFWYRNCHRVNLMGRYGDNNHSQGVNWFHWKGHEHSIQFAEMKLRPSNFRNLEGRRKRA

SEQ ID NO: 9787 - protein, 2110 aa, Homo sapiens
MGAMTQLLAGVFLAFLALATEGGVLKKVIRHKRQSGVNATLPEENQPVVFNHVYNIKLPVGSQCSVDLESASGEKDLAPPSEPSESFQEHTVDGENQIVFTHRINIPRRACGCAAAPDVKELLSRLEELENLVSSLREQCTAGAGCCLQPATGRLDTRPFCSGRGNFSTEGCGCVCEPGWKGPNCSEPECPGNCHLRGRCIDGQCICDDGFTGEDCSQLACPSDCNDQGKCVNGVCICFEGYAGADCSREICPVPCSEEHGTCVDGLCVCHDGFAGDDCNKPLCLNNCYNRGRCVENECVCDEGFTGEDCSELICPNDCFDRGRCINGTCYCEEGFTGEDCGKPTCPHACHTQGRCEEGQCVCDEGFAGLDCSEKRCPADCHNRGRCVDGRCECDDGFTGADCGELKCPNGCSGHGRCVNGQCVCDEGYTGEDCSQLRCPNDCHSRGRCVEGKCVCEQGFKGYDCSDMSCPNDCHQHGRCVNGMCVCDDGYTGEDCRDRQCPRDCSNRGLCVDGQCVCEDGFTGPDCAELSCPNDCHGQGRCVNGQCVCHEGFMGKDCKEQRCPSDCHGQGRCVDGQCICHEGFTGLDCGQHSCPSDCNNLGQCVSGRCICNEGYSGEDCSEVSPPKDLVVTEVTEETVNLAWDNEMRVTEYLVVYTPTHEGGLEMQFRVPGDQTSTIIQELEPGVEYFIRVFAILENKKSIPVSARVATYLPAPEGLKFKSIKETSVEVEWDPLDIAFETWEIIFRNMNKEDEGEITKSLRRPETSYRQTGLAPGQEYEISLHIVKNNTRGPGLKRVTTTRLDAPSQIEVKDVTDTTALITWFKPLAEIDGIELTYGIKDVPGDRTTIDLTEDENQYSIGNLKPDTEYEVSLISRRGDMSSNPAKETFTTGLDAPRNLRRVSQTDNSITLEWRNGKAAIDSYRIKYAPISGGDHAEVDVPKSQQATTKTTLTGLRPGTEYGIGVSAVKEDKESNPATINAATELDTPKDLQVSETAETSLTLLWKTPLAKFDRYRLNYSLPTGQWVGVQLPRNTTSYVLRGLEPGQEYNVLLTAEKGRHKSKPARVKASTEQAPELENLTVTEVGWDGLRLNWTAADQAYEHFIIQVQEANKVEAARNLTVPGSLRAVDIPGLKAATPYTVSIYGVIQGYRTPVLSAEASTGETPNLGEVVVAEVGWDALKLNWTAPEGAYEYFFIQVQEADTVEAAQNLTVPGGLRSTDLPGLKAATHYTITIRGVTQDFSTTPLSVEVLTEEVPDMGNLTVTEVSWDALRLNWTTPDGTYDQFTIQVQEADQVEEAHNLTVPGSLRSMEIPGLRAGTPYTVTLHGEVRGHSTRPLAVEVVTEDLPQLGDLAVSEVGWDGLRLNWTAADNAYEHFVIQVQEVNKVEAAQNLTLPGSLRAVDIPGLEAATPYRVSIYGVIRGYRTPVLSAEASTAKEPEIGNLNVSDITPESFNLSWMATDGIFETFTIEIIDSNRLLETVEYNISGAERTAHISGLPPSTDFIVYLSGLAPSIRTKTISATATTEAEPEVDNLLVSDATPDGFRLSWTADEGVFDNFVLKIRDTKKQSEPLEITLLAPERTRDLTGLREATEYEIELYGISKGRRSQTVSAIATTAMGSPKEVIFSDITENSATVSWRAPTAQVESFRITYVPITGGTPSMVTVDGTKTQTRLVKLIPGVEYLVSIIAMKGFEESEPVSGSFTTALDGPSGLVTANITDSEALARWQPAIATVDSYVISYTGEKVPEITRTVSGNTVEYALTDLEPATEYTLRIFAEKGPQKSSTITAKFTTDLDSPRDLTATEVQSETALLTWRPPRASVTGYLLVYESVDGTVKEVIVGPDTTSYSLADLSPSTHYTAKIQALNGPLRSNMIQTIFTTIGLLYPFPKDCSQAMLNGDTTSGLYTIYLNGDKAQALEVFCDMTSDGGGWIVFLRRKNGRENFYQNWKAYAAGFGDRREEFWLGLDNLNKITAQGQYELRVDLRDHGETAFAVYDKFSVGDAKTRYKLKVEGYSGTAGDSMAYHNGRSFSTFDKDTDSAITNCALSYKGAFWYRNCHRVNLMGRYGDNNHSQGVNWFHWKGHEHSIQFAEMKLRPSNFRNLEGRRKRA

SEQ ID NO: 9788 - protein, 789 aa, Homo sapiens
MNLQPIFWIGLISSVCCVFAQTDENRCLKANAKSCGECIQAGPNCGWCTNSTFLQEGMPTSARCDDLEALKKKGCPPDDIENPRGSKDIKKNKNVTNRSKGTAEKLKPEDIHQIQPQQLVLRLRSGEPQTFTLKFKRAEDYPIDLYYLMDLSYSMKDDLENVKSLGTDLMNEMRRITSDFRIGFGSFVEKTVMPYISTTPAKLRNPCTSEQNCTTPFSYKNVLSLTNKGEVFNELVGKQRISGNLDSPEGGFDAIMQVAVCGSLIGWRNVTRLLVFSTDAGFHFAGDGKLGGIVLPNDGQCHLENNMYTMSHYYDYPSIAHLVQKLSENNIQTIFAVTEEFQPVYKELKNLIPKSAVGTLSANSSNVIQLIIDAYNSLSSEVILENGKLSEGVTISYKSYCKNGVNGTGENGRKCSNISIGDEVQFEISITSNKCPKKDSDSFKIRPLGFTEEVEVILQYICECECQSEGIPESPKCHEGNGTFECGACRCNEGRVGRHCECSTDEVNSEDMDAYCRKENSSEICSNNGECVCGQCVCRKRDNTNEIYSGKFCECDNFNCDRSNGLICGGNGVCKCRVCECNPNYTGSACDCSLDTSTCEASNGQICNGRGICECGVCKCTDPKFQGQTCEMCQTCLGVCAEHKECVQCRAFNKGEKKDTCTQECSYFNITKVESRDKLPQPVQPDPVSHCKEKDVDDCWFYFTYSVNGNNEVMVHVVENPECPTGPDIIPIVAGVVAGIVLIGLALLLIWKLLMIIHDRREFAKFEKEKMNAKWDTVSYKTSKKQSGL

SEQ ID NO: 9789 - protein, 819 aa, Homo sapiens
MNLQPIFWIGLISSVCCVFAQTDENRCLKANAKSCGECIQAGPNCGWCTNSTFLQEGMPTSARCDDLEALKKKGCPPDDIENPRGSKDIKKNKNVTNRSKGTAEKLKPEDIHQIQPQQLVLRLRSGEPQTFTLKFKRAEDYPIDLYYLMDLSYSMKDDLENVKSLGTDLMNEMRRITSDFRIGFGSFVEKTVMPYISTTPAKLRNPCTSEQNCTTPFSYKNVLSLTNKGEVFNELVGKQRISGNLDSPEGGFDAIMQVAVCGSLIGWRNVTRLLVFSTDAGFHFAGDGKLGGIVLPNDGQCHLENNMYTMSHYYDYPSIAHLVQKLSENNIQTIFAVTEEFQPVYKELKNLIPKSAVGTLSANSSNVIQLIIDAYNSLSSEVILENGKLSEGVTISYKSYCKNGVNGTGENGRKCSNISIGDEVQFEISITSNKCPKKDSDSFKIRPLGFTEEVEVILQYICECECQSEGIPESPKCHEGNGTFECGACRCNEGRVGRHCECSTDEVNSEDMDAYCRKENSSEICSNNGECVCGQCVCRKRDNTNEIYSGKFCECDNFNCDRSNGLICGGNGVCKCRVCECNPNYTGSACDCSLDTSTCEASNGQICNGRGICECGVCKCTDPKFQGQTCEMCQTCLGVCAEHKECVQCRAFNKGEKKDTCTQECSYFNITKVESRDKLPQPVQPDPVSHCKEKDVDDCWFYFTYSVNGNNEVMVHVVENPECPTGPDIIPIVAGVVAGIVLIGLALLLIWKLLMIIHDRREFAKFEKEKMNAKWDTPGVQWCDISSLQPLTSRFQQFSCLSLPSTWDYRVKILFIRVP

SEQ ID NO: 9790 - protein, 825 aa, Homo sapiens
MNLQPIFWIGLISSVCCVFAQTDENRCLKANAKSCGECIQAGPNCGWCTNSTFLQEGMPTSARCDDLEALKKKGCPPDDIENPRGSKDIKKNKNVTNRSKGTAEKLKPEDIHQIQPQQLVLRLRSGEPQTFTLKFKRAEDYPIDLYYLMDLSYSMKDDLENVKSLGTDLMNEMRRITSDFRIGFGSFVEKTVMPYISTTPAKLRNPCTSEQNCTTPFSYKNVLSLTNKGEVFNELVGKQRISGNLDSPEGGFDAIMQVAVCGSLIGWRNVTRLLVFSTDAGFHFAGDGKLGGIVLPNDGQCHLENNMYTMSHYYDYPSIAHLVQKLSENNIQTIFAVTEEFQPVYKELKNLIPKSAVGTLSANSSNVIQLIIDAYNSLSSEVILENGKLSEGVTISYKSYCKNGVNGTGENGRKCSNISIGDEVQFEISITSNKCPKKDSDSFKIRPLGFTEEVEVILQYICECECQSEGIPESPKCHEGNGTFECGACRCNEGRVGRHCECSTDEVNSEDMDAYCRKENSSEICSNNGECVCGQCVCRKRDNTNEIYSGKFCECDNFNCDRSNGLICGGNGVCKCRVCECNPNYTGSACDCSLDTSTCEASNGQICNGRGICECGVCKCTDPKFQGQTCEMCQTCLGVCAEHKECVQCRAFNKGEKKDTCTQECSYFNITKVESRDKLPQPVQPDPVSHCKEKDVDDCWFYFTYSVNGNNEVMVHVVENPECPTGPDIIPIVAGVVAGIVLIGLALLLIWKLLMIIHDRREFAKFEKEKMNAKWDTSLSVAQPGVQWCDISSLQPLTSRFQQFSCLSLPSTWDYRVKILFIRVP

SEQ ID NO: 9791 - protein, 801 aa, Homo sapiens
MNLQPIFWIGLISSVCCVFAQTDENRCLKANAKSCGECIQAGPNCGWCTNSTFLQEGMPTSARCDDLEALKKKGCPPDDIENPRGSKDIKKNKNVTNRSKGTAEKLKPEDIHQIQPQQLVLRLRSGEPQTFTLKFKRAEDYPIDLYYLMDLSYSMKDDLENVKSLGTDLMNEMRRITSDFRIGFGSFVEKTVMPYISTTPAKLRNPCTSEQNCTTPFSYKNVLSLTNKGEVFNELVGKQRISGNLDSPEGGFDAIMQVAVCGSLIGWRNVTRLLVFSTDAGFHFAGDGKLGGIVLPNDGQCHLENNMYTMSHYYDYPSIAHLVQKLSENNIQTIFAVTEEFQPVYKELKNLIPKSAVGTLSANSSNVIQLIIDAYNSLSSEVILENGKLSEGVTISYKSYCKNGVNGTGENGRKCSNISIGDEVQFEISITSNKCPKKDSDSFKIRPLGFTEEVEVILQYICECECQSEGIPESPKCHEGNGTFECGACRCNEGRVGRHCECSTDEVNSEDMDAYCRKENSSEICSNNGECVCGQCVCRKRDNTNEIYSGKFCECDNFNCDRSNGLICGGNGVCKCRVCECNPNYTGSACDCSLDTSTCEASNGQICNGRGICECGVCKCTDPKFQGQTCEMCQTCLGVCAEHKECVQCRAFNKGEKKDTCTQECSYFNITKVESRDKLPQPVQPDPVSHCKEKDVDDCWFYFTYSVNGNNEVMVHVVENPECPTGPDIIPIVAGVVAGIVLIGLALLLIWKLLMIIHDRREFAKFEKEKMNAKWDTQENPIYKSPINNFKNPNYGRKAGL

SEQ ID NO: 9792 - protein, 798 aa, Homo sapiens [sequence omitted]

SEQ ID NO: 9793 - protein, 359 aa, Homo sapiens
MKATIILLLLAQVSWAGPFQQRGLFDFMLEDEASGIGPEVPDDRDFEPSLGPVCPFRCQCHLRVVQCSDLGLDKVPKDLPPDTTLLDLQNNKITEIKDGDFKNLKNLHALILVNNKISKVSPGAFTPLVKLERLYLSKNQLKELPEKMPKTLQELRAHENEITKVRKVTFNGLNQMIVIELGTNPLKSSGIENGAFQGMKKLSYIRIADTNITSIPQGLPPSLTELHLDGNKISRVDAASLKGLNNLAKLGLSFNSISAVDNGSLANTPHLRELHLDNNKLTRVPGGLAEHKYIQVVYLHNNNISVVGSSDFCPPGHNTKKASYSGVSLFSNPVQYWEIQPSTFRCVYVRSAIQLGNYK

SEQ ID NO: 9794 - protein, 250 aa, Homo sapiens
MKATIILLLLAQVSWAGPFQQRGLFDFMLEDEASGIGPEVPDDRDFEPSLGPVCPFRCQCHLRVVQCSDLELGTNPLKSSGIENGAFQGMKKLSYIRIADTNITSIPQGLPPSLTELHLDGNKISRVDAASLKGLNNLAKLGLSFNSISAVDNGSLANTPHLRELHLDNNKLTRVPGGLAEHKYIQVVYLHNNNISVVGSSDFCPPGHNTKKASYSGVSLFSNPVQYWEIQPSTFRCVYVRSAIQLGNYK

SEQ ID NO: 9795 - protein, 266 aa, Homo sapiens
MLNLLLLALPVLASRAYAAPAPGQALQRVGIVGGQEAPRSKWPWQVSLRVHGPYWMHFCGGSLIHPQWVLTAAHCVGPVQLREQHLYYQDQLLPVSRIIVHPQFYTAQIGADIALLELEEPVNVSSHVHTVTLPPASETFPPGMPCWVTGWGDVDNDERLPPPFPLKQVKVPIMENHICDAKYHLGAYTGDDVRIVRDDMLCAGNTRRDSCQGDSGGPLVCKVNGTWLQAGVVSWGEGCAQPNRPGIYTRVTYYLDWIHHYVPKKP

SEQ ID NO: 9796 - protein, 275 aa, Homo sapiens
MLNLLLLALPVLASRAYAAPAPGQALQRVGIVGGQEAPRSKWPWQVSLRVHGPYWMHFCGGSLIHPQWVLTAAHCVGPDVKDLAALRVQLREQHLYYQDQLLPVSRIIVHPQFYTAQIGADIALLELEEPVKVSSHVHTVTLPPASETFPPGMPCWVTGWGDVDNDERLPPPFPLKQVKVPIMENHICDAKYHLGAYTGDDVRIVRDDMLCAGNTRRDSCQGDSGGPLVCKVNGTWLQAGVVSWGEGCAQPNRPGIYTRVTYYLDWIHHYVPKKP

SEQ ID NO: 9797 - protein, 275 aa, Homo sapiens
MLNLLLLALPVLASRAYAAPAPGQALQRVGIVGGQEAPRSKWPWQVSLRVHGPYWMHFCGGSLIHPQWVLTAAHCVGPDVKDLAALRVQLREQHLYYQDQLLPVSRIIVHPQFYTAQIGADIALLELEEPVNVSSHVHTVTLPPASETFPPGMPCWVTGWGDVDNDERLPPPFPLKQVKVPIMENHICDAKYHLGAYTGDDVRIVRDDMLCAGNTRRDSCQGDSGGPLVCKVNGTWLQAGVVSWGEGCAQPNRPGIYTRVTYYLDWIHHYVPKKP

SEQ ID NO: 9798 - protein, 401 aa, Homo sapiens
MMGLGNGRRSMKSPPLVLAALVACIIVLGFNYWIASSRSVDLQTRIMELEGRVRRAAAERGAVELKKNEFQGELEKQREQLDKIQSSHNFQLESVNKLYQDEKAVLVNNITTGERLIRVLQDQLKTLQRNYGRLQQDVLQFQKNQTNLERKFSYDLSQCINQMKEVKEQCEERIEEVTKKGNEAVASRDLSENNDQRQQLQALSEPQPRLQAAGLPHTEVPQGKGNVLGNSKSQTPAPSSEVVLDSKRQVEKEETNEIQVVNEEPQRDRLPQEPGREQVVEDRPVGGRGFGGAGELGQTPQVQAALSVSQENPEMEGPERDQLVIPDGQEEEQEAAGEGRNQQKLRGEDDYNMDENEAESETDKQAALAGNDRNIDVFNVEDQKRDTINLLDQREKRNHTL

SEQ ID NO: 9799 - protein, 480 aa, Homo sapiens
MIRAAPPPLFLLLLLLLLLVSWASRGEAAPDQDEIQRLPGLAKQPSFRQYSGYLKGSGSKHLHYWFVESQKDPENSPVVLWLNGGPGCSSLDGLLTEHGPFLVQPDGVTLEYNPYSWNLIANVLYLESPAGVGFSYSDDKFYATNDTEVAQSNFEALQDFFRLFPEYKNNKLFLTGESYAGIYIPTLAVLVMQDPSMNLQGLAVGNGLSSYEQNDNSLVYFAYYHGLLGNRLWSSLQTHCCSQNKCNFYDNKDLECVTNLQEVARIVGNSGLNIYNLYAPCAGGVPSHFRYEKDTVVVQDLGNIFTRLPLKRMWHQALLRSGDKVRMDPPCTNTTAASTYLNNPYVRKALNIPEQLPQWDMCNFLVNLQYRRLYRSMNSQYLKLLSSQKYQILLYNGDVDMACNFMGDEWFVDSLNQKMEVQRRPWLVKYGDSGEQIAGFVKEFSHIAFLTIKGAGHMVPTDKPLAAFTMFSRFLNKQPY

SEQ ID NO: 9800 - protein, 463 aa, Homo sapiens
MGAGPSLLLAALLLLLSGDGAVRCDTPANCTYLDLLGTWVFQVGSSGSQRDVNCSVMGPQEKKVVVYLQKLDTAYDDLGNSGHFTIIYNQGFEIVLNDYKWFAFFKYKEEGSKVTTYCNETMTGWVHDVLGRNWACFTGKKVGTASENVYVNTAHLKNSQEKYSNRLYKYDHNFVKAINAIQKSWTATTYMEYETLTLGDMIRRSGGHSRKIPRPKPAPLTAEIQQKILHLPTSWDWRNVHGINFVSPVRNQASCGSCYSFASMGMLEARIRILTNNSQTPILSPQEVVSCSQYAQGCEGGFPYLIAGKYAQDFGLVEEACFPYTGTDSPCKMKEDCFRYYSSEYHYVGGFYGGCNEALMKLELVHHGPMAVAFEVYDDFLHYKKGIYHHTGLRDPFNPFELTNHAVLLVGYGTDSASGMDYWIVKNSWGTGWGENGYFRIRRGTDECAIESIAVAATPIPKL

SEQ ID NO: 9801 - protein, 450 aa, Homo sapiens
PGSRDPSAFQTFLSFQSPTHTADTRRPDLVRSSEAESRAMLLKTVLLLGHVAQVLMLDNGLLQTPPMGWLAWERFRCNINCDEDPKNCISEQLFMEMADRMAQDGWRDMGYTYLNIDDCWIGGRDASGRLMPDPKRFPHGIPFLADYVHSLGLKLGIYADMGNFTCMGYPGTTLDKVVQDAQTFAEWKVDMLKLDGCFSTPEERAQGYPKMAAALNATGRPIAFSCSWPAYEGGLPPRVNYSLLADICNLWRNYDDIQDSWWSVLSILNWFVEHQDILQPVAGPGHWNDPDMLLIGNFGLSLEQSRAQMALWTVLAAPLLMSTDLRTISAQNMDILQNPLMIKINQDPLGIQGRRIHKEKSLIEVYMRPLSNKASALVFFSCRTDMPYRYHSSLGQLNFTGSVIYEAQDVYSGDIISGLRDETNFTVIINPSGVVMWYLYPIKNLEMSQQ

SEQ ID NO: 9802 - protein, 476 aa, Homo sapiens
MAGRGGSALLALCGALAACGWLLGAEAQEPGAPAAGMRRRRRLQQEDGISFEYHRYPELREALVSVWLQCTAISRIYTVGRSFEGRELLVIELSDNPGVHEPGEPEFKYIGNMHGNEAVGRELLIFLAQYLCNEYQKGNETIVNLIHSTRIHIMPSLNPDGFEKAASQPGELKDWFVGRSNAQGIDLNRNFPDLDRIVYVNEKEGGPNNHLLKNMKKIVDQNTKLAPETKAVIHWIMDIPFVLSANLHGGDLVANYPYDETRSGSAHEYSSSPDDAIFQSLARAYSSFNPAMSDPNRPPCRKNDDDSSFVDGTTNGGAWYSVPGGMQDFNYLSSNCFEITVELSCEKFPPEETLKTYWEDNKNSLISYLEQIHRGVKGFVRDLQGNPIANATISVEGIDHDVTSAKDGDYWRLLIPGNYKLTASAPGYLAITKKVAVPYSPAAGVDFELESFSERKEEEKEELMEWWKMMSETLNF

SEQ ID NO: 9803 - protein, 1010 aa, Homo sapiens
MGYARASGVCARGCLDSAGPWTMSRALRPPLPPLCFFLLLLAAAGARAGGYETCPTVQPNMLNVHLLPHTHDDVGWLKTVDQYFYGIKNDIQHAGVQYILDSVISALLADPTRRFIYVEIAFFSRWWHQQTNATQEVVRDLVRQGRLEFANGGWVMNDEAATHYGAIVDQMTLGLRFLEDTFGNDGRPRVAWHIDPFGHSREQASLFAQMGFDGFFFGRLDYQDKWVRMQKLEMEQVWRASTSLKPPTADLFTGVLPNGYNPPRNLCWDVLCVDQPLVEDPRSPEYNAKELVDYFLNVATAQGRYYRTNHTVMTMGSDFQYENANMWFKNLDKLIRLVNAQQAKGSSVHVLYSTPACYLWELNKANLTWSVKHDDFFPYADGPHQFWTGYFSSRPALKRYERLSYNFLQVCNQLEALVGLAANVGPYGSGDSAPLNEAMAVLQHHDAVSGTSRQHVANDYARQLAAGWGPCEVLLSNALARLRGFKDHFTFCQQLNISICPLSQTAARFQVIVYNPLGRKVNWMVRLPVSEGVFVVKDPNGRTVPSDVVIFPSSDSQAHPPELLFSASLPALGFSTYSVAQVPRWKPQARAPQPIPRRSWSPALTIENEHIRATFDPDTGLLMEIMNMNQQLLLPVRQTFFWYNASIGDNESDQASGAYIFRPNQQKPLPVSRWAQIHLVKTPLVQEVHQNFSAWCSQVVRLYPGQRHLELEWSVGPIPVGDTWGKEVISRFDTPLETKGRFYTDSNGREILERRRDYRPTWKLNQTEPVAGNYYPVNTRIYITDGNMQLTVLTDRSQGGSSLRDGSLELMVHRRLLKDDGRGVSEPLMENGSGAWVRGRHLVLLDTAQAAAAGHRLLAEQEVLAPQVVLAPGGGAAYNLGAPPRTQFSGLRRDLPPSVHLLTLASWGPEMVLLRLEHQFAVGEDSGRNLSAPVTLNLRDLFSTFTITRLQETTLVANQLREAASRLKWTTNTGPTPHQTPYQLDPANITLEPMEIRTFLASVQWKEVDG

SEQ ID NO: 9804 - protein, 732 aa, Homo sapiens
MGQGWATAGLPSLLFLLLCYGHPLLVPSQEASQQVTVTHGTSSQATTSSQTTTHQATAHQTSAQSPNLVTDEAEASKFVEEYDRTSQVVWNEYAEANWNYNTNITTETSKILLQKNMQIANHTLKYGTQARKFDVNQLQNTTIKRIIKKVQDLERAALPAQELEEYNKILLDMETTYSVATVCHPNGSCLQLEPDLTNVMATSRKYEDLLWAWEGWRDKAGRAILQFYPKYVELINQAARLNGYVDAGDSWRSMYETPSLEQDLERLFQELQPLYLNLHAYVRRALHRHYGAQHINLEGPIPAHLLGNMWAQTWSNIYDLVVPFPSAPSMDTTEAMLKQGWTPRRMFKEADDFFTSLGLLPVPPEFWNKSMLEKPTDGREVVCHASAWDFYNGKDFRIKQCTTVNLEDLVVAHHEMGHIQYFMQYKDLPVALREGANPGFHEAIGDVLALSVSTPKHLHSLNLLSSEGGSDEHDINFLMKMALDKIAFIPFSYLVDQWRWRVFDGSITKENYNQEWWSLRLKYQGLCPPVPRTQGDFDPGAKFHIPSSVPYIRYFVSFIIQFQFHEALCQAAGHTGPLHKCDIYQSKEAGQRLATAMKLGFSRPWPEAMQLITGQPNMSASAMLSYFKPLLDWLRTENELHGEKLGWPQYNWTPNSARSEGPLPDSGRVSFLGLDLDAQQARVGQWLLLFLGIALLVATLGLSQRLFSIRHRSLHRHSHGPQFGSEVELRHS

SEQ ID NO: 9805 - protein, 748 aa, Homo sapiens
MGQGWATAGLPSLLFLLLCYGHPLLVPSQEASQQVTVTHGTSSQATTSSQTTTHQATAHQTSAQSPNLVTDEAEASKFVEEYDRTSQVVWNEYAEANWNYNTNITTETSKILLQKNMQIANHTLKYGTQARKFDVNQLQNTTIKRIIKKVQDLERAALPAQELEEYNKILLDMETTYSVATVCHPNGSCLQLEPDLTNVMATSRKYEDLLWAWEGWRDKAGRAILQFYPKYVELINQAARLNGYVDAGDSWRSMYETPSLEQDLERLFQELQPLYLNLHAYVRRALHRHYGAQHINLEGPIPAHLLGNMWAQTWSNIYDLVVPFPSAPSMDTTEAMLKQGWTPRRMFKEADDFFTSLGLLPVPPEFWNKSMLEKPTDGREVVCHASAWDFYNGKDFRIKQCTTVNLEDLVVAHHEMGHIQYFMQYKDLPVALREGANPGFHEAIGDVLALSVSTPKHLHSLNLLSSEGGSDEHDINFLMKMALDKIAFIPFSYLVDQWRWRVFDGSITKENYNQEWWSLRLKYQGLCPPVPRTQGDFDPGAKFHIPSSVPYIRYFVSFIIQFQFHEALCQAAGHTGPLHKCDIYQSKEAGQRLATAMKLGFSRPWPEAMQLITGQPNMSASAMLSYFKPLLDWLRTENELHGEKLGWPQYNWTPNSDDFYNETETKIFLQFYDQTGIWDHGAPHLLPPSQARGTREAPVYMSKRAASSGPPGSPKLPPGKNLLLLVLSAQGHGEVPVHDLLWHPGPPV

SEQ ID NO: 9806 - protein, 233 aa, Homo sapiens
MLNLLLLALPVLASRAYAAPAPGQALQRVGIVGGQEAPRSKWPWQVSLRVRDRYWMHFCGGSLIHPQWVLTAAHCVGPDVKDLAALRVQLREQHLYYQDQLLPVSRIIVHPQFYTAQIGADIALLELEEPVNVSSHVHTVTLPPASETFPPGMPCWVTGWGDVDNDERLPPPFPLKQVKVPIMENHICDAKYHLGAYTGDDVRIVRDDMLCAGNTRRDSCQVATAPHTFPAPS

SEQ ID NO: 9807 - protein, 750 aa, Homo sapiens
MGKSESQMDITDINTPKPKKKQRWTRLEISLSVLVLLLTIIAVRMIALYATYDDGICKSSDCIKSAARLIQNMDATTEPCRDFFKYACGGWLKRNVIPETSSRYGNFDILRDELEVVLKDVLQEPKTEDIVAVQKAKALYRSCINESAIDSRGGEPLLKLLPDIYGWPVATENWEQKYGASWTAEKAIAQLNSKYGKKVLINLFVGTDDKNSVNHVIHIDQPRLGLPSRDYYECTGIYKEACTAYVDFMISVARLIRQEERLPIDENQLALEMNKVMELEKEIANATAKPEDRNDPMLLYNKMRLAQIQNNFSLEINGKPFSWLNFTNEIMSTVNISITNEEDVVVYAPEYLTKLKPILTKYSARDLQNLMSWRFIMDLVSSLSRTYKESRNAFRKALYGTTSETATWRRCANYVNGNMENAVGRLYVEAAFAGESKHVVEDLIAQIREVFIQTLDDLTWMDAETKKRAEEKALAIKERIGYPDDIVSNDNKLNNEYLELNYKEDEYFENIIQNLKFSQSKQLKKLREKVDKDEWISGAAVVNAFYSSGRNQIVFPAGILQPPFFSAQQSNSLNYGGIGMVIGHEITHGFDDNGRNFNKDGDLVDWWTQQSASNFKEQSQCMVYQYGNFSWDLAGGQHLNGINTLGENIADNGGLGQAYRAYQNYIKKNGEEKLLPGLDLNHKQLFFLNFAQVWCGTYRPEYAVNSIKTDVHSPGNFRIIGTLQNSAEFSEAFHCRKNSYMNPEKKCRVW

SEQ ID NO: 9808 - protein, 381 aa, Homo sapiens
MTVARPSVPAALPLLGELPRLLLLVLLCLPAVWGDCGLPPDVPNAQPALEGRTSFPEDTVITYKCEESFVKIPGEKDSVTCLKGSQWSDIEEFCNRSCEVPTRLNSASLKQPYITQNYFPVGTVVEYECRPGYRREPSLSPKLTCLQNLKWSTAVEFCKKKSCPNPGEIRNGQIDVPGGILFGATISFSCNTGYKLFGSTSSFCLISGSSVQWSDPLPECREIYCPAPPQIDNGIIQGERDHYGYRQSVTYACNKGFTMIGEHSIYCTVNNDEGEWSGPPPECRGKSLTSKVPPTVQKPTTVNVPTTEVSPTSQKTTTKTTTPNAQATRSTPVSRTTKHFHETTPNKGSGTTSGTTRLLSGHTCFTLTGLLGTLVTMGLLT

SEQ ID NO: 9809 - protein, 440 aa, Homo sapiens
MTVARPSVPAALPLLGELPRLLLLVLLCLPAVWGDCGLPPDVPNAQPALEGRTSFPEDTVITYKCEESFVKIPGEKDSVTCLKGSQWSDIEEFCNRSCEVPTRLNSASLKQPYITQNYFPVGTVVEYECRPGYRREPSLSPKLTCLQNLKWSTAVEFCKKKSCPNPGEIRNGQIDVPGGILFGATISFSCNTGYKLFGSTSSFCLISGSSVQWSDPLPECREIYCPAPPQIDNGIIQGERDHYGYRQSVTYACNKGFTMIGEHSIYCTVNNDEGEWSGPPPECRGKSLTSKVPPTVQKPTTVNVPTTEVSPTSQKTTTKTTTPNAQATRSTPVSRTTKHFHETTPNKGSGTTSGTTRLLSGSRPVTQAGMRWCDRSSLQSRTPGFKRSFHFSLPSSWYYRAHVFHVDRFAWDASNHGLADLAKEELRRKYTQVYRLFLVS

SEQ ID NO: 9810 - protein, 2045 aa, Homo sapiens
MAGRSHPGPLRPLLPLLVVAACVLPGAGGTCPERALERREEEANVVLTGTVEEILNVDPVQHTYSCKVRVWRYLKGKDLVARESLLDGGNKVVISGFGDPLICDNQVSTGDTRIFFVNPAPPYLWPAHKNELMLNSSLMRITLRNLEEVEFCVEDKPGTHFTPVPPTPPDACRGMLCGFGAVCEPNAEGPGRASCVCKKSPCPSVVAPVCGSDASTYSNECELQRAQCSQQRRIRLLSRGPCGSRDPCSNVTCSFGSTCARSADGLTASCLCPATCRGAPEGTVCGSDGADYPGECQLLRRACARQENVFKKFDGPCDPCQGALPDPSRSCRVNPRTRRPEMLLRPESCPARQAPVCGDDGVTYENDCVMGRSGAARGLLLQKVRSGQCQGRDQCPEPCRFNAVCLSRRGRPRCSCDRVTCDGAYRPVCAQDGRTYDSDCWRQQAECRQQRAIPSKHQGPCDQAPSPCLGVQCAFGATCAVKNGQAACECLQACSSLYDPVCGSDGVTYGSACELEATACTLGREIQVARKGPCDRCGQCRFGALCEAETGRCVCPSECVALAQPVCGSDGHTYPSECMLHVHACTHQISLHVASAGPCETCGDAVCAFGAVCSAGQCVCPRCEHPPPGPVCGSDGVTYGSACELREAACLQQTQIEEARAGPCEQAECGSGGSGSGEDGDCEQELCRQRGGIWDEDSEDGPCVCDFSCQSVPGSPVCGSDGVTYSTECELKKARCESQRGLYVAAQGACRGPTFAPLPPVAPLHCAQTPYGCCQDNITAARGVGLAGCPSACQCNPHGSYGGTCDPATGQCSCRPGVGGLRCDRCEPGFWNFRGIVTDGRSGCTPCSCDPQGAVRDDCEQMTGLCSCKPGVAGPKCGQCPDGRALGPAGCEADASAPATCAEMRCEFGARCVEESGSAHCVCPMLTCPEANATKVCGSDGVTYGNECQLKTIACRQGLQISIQSLGPCQEAVAPSTHPTSASVTVTTPGLLLSQALPAPPGALPLAPSSTAHSQTTPPPSSRPRTTASVPRTTVWPVLTVPPTAPSPAPSLVASAFGESGSTDGSSDEELSGDQEASGGGSGGLEPLEGSSVATPGPPVERASCYNSALGCCSDGKTPSLDAEGSNCPATKVFQGVLELEGVEGQELFYTPEMADPKSELFGETARSIESTLDDLFRNSDVKKDFRSVRLRDLGPGKSVRAIVDVHFDPTTAFRAPDVARALLRQIQVSRRRSLGVRRPLQEHVRFMDFDWFPAFITGATSGAIAAGATARATTASRLPSSAVTPRAPHPSHTSQPVAKTTAAPTTRRPPTTAPSRVPGRRPPAPQQPPKPCDSQPCFHGGTCQDWALGGGFTCSCPAGRGGAVCEKVLGAPVPAFEGRSFLAFPTLRAYHTLRLALEFRALEPQGLLLYNGNARGKDFLALALLDGRVQLRFDTGSGPAVLTSAVPVEPGQWHRLELSRHWRRGTLSVDGETPVLGESPSGTDGLNLDTDLFVGGVPEDQAAVALERTFVGAGLRGCIRLLDVNNQRLELGIGPGAATRGSGVGECGDHPCLPNPCHGGAPCQNLEAGRFHCQCPPGRVGPTCADEKSPCQPNPCHGAAPCRVLPEGGAQCECPLGREGTFCQTASGQDGSGPFLADFNGFSHLELRGLHTFARDLGEKMALEVVFLARGPSGLLLYNGQKTDGKGDFVSLALRDRRLEFRYDLGKGAAVIRSREPVTLGAWTRVSLERNGRKGALRVGDGPRVLGESPVPHTVLNLKEPLYVGGAPDFSKLARAAAVSSGFDGAIQLVSLGGRQLLTPEHVLRQVDVTSFAGHPCTRASGHPCLNGASCVPREAAYVCLCPGGFSGPHCEKGLVEKSAGDVDTLAFDGRTFVEYLNAVTESEKALQSNHFELSLRTEATQGLVLWSGKATERADYVALAIVDGHLQLSYNLGSQPVVLRSTVPVNTNRWLRVVAHREQREGSLQVGNEAPVTGSSPLGATQLDTDGALWLGGLPELPVGPALPKAYGTGFVGCLRDVVVGRHPLHLLEDAVTKPELRPCPTP

SEQ ID NO: 9811 - protein, 279 aa, Homo sapiens
MTKNEKKSLNQSLAEWKLFIYNPTTGEFLGRTAKSWGLILLFYLVFYGFLAALFSFTMWVMLQTLNDEVPKYRDQIPSPGLMVFPKPVTALEYTFSRSDPTSYAGYIEDLKKFLKPYTLEEQKNLTVCPDGALFEQKGPVYVACQFPISLLQACSGMNDPDFGYSQGNPCILVKMNRIIGLKPEGVPRIDCVSKNEDIPNVAVYPHNGMIDLKYFPYYGKKLHVGYLQPLVAVQVSFAPNNTGKEVTVECKIDGSANLKSQDDRDKFLGRVMFKITARA

SEQ ID NO: 9812 - protein, 208 aa, Homo sapiens
PKYRDQILNPGLMVFPKPVTALEYAFSRSDLTSYAGYTEDLKKFLKPYTLEEQKNLTVCPDGALFEQKGPVYVACQSPISLLQACRGMNDLDFGYSQRNPCILVKMNRIIGLKSEGVPRIDCVSKNEDIPNVAVYPHNGIIDLKYFPYYGEKLHVGYLQPLVAVQVSFAPNDTGKEVTVECKIDGSANLKSQDDRDKFLGRVMFKITA

SEQ ID NO: 9813 - protein, 1713 aa, Homo sapiens
MGWLWIFGAALGQCLGYSSQQQRVPFLQPPGQSQLQASYVEFRPSQGCSPGYYRDHKGLYTGRCVPCNCNGHSNQCQDGSGICVNCQHNTAGEHCERCQEGYYGNAVHGSCRACPCPHTNSFATGCVVNGGDVRCSCKAGYTGTQCERCAPGYFGNPQKFGGSCQPCSCNSNGQLGSCHPLTGDCINQEPKDSSPAEECDDCDSCVMTLLNDLATMGEQLRLVKSQLQGLSASAGLLEQMRHMETQAKDLRNQLLNYRSAISNHGSKIEGLERELTDLNQEFETLQEKAQVNSRKAQTLNNNVNRATQSAKELDVKIKNVIRNVHILLKQISGTDGEGNNVPSGDFSREWAEAQRMMRELRNRNFGKHLREAEADKRESQLLLNRIRTWQKTHQGENNGLANSIRDSLNEYEAKLSDLRARLQEAAAQAKQANGLNQENERALGAIQRQVKEINSLQSDFTKYLTTADSSLLQTNIALQLMEKSQKEYEKLAASLNEARQELSDKVRELSRSAGKTSLVEEAEKHARSLQELAKQLEEIKRNASGDELVRCAVDAATAYENILNAIKAAEDAANRAASASESALQTVIKEDLPRKAKTLSSNSDKLLNEAKMTQKKLKQEVSPALNNLQQTLNIVTVQKEVIDTNLTTLRDGLHGIQRGDIDAMISSAKSMVRKANDITDEVLDGLNPIQTDVERIKDTYGRTQNEDFKKALTDADNSVNKLTNKLPDLWRKIESINQQLLPLGNISDNMDRIRELIQQARDAASKVAVPMRFNGKSGVEVRLPNDLEDLKGYTSLSLFLQRPNSRENGGTENMFVMYLGNKDASRDYIGMAVVDGQLTCVYNLGDREAELQVDQILTKSETKEAVMDRVKFQRIYQFARLNYTKGATSSKPETPGVYDMDGRNSNTLLNLDPENVVFYVGGYPPDFKLPSRLSFPPYKGCIELDDLNENVLSLYNFKKTFNLNTTEVEPCRRRKEESDKNYFEGTGYARVPTQPHAPIPTFGQTIQTTVDRGLLFFAENGDRFISLNIEDGKLMVRYKLNSELPKERGVGDAINNGRDHSIQIKIGKLQKRMWINVDVQNTIIDGEVFDFSTYYLGGIPIAIRERFNISTPAFRGCMKNLKKTSGVVRLNDTVGVTKKCSEDWKLVRSASFSRGGQLSFTDLGLPPTDHLQASFGFQTFQPSGILLDHQTWTRNLQVTLEDGYIELSTSDSGGPIFKSPQTYMDGLLHYVSVISDNSGLRLLIDDQLLRNSKRLKHISSSRQSLRLGGSNFEGCISNVFVQRLSLSPEVLDLTSNSLKRDVSLGGCSLNKPPFLMLLKGSTRFNKTKTFRINQLLQDTPVASPRSVKVWQDACSPLPKTQANHGALQFGDIPTSHLLFKLPQELLKPRSQFAVDMQTTSSRGLVFHTGTKNSFMALYLSKGRLVFALGTDGKKLRIKSKEKCNDGKWHTVVFGHDGEKGRLVVDGLRAREGSLPGNSTISIRAPVYLGSPPSGKPKSLPTNSFVGCLKNFQLDSKPLYTPSSSFGVSSCLGGPLEKGIYFSEEGGHVVLAHSVLLGPEFKLVFSIRPRSLTGILIHIGSQPGKHLCVYLEAGKVTASMDSGAGGTSTSVTPKQSLCDGQWHSVAVTIKQHILHLELDTDSSYTAGQIPFPPASTQEPLHLGGAPANLTTLRIPVWKSFFGCLRNIHVNHIPVPVTEALEVQGPVSLNGCPDQ

SEQ ID NO: 9814 - protein, 3333 aa, Homo sapiens
MAAAARPRGRALGPVLPPTPLLLLVLRVLPACGATARDPGAAAGLSLHPTYFNLAEAARIWATATCGERGPGEGRPQPELYCKLVGGPTAPGSGHTIQGQFCDYCNSEDPRKAHPVTNAIDGSERWWQSPPLSSGTQYNRVNLTLDLGQLFHVAYILIKFANSPRPDLWVLERSVDFGSTYSPWQYFAHSKVDCLKEFGREANMAVTRDDDVLCVTEYSRIVPLENGEVVVSLINGRPGAKNFTFSHTLREFTKATNIRLRFLRTNTLLGHLISKAQRDPTVTRRYYYSIKDISIGGQCVCNGHAEVCNINNPEKLFRCECQHHTCGETCDRCCTGYNQRRWRPAAWEQSHECEACNCHGHASNCYYDPDVERQQASLNTQGIYAGGGVCINCQHNTAGVNCEQCAKGYYRPYGVPVDAPDGCIPCSCDPEHADGCEQGSGRCHCKPNFHGDNCEKCAIGYYNFPFCLRIPIFPVSTPSSEDPVAGDIKGCDCNLEGVLPEICDAHGRCLCRPGVEGPRCDTCRSGFYSFPICQACWCSALGSYQMPCSSVTGQCECRPGVTGQRCDRCLSGAYDFPHCQGSSSACDPAGTINSNLGYCQCKLHVEGPTCSRCKLLYWNLDKENPSGCSECKCHKAGTVSGTGECRQGDGDCHCKSHVGGDSCDTCEDGYFALEKSNYFGCQGCQCDIGGALSSMCSGPSGVCQCREHVVGKVCQRPENNYYFPDLHHMKYEIEDGSTPNGRDLRFGFDPLAFPEFSWRGYAQMTSVQNDVRITLNVGKSSGSLFRVILRYVNPGTEAVSGHITIYPSWGAAQSKEIIFLPSKEPAFVTVPGNGFADPFSITPGIWVACIKAEGVLLDYLVLLPRDYYEASVLQLPVTEPCAYAGPPQENCLLYQHLPVTRFPCTLACEARHFLLDGEPRPVAVRQPTPAHPVMVDLSGREVELHLRLRIPQVGHYVVVVEYSTEAAQLFVVDVNVKSSGSVLAGQVNIYSCNYSVLCRSAVIDHMSRIAMYELLADADIQLKGHMARFLLHQVCIIPIEEFSAEYVRPQVHCIASYGRFVNQSATCVSLAHETPPTALILDVLSGRPFPHLPQQSSPSVDVLPGVTLKAPQNQVTLRGRVPHLGRYVFVIHFYQAAHPTFPAQVSVDGGWPRAGSFHASFCPHVLGCRDQVIAEGQIEFDISEPEVAATVKVPEGKSLVLVRVLVVPAENYDYQILHKKSMDKSLEFITNCGKNSFYLDPQTASRFCKNSARSLVAFYHKGALPCECHPTGATGPHCSPEGGQCPCQPNVIGRQCTRCATGHYGFPRCKPCSCGRRLCEEMTGQCRCPPRTVRPQCEVCETHSFSFHPMAGCEGCNCSRRGTIEAAMPECDRDSGQCRCKPRITGRQCDRCASGFYRFPECVPCNCNRDGTEPGVCDPGTGACLCKENVEGTECNVCREGSFHLDPANLKGCTSCFCFGVNNQCHSSHKRRTKFVDMLGWHLETADRVDIPVSFNPGSNSMVADLQELPATIHSASWVAPTSYLGDKVSSYGGYLTYQAKSFGLPGDMVLLEKKPDVQLTGQHMSIIYEETNTPRPDRLHHGRVHVVEGNFRHASSRAPVSREELMTVLSRLADVRIQGLYFTETQRLTLSEVGLEEASDTGSGRIALAVEICACPPAYAGDSCQGCSPGYYRDHKGLYTGRCVPCNCNGHSNQCQDGSGICVNCQHNTAGEHCERCQEGYYGNAVHGSCRACPCPHTNSFATGCVVNGGDVRCSCKAGYTGTQCERCAPGYFGNPQKFGGSCQPCSCNSNGQLGSCHPLTGDCINQEPKDSSPAEECDDCDSCVMTLLNDLATMGEQLRLVKSQLQGLSASAGLLEQMRHMETQAKDLRNQLLNYRSAISNHGSKIEGLERELTDLNQEFETLQEKAQVNSRKAQTLNNNVNRATQSAKELDVKIKNVIRNVHILLKQISGTDGEGNNVPSGDFSREWAEAQRMMRELRNRNFGKHLREAEADKRESQLLLNRIRTWQKTHQGENNGLANSIRDSLNEYEAKLSDLRARLQEAAAQAKQANGLNQENERALGAIQRQVKEINSLQSDFTKYLTTADSSLLQTNIALQLMEKSQKEYEKLAASLNEARQELSDKVRELSRSAGKTSLVEEAEKHARSLQELAKQLEEIKRNASGDELVRCAVDAATAYENILNAIKAAEDAANRAASASESALQTVIKEDLPRKAKTLSSNSDKLLNEAKMTQKKLKQEVSPALNNLQQTLNIVTVQKEVIDTNLTTLRDGLHGIQRGDIDAMISSAKSMVRKANDITDEVLDGLNPIQTDVERIKDTYGRTQNEDFKKALTDADNSVNKLTNKLPDLWRKIESINQQLLPLGNISDNMDRIRELIQQARDAASKVAVPMRFNGKSGVEVRLPNDLEDLKGYTSLSLFLQRPNSRENGGTENMFVMYLGNKDASRDYIGMAVVDGQLTCVYNLGDREAELQVDQILTKSETKEAVMDRVKFQRIYQFARLNYTKGATSSKPETPGVYDMDGRNSNTLLNLDPENVVFYVGGYPPDFKLPSRLSFPPYKGCIELDDLNENVLSLYNFKKTFNLNTTEVEPCRRRKEESDKNYFEGTGYARVPTQPHAPIPTFGQTIQTTVDRGLLFFAENGDRFISLNIEDGKLMVRYKLNSELPKERGVGDAINNGRDHSIQIKIGKLQKRMWINVDVQNTIIDGEVFDFSTYYLGGIPIAIRERFNISTPAFRGCMKNLKKTSGVVRLNDTVGVTKKCSEDWKLVRSASFSRGGQLSFTDLGLPPTDHLQASFGFQTFQPSGILLDHQTWTRNLQVTLEDGYIELSTSDSGSPIFKSPQTYMDGLLHYVSVISDNSGLRLLIDDQLLRNSKRLKHISSSRQSLRLGGSNFEGCISNVFVQRLSLSPEVLDLTSNSLKRDVSLGGCSLNKPPFLMLLKGSTRFNKTKTFRINQLLQDTPVASPRSVKVWQDACSPLPKTQANHGALQFGDIPTSHLLFKLPQELLKPRSQFAVDMQTTSSRGLVFHTGTKNSFMALYLSKGRLVFALGTDGKKLRIKSKEKCNDGKWHTVVFGHDGEKGRLVVDGLRAREGSLPGNSTISIRAPVYLGSPPSGKPKSLPTNSFVGCLKNFQLDSKPLYTPSSSFGVSSCLGGPLEKGIYFSEEGGHVVLAHSVLLGPEFKLVFSIRPRSLTGILIHIGSQPGKHLCVYLEAGKVTASMDSGAGGTSTSVTPKQSLCDGQWHSVAVTIKQHILHLELDTDSSYTAGQIPFPPASTQEPLHLGGAPANLTTLRIPVWKSFFGCLRNIHVNHIPVPVTEALEVQGPVSLNGCPDQ

SEQ ID NO: 9815 - protein, 360 aa, Homo sapiens
MIPLLLAALLCVPAGALTCYGDSGQPVDWFVVYKLPALRGSGEAAQRGLQYKYLDESSGGWRDGRALINSPEGAVGRSLQPLYRSNTSQLAFLLYNDQPPQPSKAQDSSMRGHTKGVLLLDHDGGFWLVHSVPNFPPPASSAAYSWPHSACTYGQTLLCVSFPFAQFSKMGKQLTYTYPWVYNYQLEGIFAQEFPDLENVVKGHHVSQEPWNSSITLTSQAGAVFQSFAKFSKFGDDLYSGWLAAALGTNLQVQFWHKTVGILPSNCSDIWQVLNVNQIAFPGPAGPSFNSTEDHSKWCVSPKGPWTCVGDMNRNQGEEQRGGGTLCAQLPALWKAFQPLVKNYQPCNGMARKPSRAYKI

SEQ ID NO: 9816 - protein, 333 aa, Homo sapiens
MAVRRDSVWKYCWGVLMVLCRTAISKSIVLEPIYWNSSNSKFLPGQGLVLYPQIGDKLDIICPKVDSKTVGQYEYYKVYMVDKDQADRCTIKKENTPLLNCAKPDQDIKFTIKFQEFSPNLWGLEFQKNKDYYIISTSNGSLEGLDNQEGGVCQTRAMKILMKVGQDASSAGSTRNKDPTRRPELEAGTNGRSSTTSPFVKPNPGSSTDGNSAGHSGNNILGSEVALFAGIASGCIIFIVIIITLVVLLLKYRRRHRKHSPQHTTTLSLSTLATPKRSGNNNGSEPSDIIIPLRTADSVFCPHYEKVSGDYGHPVYIVQEMPPQSPANIYYKV

SEQ ID NO: 9817 - protein, 2496 aa, Homo sapiens
MGAAAGRSPHLGPAPARRPQRSLLLLQLLLLVAAPGSTQAQAAPFPELCSYTWEAVDTKNNVLYKINICGSVDIVQCGPSSAVCMHDLKTRTYHSVGDSVLRSATRSLLEFNTTVSCDQQGTNHRVQSSIAFLCGKTLGTPEFVTATECVHYFEWRTTAACKKDIFKANKEVPCYVFDEELRKHDLNPLIKLSGAYLVDDSDPDTSLFINVCRDIDTLRDPGSQLRACPPGTAACLVRGHQAFDVGQPRDGLKLVRKDRLVLSYVREEAGKLDFCDGHSPAVTITFVCPSERREGTIPKLTAKSNCRYEIEWITEYACHRDYLESKTCSLSGEQQDVSIDLTPLAQSGGSSYISDGKEYLFYLNVCGETEIQFCNKKQAAVCQVKKSDTSQVKAAGRYHNQTLRYSDGDLTLIYFGGDECSSGFQRMSVINFECNKTAGNDGKGTPVFTGEVDCTYFFTWDTEYACVKEKEDLLCGATDGKKRYDLSALVRHAEPEQNWEAVDGSQTETEKKHFFINICHRVLQEGKARGCPEDAAVCAVDKNGSKNLGKFISSPMKEKGNIQLSYSDGDDCGHGKKIKTNITLVCKPGDLESAPVLRTSGEGGCFYEFEWHTAAACVLSKTEGENCTVFDSQAGFSFDLSPLTKKNGAYKVETKKYDFYINVCGPVSVSPCQPDSGACQVAKRQVASHDEKTWNLGLSNAKLSYYDGMIQLNYRGGTPYNNERHTPRATLITFLCDRDAGVGFPEYQEEDNSTYNFRWYTSYACPEEPLECVVTDPSTLEQYDLSSLAKSEGGLGGNWYAMDNSGEHVTWRKYYINVCRPLNPVPGCNRYASACQMKYEKDQGSFTEVVSISNLGMAKTGPVVEDSGSLLLEYVNGSACTTSDGRQTTYTTRIHLVCSRGRLNSHPIFSLNWECVVSFLWNTEAACPIQTTTDTDQACSIRDPNSGFVFNLNPLNSSQGYNVSGIGKIFMFNVCGTMPVCGTILGKPASGCEAETQTEELKNWKPARPVGIEKSLQLSTEGFITLTYKGPLSAKGTADAFIVRFVCNDDVYSGPLKFLHQDIDSGQGIRNTYFEFETALACVPSPVDCQVTDLAGNEYDLTGLSTVRKPWTAVDTSVDGRKRTFYLSVCNPLPYIPGCQGSAVGSCLVSEGNSWNLGVVQMSPQAAANGSLSIMYVNGDKCGNQRFSTRITFECAQISGSPAFQLQDGCEYVFIWRTVEACPVVRVEGDNCEVKDPRHGNLYDLKPLGLNDTIVSAGEYTYYFRVCGKLSSDVCPTSDKSKVVSSCQEKREPQGFHKVAGLLTQKLTYENGLLKMNFTGGDTCHKVYQRSTAIFFYCDRGTQRPVFLKETSDCSYLFEWRTQYACPPFDLTECSFKDGAGNSFDLSSLSRYSDNWEAITGTGDPEHYLINVCKSLAPQAGTEPCPPEAAACLLGGSKPVNLGRVRDGPQWRDGIIVLKYVDGDLCPDGIRKKSTTIRFTCSESQVNSRPMFISAVEDCEYTFAWPTATACPMKSNEHDDCQVTNPSTGHLFDLSSLSGRAGFTAAYSEKGLVYMSICGENENCPPGVGACFGQTRISVGKANKRLRYVDQVLQLVYKDGSPCPSKSGLSYKSVISFVCRPEARPTNRPMLISLDKQTCTLFFSWHTPLACEQATECSVRNGSSIVDLSPLIHRTGGYEAYDESEDDASDTNPDFYINICQPLNPMHGVPCPAGAAVCKVPIDGPPIDIGRVAGPPILNPIANEIYLNFESSTPCLADKHFNYTSLIAFHCKRGVSMGTPKLLRTSECDFVFEWETPVVCPDEVRMDGCTLTDEQLLYSFNLSSLSTSTFKVTRDSRTYSVGVCTFAVGPEQGGCKDGGVCLLSGTKGASFGRLQSMKLDYRHQDEAVVLSYVNGDRCPPETDDGVPCVFPFIFNGKSYEECIIESRAKLWCSTTADYDRDHEWGFCRHSNSYRTSSIIFKCDEDEDIGRPQVFSEVRGCDVTFEWKTKVVCPPKKLECKFVQKHKTYDLRLLSSLTGSWSLVHNGVSYYINLCQKIYKGPLGCSERASICRRTTTGDVQVLGLVHTQKLGVIGDKVVVTYSKGYPCGGNKTASSVIELTCTKTVGRPAFKRFDIDSCTYYFSWDSRAACAVKPQEVQMVNGTITNPINGKSFSLGDIYFKLFRASGDMRTNGDNYLYEIQLSSITSSRNPACSGANICQVKPNDQHFSRKVGTSDKTKYYLQDGDLDVVFASSSKCGKDKTKSVSSTIFFHCDPLVEDGIPEFSHETADCQYLFSWYTSAVCPLGVGFDSENPGDDGQMHKGLSERSQAVGAVLSLLLVALTCCLLALLLYKKERRETVISKLTTCCRRSSNVSYKYSKVNKEEETDENETEWLMEEIQLPPPRQGKEGQENGHITTKSVKALSSLHGDDQDSEDEVLTIPEVKVHSGRGAGAESSHPVRNAQSNALQEREDDRVGLVRGEKARKGKSSSAQQKTVSSTKLVSFHDDSDEDLLHI

SEQ ID NO: 9818 - protein, 855 aa, Homo sapiens [sequence omitted]

SEQ ID NO: 9819 - protein, 269 aa, Homo sapiens [sequence omitted]

SEQ ID NO: 9820 - protein, 359 aa, Homo sapiens
HEGCTPEKVSAKLRAAAEAAAEERRTRGAGSRGICAGLRSVAPGPEPLKQEEGRREWGSSIGTPSPCGSAQAAAAAAAEEATEKIPALRPALLWALLALWLCCATPAHALQCRDGYEPCVNEGMCVTYHNGTGYCKCPEGFLGEYCQHRDPCEKNRCQNGGTCVAQAMLGKATCRCASGFTGEDCQYSTSHPCFVSRPCLNGGTCHMLSRDTYECTCQVGFTGKECQWTDACLSHPCANGSTCTTVANQFSCKCLTGFTGQKCETDVNECDIPGHCQHGGTCLNLPGSYQCQCLQGFTGQYCDSLYVPCAPSPCVNGGTCRQTGDFTFECNCLPETVRRGTELWERDREVWNGKEHDEN

SEQ ID NO: 9821 - protein, 2471 aa, Homo sapiens
MPALRPALLWALLALWLCCAAPAHALQCRDGYEPCVNEGMCVTYHNGTGYCKCPEGFLGEYCQHRDPCEKNRCQNGGTCVAQAMLGKATCRCASGFTGEDCQYSTSHPCFVSRPCLNGGTCHMLSRDTYECTCQVGFTGKECQWTDACLSHPCANGSTCTTVANQFSCKCLTGFTGQKCETDVNECDIPGHCQHGGTCLNLPGSYQCQCPQGFTGQYCDSLYVPCAPSPCVNGGTCRQTGDFTFECNCLPGFEGSTCERNIDDCPNHRCQNGGVCVDGVNTYNCRCPPQWTGQFCTEDVDECLLQPNACQNGGTCANRNGGYGCVCVNGWSGDDCSENIDDCAFASCTPGSTCIDRVASFSCMCPEGKAGLLCHLDDACISNPCHKGALCDTNPLNGQYICTCPQGYKGADCTEDVDECAMANSNPCEHAGKCVNTDGAFHCECLKGYAGPRCEMDINECHSDPCQNDATCLDKIGGFTCLCMPGFKGVHCELEINECQSNPCVNNGQCVDKVNRFQCLCPPGFTGPVCQIDIDDCSSTPCLNGAKCIDHPNGYECQCATGFTGVLCEENIDNCDPDPCHHGQCQDGIDSYTCICNPGYMGAICSDQIDECYSSPCLNDGRCIDLVNGYQCNCQPGTSGVNCEINFDDCASNPCIHGICMDGINRYSCVCSPGFTGQRCNIDIDECASNPCRKGATCINGVNGFRCICPEGPHHPSCYSQVNECLSNPCIHGNCTGGLSGYKCLCDAGWVGINCEVDKNECLSNPCQNGGTCDNLVNGYRCTCKKGFKGYNCQVNIDECASNPCLNQGTCFDDISGYTCHCVLPYTGKNCQTVLAPCSPNPCENAAVCKESPNFESYTCLCAPGWQGQRCTIDIDECISKPCMNHGLCHNTQGSYMCECPPGFSGMDCEEDIDDCLANPCQNGGSCMDGVNTFSCLCLPGFTGDKCQTDMNECLSEPCKNGGTCSDYVNSYTCKCQAGFDGVHCENNINECTESSCFNGGTCVDGINSFSCLCPVGFTGSFCLHEINECSSHPCLNEGTCVDGLGTYRCSCPLGYTGKNCQTLVNLCSRSPCKNKGTCVQKKAESQCLCPSGWAGAYCDVPNVSCDIAASRRGVLVEHLCQHSGVCINAGNTHYCQCPLGYTGSYCEEQLDECASNPCQHGATCSDFIGGYRCECVPGYQGVNCEYEVDECQNQPCQNGGTCIDLVNHFKCSCPPGTRGLLCEENIDDCARGPHCLNGGQCMDRIGGYSCRCLPGFAGERCEGDINECLSNPCSSEGSLDCIQLTNDYLCVCRSAFTGRHCETFVDVCPQMPCLNGGTCAVASNMPDGFICRCPPGFSGARCQSSCGQVKCRKGEQCVHTASGPRCFCPSPRDCESGCASSPCQHGGSCHPQRQPPYYSCQCAPPFSGSRCELYTAPPSTPPATCLSQYCADKARDGVCDEACNSHACQWDGGDCSLTMENPWANCSSPLPCWDYINNQCDELCNTVECLFDNFECQGNSKTCKYDKYCADHFKDNHCNQGCNSEECGWDGLDCAADQPENLAEGTLVIVVLMPPEQLLQDARSFLRALGTLLHTNLRIKRDSQGELMVYPYYGEKSAAMKKQRMTRRSLPGEQEQEVAGSKVFLEIDNRQCVQDSDHCFKNTDAAAALLASHAIQGTLSYPLVSVVSESLTPERTQLLYLLAVAVVIILFIILLGVIMAKRKRKHGSLWLPEGFTLRRDASNHKRREPVGQDAVGLKNLSVQVSEANLIGTGTSEHWVDDEGPQPKKVKAEDEALLSEEDDPIDRRPWTQQHLEAADIRRTPSLALTPPQAEQEVDVLDVNVRGPDGCTPLMLASLRGGSSDLSDEDEDAEDSSANIITDLVYQGASLQAQTDRTGEMALHLAARYSRADAAKRLLDAGADANAQDNMGRCPLHAAVAADAQGVFQILIRNRVTDLDARMNDGTTPLILAARLAVEGMVAELINCQADVNAVDDHGKSALHWAAAVNNVEATLLLLKNGANRDMQDNKEETPLFLAAREGSYEAAKILLDHFANRDITDHMDRLPRDVARDRMHHDIVRLLDEYNVTPSPPGTVLTSALSPVICGPNRSFLSLKHTPMGKKSRRPSAKSTMPTSLPNLAKEAKDAKGSRRKKSLSEKVQLSESSVTLSPVDSLESPHTYVSDTTSSPMITSPGILQASPNPMLATAAPPAPVHAQHALSFSNLHEMQPLAHGASTVLPSVSQLLSHHHIVSPGSGSAGSLSRLHPVPVPADWMNRMEVNETQYNEMFGMVLAPAEGTHPGIAPQSRPPEGKHITTPREPLPPIVTFQLIPKGSIAQPAGAPQPQSTCPPAVAGPLPTMYQIPEMARLPSVAFPTAMMPQQDGQVAQTILPAYHPFPASVGKYPTPPSQHSYASSNAAERTPSHSGHLQGEHPYLTPSPESPDQWSSSSPHSASDWSDVTTSPTPGGAGGGQRGPGTHMSEPPHNNMQVYA

SEQ ID NO: 9822 - protein, 212 aa, Homo sapiens
MKATIILLLLAQVSWAGPFQQRGLFDFMLEDEASGIGPEVPDDRDFEPSLGPVCPFRCQCHLRVVQCSDLGLPPSLTELHLDGNKISRVDAASLKGLNNLAKLGLSFNSISAVDNGSLANTPHLRELHLDNNKLTRVPGGLAEHKYIQVVYLHNNNISVVGSSDFCPPGHNTKKASYSGVSLFSNPVQYWEIQPSTFRCVYVRSAIQLGNYK

SEQ ID NO: 9823 - protein, 172 aa, Homo sapiens
MKATIILLLLAQVSWAGPFQQRGLFDFMLEDEASGIGPEVPDDRDFEPSLGPVCPFRCQCHLRVVQCSDLGLDKVPKDLPPDTTLLDLQNNKITEIKDGDFKNLKNLHVVYLHNNNISVVGSSDFCPPGHNTKKASYSGVSLFSNPVQYWEIQPSTFRCVYVRSAIQLGNYK

SEQ ID NO: 9824 - protein, 254 aa, Homo sapiens
MAISGVPVLGFFIIAVLMSAQESWAIKEEHVIIQAEFYLNPDQSGEFMFDFDGDEIFHVDMAKKETVWRLEEFGRFASFEAQGALANIAVDKANLEIMTKRSNYTPITNVPPEVTVLTNSPVELREPNVLICFIDKFTPPVVNVTWLRNGKPVTTGVSETVFLPREDHLFRKFHYLPFLPSTEDVYDCRVEHWGLDEPLLKHWEFDAPSPLPETTENVVCALGLTVGLVGIIIGTIFIIKGVRKSNAAERRGPL

SEQ ID NO: 9825 - protein, 550 aa, Homo sapiens
MSAAWIPALGLGVCLLLLPGPAGSEGAAPIAITCFTRGLDIRKEKADVLCPGGCPLEEFSVYGNIVYASVSSICGAAVHRGVISNSGGPVRVYSLPGRENYSSVDANGIQSQMLSRWSASFTVTKGKSSTQEATGQAVSTAHPPTGKRLKKTPEKKTGNKDCKADIAFLIDGSFNIGQRRFNLQKNFVGKVALMLGIGTEGPHVGLVQASEHPKIEFYLKNFTSAKDVLFAIKEVGFRGGNSNTGKALKHTAQKFFTVDAGVRKGIPKVVVVFIDGWPSDDIEEAGIVAREFGVNVFIVSVAKPIPEELGMVQDVTFVDKAVCRNNGFFSYHMPNWFGTTKYVKPLVQKLCTHEQMMCSKTCYNSVNIAFLIDGSSSVGDSNFRLMLEFVSNIAKTFEISDIGAKIAAVQFTYDQRTEFSFTDYSTKENVLAVIRNIRYMSGGTATGDAISFTVRNVFGPIRESPNKNFLVIVTDGQSYDDVQGPAAAAHDAGITIFSVGVAWAPLDDLKDMASKPKESHAFFTREFTGLEPIVSDVIRGICRDFLESQQ

SEQ ID NO: 9826 - protein, 507 aa, Homo sapiens
MGAPRSLLLALAAGLAVARPPNIVLIFADDLGYGDLGCYGHPSSTTPNLDQLAAGGLRFTDFYVPVSLCTPSRAALLTGRLPVRMGMYPGVLVPSSRGGLPLEEVTVAEVLAARGYLTGMAGKWHLGVGPEGAFLPPHQGFHRFLGIPYSHDQGPCQNLTCFPPATPCDGGCDQGLVPIPLLANLSVEAQPPWLPGLEARYMAFAHDLMADAQRQDRPFFLYYASHHTHYPQFSGQSFAERSGRGPFGDSLMELDAAVGTLMTAIGDLGLLEETLVIFTADNGPETMRMSRGGCSGLLRCGKGTTYEGGVREPALAFWPGHIAPGVTHELASSLDLLPTLAALAGAPLPNVTLDGFDLSPLLLGTGKSPRQSLFFYPSYPDEVRGVFAVRTGKYKAHFFTQGSAHSDTTADPACHASSSLTAHEPPLLYDLSKDPGENYNLLGGVAGATPEVLQALKQLQLLKAQLDAAVTFGPSQVARGEDPALQICCHPGCTPRPACCHCPDPHA

SEQ ID NO: 9827 - protein, 438 aa, Homo sapiens
MWTLVSWVALTAGLVAGTRCPDGQFCPVACCLDPGGASYSCCRPLLDKWPTTLSRHLGGPCQVDAHCSAGHSCIFTVSGTSSCCPFPEAVACGDGHHCCPRGFHCSADGRSCFQRSGNNSVGAIQCPDSQFECPDFSTCCVMVDGSWGCCPMPQASCCEDRVHCCPHGAFCDLVHTRCITPTGTHPLAKKLPAQRTNRAVALSSSVMCPDARSRCPDGSTCCELPSGKYGCCPMPNATCCSDHLHCCPQDTVCDLIQSKCLSKENATTDLLTKLPAHTVGDVKCDMEVSCPDGYTCCRLQSGAWGCCPFTQAVCCEDHIHCCPAGFTCDTQKGTCEQGPHQVPWMEKAPAHLSLPDPQALKRDVPCDNVSSCPSSDTCCRDNRQGWACCPYRQGVCCADRRHCCPAGFRCAARGTKCLRREAPRWDAPLRDPALRQLL

SEQ ID NO: 9828 - protein, 593 aa, Homo sapiens
MWTLVSWVALTAGLVAGTRCPDGQFCPVACCLDPGGASYSCCRPLLDKWPTTLSRHLGGPCQVDAHCSAGHSCIFTVSGTSSCCPFPEAVACGDGHHCCPRGFHCSADGRSCFQRSGNNSVGAIQCPDSQFECPDFSTCCVMVDGSWGCCPMPQASCCEDRVHCCPHGAFCDLVHTRCITPTGTHPLAKKLPAQRTNRAVALSSSVMCPDARSRCPDGSTCCELPSGKYGCCPMPNATCCSDHLHCCPQDTVCDLIQSKCLSKENATTDLLTKLPAHTVGDVKCDMEVSCPDGYTCCRLQSGAWGCCPFTQAVCCEDHIHCCPAGFTCDTQKGTCEQGPHQVPWMEKAPAHLSLPDPQALKRDVPCDNVSSCPSSDTCCQLTSGEWGCCPIPEAVCCSDHQHCCPQGYTCVAEGQCQRGSEIVAGLEKMPARRASLSHPRDIGCDQHTSCPVGGTCCPSLGGSWACCQLPHAVCCEDRQHCCPAGYTCNVKARSCEKEVVSAQPATFLARSPHVGVKDVECGEGHFCHDNQTCCRDNRQGWACCPYRQGVCCADRRHCCPAGFRCAARGTKCLRREAPRWDAPLRDPALRQLL

SEQ ID NO: 9829 - protein, 215 aa, Homo sapiens
MTSEFFAAQLRSQISDHTTHPISYYKPEFYTPDDGGTAHLSVVAEDGSAVSATSTINLYGILFNNEWTTSALPAFTNEFGAPPSPANFIQPGKQPLLSMCLTIMVGQDGQVRMVVGAAGGTQITTDTALAIIYNLWFGYDVKRAVEEPRLHNKLLPNVTTVERNIDQAVTAALETRHHHTQIASTFIAVVQAIVRTAGGWAAALDSRKGGEPAGY

SEQ ID NO: 9830 - protein, 567 aa, Homo sapiens
MKKKLVVLGLLAVVLVLVIVGLCLWLPSASKEPDNHVYTRAAVAADAKQCLEIGRDTLRDGGSAVDAAIAALLCVGLMNAHSMGIGVGLFLTIYNSTTHECLGSGEGEGQGVAPRLAFASMFNSSEQSQKGGLSVAVPGEIRGYELAHQRHGRLPWARLFQPSIQLARQGFPVGKGLAAVLENKRTVIEQQPVLCEVFCRDRKVLREGERLTLPRLADTYEMLAIEGAQAFYNGSLMAQIVKDIQAAGGIVTAEDLNNYCAELIEHPLNISLGDAVLYMPSARLSGPVLALILNILKGYNFSRESVETPEQKGLTYHRIVEAFRFAYAKRTLLGDPKFVDVTENLIAGLLCARMDLPALGSQQVVRNMTSEFFAAQLRSQISDHTTHPISYYKPEFYTPDDGGTAHLSVVAEDGSAVSATSTINLYITNEFGAPPSPANFIQPGKQPLLSMCPTIMVGQDGQVRMVVGAAGGTQITTDTALAIIYNLWFGYDVKRAVEEPRLHNKLLPNVTTVERNIDQAVTAALETRHHHTQIASTFIAVVQAIVRTAGGWAAASDSRKGGEPAGY

SEQ ID NO: 9831 - protein, 197 aa, Homo sapiens
TTHPISYDKPEFYTPDDGGTAHLSVVAEDGSAVSATSTINLYGILFNNEWTTSALPATNEFGAPPSPANFIQPGKQPLLSMCPTIMVGQDGQVRMVVGAAGGTQITTDTALAIIYNLWFGYDVKRAVEEPRLHNKLLPNVTTVERNIDQAVTAALETRHHHTQIASTFIAVVQAIVRTAGGWAAASDSRKGGEPAGY

SEQ ID NO: 9832 - protein, 328 aa, Homo sapiens
MREGRQEARGIVTAEDLNNYRAELIEHPLNISLGDAVLYMPSARLSGPVLALILNILKGYNFSRESVETPEQKGLTYHRIVEAFRFAYAKRTLLGDPKFVDVTENLIAGLLCARMDSPALGSQQVVRNMTSEFFAAQLRSQISDHTTHPISYDKPEFYTPDDGGTAHLSVVAEDGSAVSATSTINLYITNEFGAPPSPANFIQPGKQPLLSMCPTIMVGQDGQVRMVVGAAGGTQITTDTALAIIYNLWFGYDVKRAVEEPRLHNKLLPNVTTVERNIDQAVTAALETRHHHTQIASTFIAVVQAIVRTAGGWAAASDSRKGGEPAGY

SEQ ID NO: 9833 - protein, 337 aa, Homo sapiens
MQQPGDWGGVALHELFLPSHVIIGPLVVKVEVGERWGGDRTQGEELLHFSPHLTVHTTSVSVFSPYNLKELALKASIYIEEGHEGACVLKLHHHPWIHTRRPALGSQQVVRNMTSEFFAAQLRSQISDHTTHPISYYKPEFYTPDDGGTAHLSVVAEDGSAVSATSTINLYFGSKVCSPVSGILFNNEWTTSALPAFTNEFGAPPSPANFIQPGKQPLLSMCPTIMVGQDGQVRMVVGAAGGTQITTDTALAIIYNLWFGYDVKRAVEEPRLHNKLLPNVTTVERNIDQAVTAALETRHHHTQIASTFIAVVQAIVRTAGGWAAASDSRKGGEPAGY

SEQ ID NO: 9834 - protein, 942 aa, Homo sapiens
MLLLLGLCLGLSLCVGSQEEAQSWGHSSEQDGLRVPRQVRLLQRLKTKPLMTEFSVKSTIISRYAFTTVSCRMLNRASEDQDIEFQMQIPAAAFITNFTMLIGDKVYQGEITEREKKSGDRVKEKRNKTTEENGEKGTEIFRASAVIPSKDKAAFFLSYEELLQRRLGKYEHSISVRPQQLSGRLSVGVNILESAGIASLEVLPLHNSRQRGSGRGEDDSGPPPSTVINQNETFANIIFKPTVVQQARIAQNGILGDFIIRYDVNREQSIGDIQVLNGYFVHYFAPKDLPPLPKNVVFVLDSSASMVGTKLRQTKDALFTILHDLRPQDRFSIIGFPNRIKVWKDHLISVTPDSIRDGKVYIHHMSPTGGTDINGALQRAIRLLNKYVAHSGIGDRSVSLIVFLTDGKPTVGETHTLKILNNTREAARGQVCIFTIGIGNDVDFRLLEKLSLENCGLTRRVHEEEDAGSQLIGFYDEIRTPLLSDIRIDYPPSSVVQATKTLFPNYFNGSEIIIAGKLVDRKLDHLHVEVTASNSKKFIILKTDVPVRPQKAGKDVTGSPRPGGDGEGDPNHIERLWSYLTTKELLSSWLQSDDEPEKERLRQRAQALAVSYRFLTPFTSMKLRGPVPRMDGLEEAHGMSAAMGPEPVVQSVRGAGTQPGPLLKKPYQPRIKISKTSVDGDPHFVVDFPLSRLTVCFNIDGQPGDILRLVSDHRDSGVTVNGELIGAPAPPNGHKKQRTYLRTITILINKPERSYLEITPSRVILDGGDRLVLPCNQSVVVGSWGLEVSVSANANVTVTIQGSIAFVILIHLYKKPAPFQRHHLGFYIANSEGLSSNCHGLLGQFLNQDARLTEDPAGPSQNLTHPLLLQVGEGPEAVLTVKGHQVPVVWKQRKIYNGEEQIDCWFARNNAAKLIDGEYKDYLASHPFDTGMTLGQGMSREL

SEQ ID NO: 9835 - protein, 298 aa, Homo sapiens [sequence omitted]

SEQ ID NO: 9836 - protein, 1798 aa, Homo sapiens
MELTSRERGRGQPLPWELRLGLLLSVLAATLAQAPAPDVPGCSRGSCYPATGDLLVGRADRLTASSTCGLNGPQPYCIVSHLQDEKKCFLCDSRRPFSARDNPHSHRIQNVVTSFAPQRRAAWWQSENGIPAVTIQLDLEAEFHFTHLIMTFKTFRPAAMLVERSADFGRTWHVYRYFSYDCGADFPGVPLAPPRHWDDVVCESRYSEIEPSTEGEVIYRVLDPAIPIPDPYSSRIQNLLKITNLRVNLTRLHTLGDNLLDPRREIREKYYYALYELVVRGNCFCYGHASECAPAPGAPAHAEGMVHGACICKHNTRGLNCEQCQDFYRDLPWRPAEDGHSHACRKCECHGHTHSCHFDMAVYLASGNVSGGVCDGCQHNTAGRHCELCRPFFYRDPTKDLRDPAVCRSCDCDPMGSQDGGRCDSHDDPALGLVSGQCRCKEHVVGTRCQQCRDGFFGLSISDRLGCRRCQCNARGTVPGSTPCDPNSGSCYCKRLVTGRGCDRCLPGHWGLSHDLLGCRPCDCDVGGALDPQCDEGTGQCHCRQHMVGRRCEQVQPGYFRPFLDHLIWEAEDTRGQVLDVVERLVTPGETPSWTGSGFVRLQEGQTLEFLVASVPKAMDYDLLLRLEPQVPEQWAELELIVQRPGPVPAHSLCGHLVPKDDRIQGTLQPHARYLIFPNPVCLEPGISYKLHLKLVRTGGSAQPETPYSGPGLLIDSLVLLPRVLVLEMFSGGDAAALERQATFERYQCHEEGLVPSKTSPSEACAPLLISLSTLIYNGALPCQCNPQGSLSSECNPHGGQCLCKPGVVGRRCDLCAPGYYGFGPTGCQACQCSHEGALSSLCEKTSGQCLCRTGAFGLRCDRCQRGQWGFPSCRPCVCNGHADECNTHTGACLGCRDHTGGEHCERCIAGFHRDPRLPYGGQCRPCPCPEGPGSQRHFATSCHQDEYSQQIVCHCRAGYTGLRCEACAPGHFGDPSRPGGRCQLCECSGNIDPMDPDACDPHTGQCLRCLHHTEGPHCAHCKPGFHGQAARQSCHRCTCNLLGTNPQQCPSPDQCHCDPSSGQCPCLPNVQGPSCDRCAPNFWNLTSGHGCQPCACHPSRARGPTCNEFTGQCHCRAGFGGRTCSECQELHWGDPGLQCHACDCDSRGIDTPQCHRFTGHCSCRPGVSGVRCDQCARGFSGIFPACHPCHACFGDWDRVVQDLAARTQRLEQRAQELQQTGVLGAFESSFWHMQEKLGIVQGIVGARNTSAASTAQLVEATEELRREIGEATEHLTQLEADLTDVQDENFNANHALSGLERDRLALNLTLRQLDQHLDLLKHSNFLGAYDSIRHAHSQSAEAERRANTSALAVPSPVSNSASARHRTEALMDAQKEDFNSKHMANQRALGKLSAHTHTLSLTDINELVCGAPGDAPCATSPCGGAGCRDEDGQPRCGGLSCNGAAATADLALGRARHTQAELQRALAEGGSILSRVAETRRQASEAQQRAQAALDKANASRGQVEQANQELQELIQSVKDFLNQEGADPDSIEMVATRVLELSIPASAEQIQHLAGAIAERVRSLADVDAILARTVGDVRRAEQLLQDARRARSWAEDEKQKAETVQAALEEAQRAQGIAQGAIRGAVADTRDTEQTLYQVQERMAGAERALSSAGERARQLDALLEALKLKRAGNSLAASTAEETAGSAQGRAQEAEQLLRGPLGDQYQTVKALAERKAQGVLAAQARAEQLRDEARDLLQAAQDKLQRLQELEGTYEENERALESKAAQLDGLEARMRSVLQAINLQVQIYNTCQ

SEQ ID NO: 9837 - protein, 223 aa, Homo sapiens
MGWTMRLVTAALLLGLMMVVTGDEDENSPCAHEALLDEDTLFCQGLEVFYPELGNIGCKVVPDCNNYRQKITSWMEPIVKFPGAVDGATYILVMVDPDAPSRAEPRQRFWRHWLVTDIKGADLKEGKIQGQELSAYQAPSPPAHSGFHRYQFFVYLQEGKVISLLPKENKTRGSWKMDRFLNRFHLGEPEASTQFMTQNYQDSPTLQAPRGRASEPKHKTRRR

SEQ ID NO: 9838 - protein, 588 aa, Homo sapiens
FFGRWPRQIVSSIGLCRYGGRIDCCWGWARQSWGQCQPFYVLRQRIARIRCQLKAVCQPRCKHGECIGPNKCKCHPGYAGKTCNQDEHIPAPLDQGSEQPLFQPLDHQATSLPSRDLNECGLKPRPCKHRCMNTYGSYKCYCLNGYMLMPDGSCSSALTCSMANCQYGCDVVKGQIRCQCPSPGLQLAPDGRTCVDVDECATGRASCPRFRQCVNTFGSYICKCHKGFDLMYIGGKYQCHDIDECSLGQYQCSSFARCYNIRGSYKCKCKEGYQGDGLTCVYIPKVMIEPSGPIHVPKGNGTILKGDTGNNNWIPDVGSTWWPPKTPYIPPIITNRPTSKPTTRPTPKPTPIPTPPPPPPLPTELRTPLPPTTPERPTTGLTTIAPAASTPPGGITVDNRVQTDPQKPRGDVFIPRQPSNDLFEIFEIERGVSADDEAKDDPGVLVHSCNFDHGLCGWIREKDNDLHWEPIRDPAGGQYLTVSAAKAPGGKAARLVLPLGRLMHSGDLCLSFRHKVTGLHSGTLQVFVRKHGAHGAALWGRNGGHGWRQTQITLRGADIKSVVFKGEKRRGHTGEIGLDDVSLKKGHC

SEQ ID NO: 9839 - protein, 509 aa, Homo sapiens
MDFLLALVLVSSLYLQAAAEFDGRWPRQIVSSIGLCRYGGRIDCCWGWARQSWGQCQPVCQPRCKHGECIGPNKCKCHPGYAGKTCNQDLNECGLKPRPCKHRCMNTYGSYKCYCLNGYMLMPDGSCSSALTCSMANCQYGCDVVKGQIRCQCPSPGLHLAPDGRTCVDVDECATGRASCPRFRQCVNTFGSYICKCHKGFDLMYIGGKYQCHDIDECSLGQYQCSSFARCYNVRGSYKCKCKEGYQGDGLTCVYIPKVMIEPSGPIHVPKGNGTILKGDTGNNNWIPDVGSTWWPPKTPYIPPIITNRPTSKPTTRPTPKPTPIPTPPPPPPLPTELRTPLPPTTPERPTTGLTTIAPAASTPPGGITVDNRVQTDPQKPRGDVFSVLVHSCNFDHGLCGWIREKDNDLHWEPIRDPAGGQYLTVSAAKAPGGKAARLVLPLGRLMHSGDLCLSFRHKVTGLHSGTLQVFVRKHGAHGAALWGRNGGHGWRQTQITLRGADIKSESQR

SEQ ID NO: 9840 - protein, 565 aa, Homo sapiens
MDFLLALVLVSSLYLQAAAEFDGRWPRQIVSSIGLCRYGGRIDCCWGWARQSWGQCQPVCQPRCKHGECIGPNKCKCHPGYAGKTCNQDLNECGLKPRPCKHRCMNTYGSYKCYCLNGYMLMPDGSCSSALTCSMANCQYGCDVVKGQIRCQCPSPGLQLAPDGRTCVDVDECATGRASCPRFRQCVNTFGSYICKCHKGFDLMYIGGKYQCHDIDECSLGQYQCSSFARCYNIRGSYKCKCKEGYQGDGLTCVYIPKVMIEPSGPIHVPKGNGTILKGDTGNNNWIPDVGSTWWPPKTPYIPPIITNRPTSKPTTRPTPKPTPIPTPPPPPPLPTELRTPLPPTTPERPTTGLTTIAPAASTPPGGITVDNRVQTDPQKPRGDVFIPRQPSNDLFEIFEIERGVSADDEAKDDPGVLVHSCNFDHGLCGWIREKDNDLHWEPIRDPAGGQYLTVSAAKAPGGKAARLVLPLGRLMHSGDLCLSFRHKVTGLHSGTLQVFVRKHGAHGAALWGRNGGHGWRQTQITLRGADIKSVVFKGEKRRGHTGEIGLDDVSLKKGHCSEER

SEQ ID NO: 9841 - protein, 571 aa, Homo sapiens
FFGRWPRQIVSSIGLCRYGGRIDCCWGWARQSWGQCQPVCQPRCKHGECIGPNKCKCHPGYAGKTCNQDEHIPAPLDQGSEQPLFQPLDHQATSLPSRDLNECGLKPRPCKHRCMNTYGSYKCYCLNGYMLMPDGSCSSALTCSMANCQYGCDVVKGQIRCQCPSPGLQLAPDGRTCVDVDECATGRASCPRFRQCVNTFGSYICKCHKGFDLMYIGGKYQCHDIDECSLGQYQCSSFARCYNIRGSYKCKCKEGYQGDGLTCVYIPKVMIEPSGPIHVPKGNGTILKGDTGNNNWIPDVGSTWWPPKTPYIPPIITNRPTSKPTTRPTPKPTPIPTPPPPPPLPTELRTPLPPTTPERPTTGLTTIAPAASTPPGGITVDNRVQTDPQKPRGDVFIPRQPSNDLFEIFEIERGVSADDEAKDDPGVLVHSCNFDHGLCGWIREKDNDLHWEPIRDPAGGQYLTVSAAKAPGGKAARLVLPLGRLMHSGDLCLSFRHKVTGLHSGTLQVFVRKHGAHGAALWGRNGGHGWRQTQITLRGADIKSVVFKGEKRRGHTGEIGLDDVSLKKGHC

SEQ ID NO: 9842 - protein, 1206 aa, Homo sapiens
DSGRAAGSCPRCADSRADVLPAGALAGHAPGARRRGPRGSPPPRAPLHALGSPGPPLSTPPARLGPSGRRAARPQRCGSPRGDGLMGAGGRRMRGAPARLLLPLLPWLLLLLAPEARGAPGCPLSIRSCKCSGERPKGLSGGVPGPARRRVVCSGGDLPEPPEPGLLPNGTVTLLLSNNKITGLRNGSFLGLSLLEKLDLRNNIISTVQPGAFLGLGELKRLDLSNNRIGCLTSETFQGLPRLLRLNISGNIFSSLQPGVFDELPALKVVDLGTEFLTCDCHLRWLLPWAQNRSLQLSEHTLCAYPSALHAQALGSLQEAQLCCEGALELHTHHLIPSLRQVVFQGDRLPFQCSASYLGNDTRIRWYHNRAPVEGDEQAGILLAESLIHDCTFITSELTLSHIGVWASGEWECTVSMAQGNASKKVEIVVLETSASYCPAERVANNRGDFRWPRTLAGITAYQSCLQYPFTSVPLGGGAPGTRASRRCDRAGRWEPGDYSHCLYTNDITRVLYTFVLMPINASNALTLAHQLRVYTAEAASFSDMMDVVYVAQMIQKFLGYVDQIKELVEVMVDMASNLMLVDEHLLWLAQREDKACSRIVGALERIGGAALSPHAQHISVELSAFPREVGGAGAGLHPVVYPCTALLLLCLFATIITYILNHSSIRVSRKGWHMLLNLCFHIAMTSAVFAGGITLTNYQMVCQAVGITLHYSSLSTLLWMGVKARVLHKELTWRAPPPQEGDPALPTPSPMLRFYLIAGGIPLIICGITAAVNIHNYRDHSPYCWLVWRPSLGAFYIPVALILLITWIYFLCAGLRLRGPLAQNPKAGNSRASLEAGEELRGSTRLRGSGPLLSDSGSLLATGSARVGTPGPPEDGDSLYSPGVQLGALVTTHFLYLAMWACGALAVSQRWLPRVVCSCLYGVAASALGLFVFTHHCARRRDVRASWRACCPPASPAAPHAPPRALPAAAEDGSPVFGEGPPSLKSSPSGSSGHPLALGPCKLTNLQLAQSQVCEAGAAAGGEGEPEPAGTRGNLAHRHPNNVHHGRRAHKSRAKGHRAGEACGKNRLKALRGGAAGALELLSSESGGLHNSPTDSYLGSSRNSPGAGLQLEGEPMLTPSEGSDTSAAPLSEAGRAGQRRSASRDSLKGGGALEKESHRRSYPLNAASLNGAPKGGKYDDVTLMGAEVASGGCMKTGLWKSETTV

SEQ ID NO: 9843 - protein, 1331 aa, Homo sapiens
MRGAPARLLLPLLPWLLLLLAPEARGAPGCPLSIRSCKCSGERPKGLSGGVPGPARRRVVCSGGDLPEPPEPGLLPNGTVTLLLSNNKITGLRNGSFLGLSLLEKLDLRNNIISTVQPGAFLGLGELKRLDLSNNRIGCLTSETFQGLPRLLRLNISGNIFSSLQPGVFDELPALKVVDLGTEFLTCDCHLRWLLPWAQNRSLQLSEHTLCAYPSALHAQALGSLQEAQLCCEGALELHTHHLIPSLRQVVFQGDRLPFQCSASYLGNDTRIRWYHNRAPVEGDEQAGILLAESLIHDCTFITSELTLSHIGVWASGEWECTVSMAQGNASKKVEIVVLETSASYCPAERVANNRGDFRWPRTLAGITAYQSCLQYPFTSVPLGGGAPGTRASRRCDRAGRWEPGDYSHCLYTNDITRVLYTFVLMPINASNALTLAHQLRVYTAEAASFSDMMDVVYVAQMIQKFLGYVDQIKELVEVMVDMASNLMLVDEHLLWLAQREDKACSRIVGALERIGGAALSPHAQHISVNARNVALEAYLIKPHSYVGLTCTAFQRREGGVPGTRPGSPGQNPPPEPEPPADQQLRFRCTTGRPNVSLSSFHIKNSVALASIQLPPSLFSSLPAALAPPVPPDCTLQLLVFRNGRLFHSHSNTSRPGAAGPGKRRGVATPVIFAGTSGCGVGNLTEPVAVSLRHWAEGAEPVAAWWSQEGPGEAGGWTSEGCQLRSSQPNVSALHCQHLGNVAVLMELSAFPREVGGAGAGLHPVVYPCTALLLLCLFATIITYILNHSSIRVSRKGWHMLLNLCFHIAMTSAVFAGGITLTNYQMVCQAVGITLHYSSLSTLLWMGVKARVLHKELTWRAPPPQEGDPALPTPSPMLRFYLIAGGIPLIICGITAAVNIHNYRDHSPYCWLVWRPSLGAFYIPVALILLITWIYFLCAGLRLRGPLAQNPKAGNSRASLEAGEELRGSTRLRGSGPLLSDSGSLLATGSARVGTPGPPEDGDSLYSPGVQLGALVTTHFLYLAMWACGALAVSQRWLPRVVCSCLYGVAASALGLFVFTHHCARRRDVRASWRACCPPASPAAPHAPPRALPAAAEDGSPVFGEGPPSLKSSPSGSSGHPLALGPCKLTNLQLAQSQVCEAGAAAGGEGEPEPAGTRGNLAHRHPNNVHHGRRAHKSRAKGHRAGEACGKNRLKALRGGAAGALELLSSESGSLHNSPTDSYLGSSRNSPGAGLQLEGEPMLTPSEGSDTSAAPLSEAGRAGQRRSASRDSLKGGGALEKESHRRSYPLNAASLNGAPKGGKYDDVTLMGAEVASGGCMKTGLWKSETTV

SEQ ID NO: 9844 - protein, 803 aa, Homo sapiens
MRALWVLGLCCVLLTFGSVRADDEVDVDGTVEEDLGKSREGSRTDDEVVQREEEAIQLDGLNASQIRELREKSEKFAFQAEVNRMMKLIINSLYKNKEIFLRELISNASDALDKIRLISLTDENALSGNEELTVKIKCDKEKNLLHVTDTGVGMTREELVKNLGTIAKSGTSEFLNKMTEAQEDGQSTSELIGQFGVGFYSAFLVADKVIVTSKHNNDTQHIWESDSNEFSVIADPRGNTLGRGTTITLVLKEEASDYLELDTIKNLVKKYSQFINFPIYVWSSKTETVEEPMEEEEAAKEEKEESDDEAAVEEEEEEKKPKTKKVEKTVWDWELMNDIKPIWQRPSKEVEEDEYKAFYKSFSKESDDPMAYIHFTAEGEVTFKSILFVPTSAPRGLFDEYGSKKSDYIKLYVRRVFITDDFHDMMPKYLNFVKGVVDSDDLPLNVSRETLQQHKLLKVIRKKLVRKTLDMIKKIADDKYNDTFWKEFGTNIKLGVIEDHSNRTRLAKLLRFQSSHHPTDITSLDQYVERMKEKQDKIYFMAGSSRKEAESSPFVERLLKKGYEVIYLTEPVDEYCIQALPEFDGKRFQNVAKEGVKFDESEKTKESREAVEKEFEPLLNWMKDKALKDKIEKAVVSQRLTESPCALVASQYGWSGNMERIMKAQAYQTGKDISTNYYASQKKTFEINPRHPLIRDMLRRIKEDEDDKTVLDLAVVLFETATLRSGYLLPDTKAYGDRIERMLRLSLNIDPDAKVEEEPEEEPEETAEDTTEDTEQDEDEEMDVGTDEEEETAKESTAEKDEL

SEQ ID NO: 9845 - protein, 940 aa, Homo sapiens
MGAARGSPARPRRLPLLSVLLLPLLGGTQTAIVFIKQPSSQDALQGRRALLRCEVEAPGPVHVYWLLDGAPVQDTERRFAQGSSLSFAAVDRLQDSGTFQCVARDDVTGEEARSANASFNIKWIEAGPVVLKHPASEAEIQPQTQVTLRCHIDGHPRPTYQWFRDGTPLSDGQSNHTVSSKERNLTLRPAGPEHSGLYSCCAHSAFGQACSSQNFTLSIADESFARVVLAPQDVVVARYEEAMFHCQFSAQPPPSLQWLFEDETPITNRSRPPHLRRATVFANGSLLLTQVRPRNAGIYRCIGQGQRGPPIILEATLHLAEIEDMPLFEPRVFTAGSEERVTCLPPKGLPEPSVWWEHAGVRLPTHGRVYQKGHELVLANIAESDAGVYTCHAANLAGQRRQDVNITVANGSSLPEWVTDNAGTLHFARVTRDDAGNYTCIASNGPQGQIRAHVQLTVAVFITFKVEPERTTVYQGHTALLQCEAQGDPKPLIQWKGKDRILDPTKLGPRMHIFQNGSLVIHDVAPEDSGRYTCIAGNSCNIKHTEAPLYVVDKPVPEESEGPGSPPPYKMIQTIGLSVGAAVAYIIAVLGLMFYCKKRCKAKRLQKQPEGEEPEMECLNGGPLQNGQPSAEIQEEVALTSLGSGPAATNKRHSTSDKMHFPRSSLQPITTLGKSEFGEVFLAKAQGLEEGVAETLVLVKSLQSKDEQQQLDFRRELEMFGKLNHANVVRLLGLCREAEPHYMVLEYVDLGDLKQFLRISKSKDEKLKSQPLSTKQKVALCTQVALGMEHLSNNRFVHKDLAARNCLVSAQRQVKVSALGLSKDVYNSEYYHFRQAWVPLRWMSPEAILEGDFSTKSDVWAFGVLMWEVFTHGEMPHGGQADDEVLADLQAGKARLPQPEGCPSKLYRLMQRCWALSPKDRPSFSEIASALGDSTVDSKP

SEQ ID NO: 9846 - protein, 1070 aa, Homo sapiens [sequence omitted]

SEQ ID NO: 9847 - protein, 1030 aa, Homo sapiens
MGAARGSPARPRRLPLLSVLLLPLLGGTQTAIVFIKQPSSQDALQGRRALLRCEVEAPGPVHVYWLLDGAPVQDTERRFAQGSSLSFAAVDRLQDSGTFQCVARDDVTGEEARSANASFNIKWIEAGPVVLKHPASEAEIQPQTQVTLRCHIDGHPRPTYQWFRDGTPLSDGQSNHTVSSKERNLTLRPAGPEHSGLYSCCAHSAFGQACSSQNFTLSIADESFARVVLAPQDVVVARYEEAMFHCQFSAQPPPSLQWLFEDETPITNRSRPPHLRRATVFANGSLLLTQVRPRNAGIYRCIGQGQRGPPIILEATLHLAEIEDMPLFEPRVFTAGSEERVTCLPPKGLPEPSVWWEHAGVRLPTHGRVYQKGHELVLANIAESDAGVYTCHAANLAGQRRQDVNITVATVPSWLKKPQDSQLEEGKPGYLDCLTQATPKPTVVWYRNQMLISEDSRFEVFKNGTLRINSVEVYDGTWYRCMSSTPAGSIEAQARVQVLDGSSLPEWVTDNAGTLHFARVTRDDAGNYTCIASNGPQGQIRAHVQLTVAVFITFKVEPERTTVYQGHTALLQCEAQGDPKPLIQWKGKDRILDPTKLGPRMHIFQNGSLVIHDVAPEDSGRYTCIAGNSCNIKHTEAPLYVVDKPVPEESEGPGSPPPYKMIQTIGLSVGAAVAYIIAVLGLMFYCKKRCKAKRLQKQPEGEEPEMECLNGGPLQNGQPSAEIQEEVALTSLGSGPAATNKRHSTSDKMHFPRSSLQPITTLGKSEFGEVFLAKAQGLEEGVAETLVLVKSLQSKDEQQQLDFRRELEMFGKLNHANVVRLLGLCREAEPHYMVLEYVDLGDLKQFLRISKSKDEKLKSQPLSTKQKVALCTQVALGMEHLSNNRFVHKDLAARNCLVSAQRQVKVSALGLSKDVYNSEYYHFRQAWVPLRWMSPEAILEGDFSTKSDVWAFGVLMWEVFTHGEMPHGGQADDEVLADLQAGKARLPQPEGCPSKLYRLMQRCWALSPKDRPSFSEIASALGDSTVDSKP

SEQ ID NO: 9848 - protein, 816 aa, Homo sapiens
MGAARGSPARPRRLPLLSVLLLPLLGGTQTAIVFIKQPSSQDALQGRRALLRCEVEAPGPVHVYWLLDGAPVQDTERRFAQGSSLSFAAVDRLQDSGTFQCVARDDVTGEEARSANASFNIKWIEAGPVVLKHPASEAEIQPQTQVTLRCHIDGHPRPTYQWFRDGTPLSDGQSNHTVSSKERNLTLRPAGPEHSGLYSCCAHSAFGQACSSQNFTLSIADESFARVVLAPQDVVVARYEEAMFHCQFSAQPPPSLQWLFEDETPITNRSRPPHLRRATVFANGSLLLTQVRPRNAGIYRCIGQGQRGPPIILEATLHLAEIEDMPLFEPRVFTAGSEERVTCLPPKGLPEPSVWWEHAGVRLPTHGRVYQKGHELVLANIAESDAGVYTCHAANLAGQRRQDVNITVATVPSWLKKPQDSQLEEGKPGYLDCLTQATPKPTVVWYRNQMLISEDSRFEVFKNGTLRINSVEVYDGTWYRCMSSTPAGSIEAQARVQVLEKLKFTPPPQPQQCMEFDKEATVPCSATGREKPTIKWERADGSSLPEWVTDNAGTLHFARVTRDDAGNYTCIASNGPQGQIRAHVQLTVAVFITFKVEPERTTVYQGHTALLQCEAQGDPKPLIQWKGKDRILDPTKLGPRMHIFQNGSLVIHDVAPEDSGRYTCIAGNSCNIKHTEAPLYVVDKPVPEESEGPGSPPPYKMIQTIGLSVGAAVAYIIAVLGLMFYCKKRCKAKRLQKQPEGEEPEMECLNGGPLQNGQPSAEIQEEVALTSLGSGPAATNKRHSTSDKMHFPRSSLQPITTLGRPQAVPEDFQEQG

SEQ ID NO: 9849 - protein, 490 aa, Homo sapiens
MKPKLMYQELKVPAEEPANELPMNEIEAWKAAEKKARWVLLVLILAVVGFGALMTQLFLWEYGDLHLFGPNQRPAPCYDPCEAVLVESIPEGLDFPNASTGNPSTSQAWLGLLAGAHSSLDIASFYWTLTNNDTHTQEPSAQQGEEVLRQLQTLAPKGVNVRIAVSKPSGPQPQADLQALLQSGAQVRMVDMQKLTHGVLHTKFWVVDQTHFYLGSANMDWRSLTQVKELGVVMYNCSCLARDLTKIFEAYWFLGQAGSSIPSTWPRFYDTRYNQETPMEICLNGTPALAYLASAPPPLCPSGRTPDLKALLNVVDNARSFIYVAVMNYLPTLEFSHPHRFWPAIDDGLRRATYERGVKVRLLISCWGHSEPSMRAFLLSLAALRDNHTHSDIQVKLFVVPADEAQARIPYARVNHNKYMVTERATYIGTSNWSGNYFTETAGTSLLVTQNGRGGLRSQLEAIFLRDWDSPYSHDLDTSADSVGNACRLL

SEQ ID NO: 9850 - protein, 437 aa, Homo sapiens
MTQLFLWEYGDLHLFGPNQRPAPCYDPCEAVLVESIPEGLDFPNASTGNPSTSQAWLGLLAGAHSSLDIASFYWTLTNNDTHTQEPSAQQGEEVLRQLQTLAPKGVNVRIAVSKPSGPQPQADLQALLQSGAQVRMVDMQKLTHGVLHTKFWVVDQTHFYLGSANMDWRSLTQVKELGVVMYNCSCLARDLTKIFEAYWFLGQAGSSIPSTWPRFYDTRYNQETPMEICLNGTPALAYLASAPPPLCPSGRTPDLKALLNVVDNARSFIYVAVMNYLPTLEFSHPHRFWPAIDDGLRRATYERGVKVRLLISCWGHSEPSMRAFLLSLAALRDNHTHSDIQVKLFVVPADEAQARIPYARVNHNKYMVTERATYIGTSNWSGNYFTETAGTSLLVTQNGRGGLRSQLEAIFLRDWDSPYIHDLDTSADSVGNACRLL

SEQ ID NO: 9851 - protein, 831 aa, Homo sapiens
MERPWGAADGLSRWPHGLGLLLLLQLLPPSTLSQDRLDAPPPPAAPLPRWSGPIGVSWGLRAAAAGGAFPRGGRWRRSAPGEDEECGRVRDFVAKLANNTHQHVFDDLRGSVSLSWVGDSTGVILVLTTFHVPLVIMTFGQSKLYRSEDYGKNFKDITDLINNTFIRTEFGMAIGPENSGKVVLTAEVSGGSRGGRIFRSSDFAKNFVQTDLPFHPLTQMMYSPQNSDYLLALSTENGLWVSKNFGGKWEEIHKAVCLAKWGSDNTIFFTTYANGSCKADLGALELWRTSDLGKSFKTIGVKIYSFGLGGRFLFASVMADKDTTRRIHVSTDQGDTWSMAQLPSVGQEQFYSILAANDDMVFMHVDEPGDTGFGTIFTSDDRGIVYSKSLDRHLYTTTGGETDFTNVTSLRGVYITSVLSEDNSIQTMITFDQGGRWTHLRKPENSECDATAKNKNECSLHIHASYSISQKLNVPMAPLSEPNAVGIVIAHGSVGDAISVMVPDVYISDDGGYSWTKMLEGPHYYTILDSGGIIVAIEHSSRPINVIKFSTDEGQCWQTYTFTRDPIYFTGLASEPGARSMNISIWGFTESFLTSQWVSYTIDFKDILERNCEEKDYTIWLAHSTDPEDYEDGCILGYKEQFLRLRKSSVCQNGRDYVVTKQPSICLCSLEDFLCDFGYYRPENDSKCVEQPELKGHDLEFCLYGREEHLTTNGYRKIPGDKCQGGVNPVREVKDLKKKCTSNFLSPEKQNSKSNSVPIILAIVGLMLVTVVAGVLIVKKYVCGGRFLVHRYSVLQQHAEANGVDGVDALDTASHTNKSGYHDDSDEDLLE

SEQ ID NO: 9852 - protein, 831 aa, Homo sapiens [sequence omitted]

SEQ ID NO: 9853 - protein, 423 aa, Homo sapiens [sequence omitted]

SEQ ID NO: 9854 - protein, 745 aa, Homo sapiens
MGVPFFSSLRCMVDLGPCWAGGLTAEMKLLLALAGLLAILATPQPSEGAAPAVLGEVDTSLVLSSMEEAKQLVDKAYKERRESIKQRLRSGSASPMELLSYFKQPVAATRTAVRAADYLHVALDLLERKLRSLWRRPFNVTDVLTPAQLNVLSKSSGCAYQDVGVTCPEQDKYRTITGMCNNRRSPTLGASNRAFVRWLPAEYEDGFSLPYGWTPGVKRNGFPVALARAVSNEIVRFPTDQLTPDQERSLMFMQWGQLLDHDLDFTPEPAARASFVTGVNCETSCVQQPPCFPLKIPPNDPRIKNQADCIPFFRSCPACPGSNITIRNQINALTSFVDASMVYGSEEPLARNLRNMSNQLGLLAVNQRFQDNGRALLPFDNLHDDPCLLTNRSARIPCFLAGDTRSSEMPELTSMHTLLLREHNRLATELKSLNPRWDGERLYQEARKIVGAMVQIITYRDYLPLVLGPTAMRKYLPTYRSYNDSVDPRIANVFTNAFRYGHTLIQPFMFRLDNRYQPMEPNPRVPLSRVFFASWRVVLEGGIDPILRGLMATPAKLNRQNQIAVDEIRERLFEQVMRIGLDLPALNMQRSRDHGLPGYNAWRRFCGLPQPETVGQLGTVLRNLKLARKLMEQYGTPNNIDIWMGGVSEPLKRKGRVGPLLACIIGTQFRKLRDGDRFWWENEGVFSMQQRQALAQISLPRIICDNTGITTVSKNNIFMSNSYPRDFVNCSTLPALNLASWREAS

SEQ ID NO: 9855 - protein, 650 aa, Homo sapiens
MELLSYFKQPVAATRTAVRAADYLHVALDLLERKLRSLWRRPFNVTDVLTPAQLNVLSKSSGCAYQDVGVTCPEQDKYRTITGMCNNRRSPTLGASNRAFVRWLPAEYEDGFSLPYGWTPGVKRNGFPVALARAVSNEIVRFPTDQLTPDQERSLMFMQWGQLLDHDLDFTPEPAARASFVTGVNCETSCVQQPPCFPLKIPPNDPRIKNQADCIPFFRSCPACPGSNITIRNQINALTSFVDASMVYGSEEPLARNLRNMSNQLGLLAVNQRFQDNGRALLPFDNLHDDPCLLTNRSARIPCFLAGDTRSSEMPELTSMHTLLLREHNRLATELKSLNPRWDGERLYQEARKIVGAMVQIITYRDYLPLVLGPTAMRKYLPTYRSYNDSVDPRIANVFTNAFRYGHTLIQPFMFRLDNRYQPMEPNPRVPLSRVFFASWRVVLEGGIDPILRGLMATPAKLNRQNQIAVDEIRERLFEQVMRIGLDLPALNMQRSRDHGLPGYNAWRRFCGLPQPETVGQLGTVLRNLKLARKLMEQYGTPNNIDIWMGGVSEPLKRKGRVGPLLACIIGTQFRKLRDGDRFWWENEGVFSMQQRQALAQISLPRIICDNTGITTVSKNNIFMSNSYPRDFVNCSTLPALNLASWREAS

SEQ ID NO: 9856 - protein, 777 aa, Homo sapiens
MGVPFFSSLRCMVDLGPCWAGGLTAEMKLLLALAGLLAILATPQPSEGAAPAVLGEVDTSLVLSSMEEAKQLVDKAYKERRESIKQRLRSGSASPMELLSYFKQPVAATRTAVRAADYLHVALDLLERKLRSLWRRPFNVTDVLTPAQLNVLSKSSGCAYQDVGVTCPEQDKYRTITGMCNNRCGWLGVAAGTGLREASRTPQASRCQRPVLPCRRSPTLGASNRAFVRWLPAEYEDGFSLPYGWTPGVKRNGFPVALARAVSNEIVRFPTDQLTPDQERSLMFMQWGQLLDHDLDFTPEPAARASFVTGVNCETSCVQQPPCFPLKIPPNDPRIKNQADCIPFFRSCPACPGSNITIRNQINALTSFVDASMVYGSEEPLARNLRNMSNQLGLLAVNQRFQDNGRALLPFDNLHDDPCLLTNRSARIPCFLAGDTRSSEMPELTSMHTLLLREHNRLATELKSLNPRWDGERLYQEARKIVGAMVQIITYRDYLPLVLGPTAMRKYLPTYRSYNDSVDPRIANVFTNAFRYGHTLIQPFMFRLDNRYQPMEPNPRVPLSRVFFASWRVVLEGGIDPILRGLMATPAKLNRQNQIAVDEIRERLFEQVMRIGLDLPALNMQRSRDHGLPGYNAWRRFCGLPQPETVGQLGTVLRNLKLARKLMEQYGTPNNIDIWMGGVSEPLKRKGRVGPLLACIIGTQFRKLRDGDRFWWENEGVFSMQQRQALAQISLPRIICDNTGITTVSKNNIFMSNSYPRDFVNCSTLPALNLASWREAS

SEQ ID NO: 9857 - protein, 301 aa, Homo sapiens
MARGKAKEEGSWKKFIWNSEKKEFLGRTGGSWFKILLFYVIFYGCLAGIFIGTIQVMLLTISEFKPTYQDRVAPPGLTQIPQIQKTEISFRPNDPKSYEAYVLNIVRFLEKYKDSAQRDDMIFEDCGDVPSEPKERGDFNHERGERKVCRFKLEWLGNCSGLNDETYGYKEGKPCIIIKLNRVLGFKPKPPKNESLETYPVMKYNPNVLPVQCTGKRDEDKDKVGNVEYFGLGNSPGFPLQYYPYYGKLLQPKYLQPLLAVQFTNLTMDTEIRIECKAYGENIGYSEKDRFQGRFDVKIKF

SEQ ID NO: 9858 - protein, 304 aa, Homo sapiens
MARGKAKEEGSWKKFIWNSEKKEFLGRTGGSWFKILLFYVIFYGCLAGIFIGTIQVMLLTISEFKPTYQDRVAPPGLTQIPQIQKTEISFRPNDPKSYEAYVLNIVRFLEKYKDSAQRDDMIFEDCGDVPSEPKERGDFNHERGERKVCRFKLEWLGNCSGLNDETYGYKEGKPCIIIKLNRVLGFKPKATPKNESLETYPVMKYNPNVLPVQCTGKRDEDKDKVGNVEYFGLGNSPGFPLQYYPYYGKLLQPKYLQPLLAVQFTNLTMDTEIRIECKAYGENIGYSEKDRFQGRFDVKIEVKS

SEQ ID NO: 9859 - protein, 1179 aa, Homo sapiens
MAACGRVRRMFRLSAALHLLLLFAAGAEKLPGHGVHSQGQGPGANFVSFVGQAGGGGPAGQQLPQLLQSSQLQQQQQQQQQQQQLQPPQPPFPAGGPPARRGGAGAGGGWKLAEEESCREDVTRVCPKHTWSNNLAVLECLQDVREPENEISSDCNHLLWNYKLNLTTDPKFESVAREVCKSTITEIKECADEPVGKGYMVSCLVDHRGNITEYQCHQYITKMTAIIFSDYRLICGFMDDCKNDINILKCGSIRLGEKDAHSQGEVVSCLEKGLVKEAEEREPKIQVSELCKKAILRVAELSSDDFHLDRHLYFACRDDRERFCENTQAGEGRVYKCLFNHKFEESMSEKCREALTTRQKLIAQDYKVSYSLAKSCKSDLKKYRCNVENLPRSREARLSYLLMCLESAVHRGRQVSSECQGEMLDYRRMLMEDFSLSPEIILSCRGEIEHHCSGLHRKGRTLHCLMKVVRGEKGNLGMNCQQALQTLIQETDPGADYRIDRALNEACESVIQTACKHIRSGDPMILSCLMEHLYTEKMVEDCEHRLLELQYFISRDWKLDPVLYRKCQGDASRLCHTHGWNETSEFMPQGAVFSCLYRHAYRTEEQGRRLSRECRAEVQRILHQRAMDVKLDPALQDKCLIDLGKWCSEKTETGQELECLQDHLDDLVVECRDIVGNLTELESEDIQIEALLMRACEPIIQNFCHDVADNQIDSGDLMECLIQNKHQKDMNEKCAIGVTHFQLVQMKDFRFSYKFKMACKEDVLKLCPNIKKKVDVVICLSTTVRNDTLQEAKEHRVSLKCRRQLRVEELEMTEDIRLEPDLYEACKSDIKNFCSAVQYGNAQIIECLKENKKQLSTRCHQKVFKLQETEMMDPELDYTLMRVCKQMIKRFCPEADSKTMLQCLKQNKNSELMDPKCKQMITKRQITQNTDYRLNPMLRKACKADIPKFCHGILTKAKDDSELEGQVISCLKLRYADQRLSSDCEDQIRIIIQESALDYRLDPQLQLHCSDEISSLCAEEAAAQEQTGQVEECLKVNLLKIKTELCKKEVLNMLKESKADIFVDPVLHTACALDIKHHCAAITPGRGRQMSCLMEALEDKRVRLQPECKKRLNDRIEMWSYAAKVAPADGFSDLAMQVMTSPSKNYILSVISGSICILFLIGLMCGRITKRVTRELKDR

SEQ ID NO: 9860 - protein, 318 aa, Homo sapiens
MASPGCLLCVLGLLLCGAASLELSRPHGDTAKKPIIGILMQKCRNKVMKNYGRYYIAASYVKYLESAGARVVPVRLDLTEKDYEILFKSINGILFPGGSVDLRRSDYAKVAKIFYNLSIQSFDDGDYFPVWGTCLGFEELSLLISGECLLTATDTVDVAMPLNFTGGQLHSRMFQNFPTELLLSLAVEPLTANFHKWSLSVKNFTMNEKLKKFFNVLTTNTDGKIEFISTMEGYKYPVYGVQWHPEKAPYEWKNLDGISHAPNAVKTAFYLAEFFVNEARKNNHHFKSESEEEKALIYQFSPIYTGNISSFQQCYIFD

SEQ ID NO: 9861 - protein, 1049 aa, Homo sapiens
MGSRTPESPLHAVQLRWGPRRRPPLLPLLLLLLPPPPRVGGFNLDAEAPAVLSGPPGSFFGFSVEFYRPGTDGVSVLVGAPKANTSQPGVLQGGAVYLCPWGASPTQCTPIEFDSKGSRLLESSLSSSEGEEPVEYKSLQWFGATVRAHGSSILACAPLYSWRTEKEPLSDPVGTCYLSTDNFTRILEYAPCRSDFSWAAGQGYCQGGFSAEFTKTGRVVLGGPGSYFWQGQILSATQEQIAESYYPEYLINLVQGQLQTRQASSIYDDSYLGYSVAVGEFSGDDTEDFVAGVPKGNLTYGYVTILNGSDIRSLYNFSGEQMASYFGYAVAATDVNGDGLDDLLVGAPLLMDRTPDGRPQEVGRVYVYLQHPAGIEPTPTLTLTGHDEFGRFGSSLTPLGDLDQDGYNDVAIGAPFGGETQQGVVFVFPGGPGGLGSKPSQVLQPLWAASHTPDFFGSALRGGRDLDGNGYPDLIVGSFGVDKAVVYRGRPIVSASASLTIFPAMFNPEERSCSLEGNPVACINLSFCLNASGKHVADSIGFTVELQLDWQKQKGGVRRALFLASRQATLTQTLLIQNGAREDCREMKIYLRNESEFRDKLSPIHIALNFSLDPQAPVDSHGLRPALHYQSKSRIEDKAQILLDCGEDNICVPDLQLEVFGEQNHVYLGDKNALNLTFHAQNVGEGGAYEAELRVTAPPEAEYSGLVRHPGNFSSLSCDYFAVNQSRLLVCDLGNPMKAGASLWGGLRFTVPHLRDTKKTIQFDFQILSKNLNNSQSDVVSFRLSVEAQAQVTLNGVSKPEAVLFPVSDWHPRDQPQKEEDLGPAVHHVYELINQGPSSISQGVLELSCPQALEGQQLLYVTRVTGLNCTTNHPINPKGLELDPEGSLHHQQKREAPSRSSASSGPQILKCPEAECFRLRCELGPLHQQESQSLQLHFRVWAKTFLQREHQPFSLQCEAVYKALKMPYRILPRQLPQKERQVATAVQWTKAEGSYGVPLWIIILAILFGLLLLGLLIYILYKLGFFKRSLPYGTAMEKAQLKPPATSDA

SEQ ID NO: 9862 - protein, 215 aa, Homo sapiens
MATRGSNGTICDNQRDCQPGLCCAFQRGLLFPVCTPLPVEGELCHDPASRLLDLITWELEPDGALDRCPCASGLLCQPHSHSLSYPQEEATLNEMFREVEELMEDTQHKLRSAVEEMEAEEAAAKASSEVNLANLPPSYHNETNTDTKVGNNTIHVHREIHKITNNQTGQMVFSETVITSVGDEEGRRSHECIIDEDCGPSMYCQFASFQYTCQP

SEQ ID NO: 9863 - protein, 350 aa, Homo sapiens
MQRLGATLLCLLLAAAVPTAPAPAPTATSAPVKPGPALSYPQEEATLNEMFREVEELMEDTQHKLRSAVEEMEAEEAAAKASSEVNLANLPPSYHNETNTDTKVGNNTIHVHREIHKITNNQTGQMVFSETVITSVGDEEGRRSHECIIDEDCGPSMYCQFASFQYTCQPCRGQRMLCTRDSECCGDQLCVWGHCTKMATRGSNGTICDNQRDCQPGLCCAFQRGLLFPVCTPLPVEGELCHDPASRLLDLITWELEPDGALDRCPCASGLLCQPHSHSLVYVCKPTFVGSRDQDGEILLPREVPDEYEVGSFMEEVRQELEDLERSLTEEMALGEPAAAAAALLGGEEI

SEQ ID NO: 9864 - protein, 1395 aa, Homo sapiens
MDTKLMCLLFFFSLPPLLVSNHTGRIKVVFTPSICKVTCTKGSCQNSCEKGNTTTLISENGHAADTLTATNFRVVICHLPCMNGGQCSSRDKCQCPPNFTGKLCQIPVHGASVPKLYQHSQQPGKALGTHVIHSTHTLPLTVTSQQGVKVKFPPNIVNIHVKHPPEASVQIHQVSRIDGPTGQKTKEAQPGQSQVSYQGLPVQKTQTIHSTYSHQQVIPHVYPVAAKTQLGRCFQETIGSQCGKALPGLSKQEDCCGTVGTSWGFNKCQKCPKKPSYHGYNQMMECLPGYKRVNNTFCQDINECQLQGVCPNGECLNTMGSYRCTCKIGFGPDPTFSSCVPDPPVISEEKGPCYRLVSSGRQCMHPLSVHLTKQLCCCSVGKAWGPHCEKCPLPGTAAFKEICPGGMGYTVSGVHRRRPIHHHVGKGPVFVKPKNTQPVAKSTHPPPLPAKEEPVEALTFSREHGPGVAEPEVATAPPEKEIPSLDQEKTKLEPGQPQLSPGISTIHLHPQFPVVIEKTSPPVPVEVAPEASTSSASQVIAPTQVTEINECTVNPDICGAGHCINLPVRYTCICYEGYRFSEQQRKCVDIDECTQVQHLCSQGRCENTEGSFLCICPAGFMASEEGTNCIDVDECLRPDVCGEGHCVNTVGAFRCEYCDSGYRMTQRGRCEDIDECLNPSTCPDEQCVNSPGSYQCVPCTEGFRGWNGQCLDVDECLEPNVCANGDCSNLEGSYMCSCHKGYTRTPDHKHCRDIDECQQGNLCVNGQCKNTEGSFRCTCGQGYQLSAAKDQCEDIDECQHRHLCAHGQCRNTEGSFQCVCDQGYRASGLGDHCEDINECLEDKSVCQRGDCINTAGSYDCTCPDGFQLDDNKTCQDINECEHPGLCGPQGECLNTEGSFHCVCQQGFSISADGRTCEDIDECVNNTVCDSHGFCDNTAGSFRCLCYQGFQAPQDGQGCVDVNECELLSGVCGEAFCENVEGSFLCVCADENQEYSPMTGQCRSRTSTDLDVDVDQPKEEKKECYYNLNDASLCDNVLAPNVTKQECCCTSGVGWGDNCEIFPCPVLGTAEFTEMCPKGKGFVPAGESSSEAGGENYKDADECLLFGQEICKNGFCLNTRPGYECYCKQGTYYDPVKLQCFDMDECQDPSSCIDGQCVNTEGSYNCFCTHPMVLDASEKRCIRPAESNEQIEETDVYQDLCWEHLSDEYVCSRPLVGKQTTYTECCCLYGEAWGMQCALCPLKDSDDYAQLCNIPVTGRRQPYGRDALVDFSEQYTPEADPYFIQDRFLNSFEELQAEECGILNGCENGRCVRVQEGYTCDCFDGYHLDTAKMTCVDVNECDELNNRMSLCKNAKCINTDGSYKCLCLPGYVPSDKPNYCTPLNTALNLEKDSDLE

SEQ ID NO: 9865 - protein, 1602 aa, Homo sapiens
MAGAWLRWGLLLWAGLLASSAHGRLRRITYVVHPGPGLAAGALPLSGPPRSRTFNVALNARYSRSSAAAGAPSRASPGVPSERTRRTSKPGGAALQGLRPPPPPPPEPARPAVPGGQLHPNPGGHPAAAPFTKQGRQVVRSKVPQETQSGGGSRLQVHQKQQLQGVNVCGGRCCHGWSKAPGSQRCTKPSCVPPCQNGGMCLRPQLCVCKPGTKGKACETIAAQDTSSPVFGGQSPGAASSWGPPEQAAKHTSSKKADTLPRVSPVAQMTLTLKPKPSVGLPQQIHSQVTPLSSQSVVIHHGQTQEYVLKPKYFPAQKGISGEQSTEGSFPLRYVQDQVAAPFQRETNKFSSQSVVVKFPPNIVNIHVKHPPEASVQIHQVSRIDGPTGQKTKEAQPGQSQVSYQGLPVQKTQTIHSTYSHQQVIPHVYPVAAKTQLGRCFQETIGSQCGKALPGLSKQEDCCGTVGTSWGFNKCQKCPKKPSYHGYNQMMECLPGYKRVNNTFCQDINECQLQGVCPNGECLNTMGSYRCTCKIGFGPDPTFSSCVPDPPVISEEKGPCYRLVSSGRQCMHPLSVHLTKQLCCCSVGKAWGPHCEKCPLPGTAAFKEICPGGMGYTVSGVHRRRPIHHHVGKGPVFVKPKNTQPVAKSTHPPPLPAKEEPVEALTFSREHGPGVAEPEVATAPPEKEIPSLDQEKTKLEPGQPQLSPGISTIHLHPQFPVVIEKTSPPVPVEVAPEASTSSASQVIAPTQVTEINECTVNPDICGAGHCINLPVRYTCICYEGYRFSEQQRKCVDIDECTQVQHLCSQGRCENTEGSFLCICPAGFMASEEGTNCIDVDECLRPDVCGEGHCVNTVGAFRCEYCDSGYRMTQRGRCEDIDECLNPSTCPDEQCVNSPGSYQCVPCTEGFRGWNGQCLDVDECLEPNVCANGDCSNLEGSYMCSCHKGYTRTPDHKHCRDIDECQQGNLCVNGQCKNTEGSFRCTCGQGYQLSAAKDQCEDIDECQHRHLCAHGQCRNTEGSFQCVCDQGYRASGLGDHCEDINECLEDKSVCQRGDCINTAGSYDCTCPDGFQLDDNKTCQDINECEHPGLCGPQGECLNTEGSFHCVCQQGFSISADGRTCEDIDECVNNTVCDSHGFCDNTAGSFRCLCYQGFQAPQDGQGCVDVNECELLSGVCGEAFCENVEGSFLCVCADENQEYSPMTGQCRSRTSTDLDVDVDQPKEEKKECYYNLNDASLCDNVLAPNVTKQECCCTSGVGWGDNCEIFPCPVLGTAEFTEMCPKGKGFVPAGESSSEAGGENYKDADECLLFGQEICKNGFCLNTRPGYECYCKQGTYYDPVKLQCFDMDECQDPSSCIDGQCVNTEGSYNCFCTHPMVLDASEKRCIRPAESNEQIEETDVYQDLCWEHLSDEYVCSRPLVGKQTTYTECCCLYGEAWGMQCALCPLKDSDDYAQLCNIPVTGRRQPYGRDALVDFSEQYTPEADPYFIQDRFLNSFEELQAEECGILNGCENGRCVRVQEGYTCDCFDGYHLDTAKMTCVDVNECDELNNRMSLCKNAKCINTDGSYKCLCLPGYVPSDKPNYCTPLNTALNLEKDSDLE

SEQ ID NO: 9866 - protein, 901 aa, Homo sapiens
MEAARPSGSWNGALCRLLLLTLAILIFASDACKNVTLHVPSKLDAEKLVGRVNLKECFTAANLIHSSDPDFQILEDGSVYTTNTILLSSEKRSFTILLSNTENQEKKKIFVFLEHQTKVLKKRHTKEKVLRRAKRRWAPIPCSMLENSLGPFPLFLQQVQSDTAQNYTIYYSIRGPGVDQEPRNLFYVERDTGNLYCTRPVDREQYESFEIIAFATTPDGYTPELPLPLIIKIEDENDNYPIFTEETYTFTIFENCRVGTTVGQVCATDKDEPDTMHTRLKYSIIGQVPPSPTLFSMHPTTGVITTTSSQLDRELIDKYQLKIKVQDMDGQYFGLQTTSTCIINIDDVNDHLPTFTRTSYVTSVEENTVDVEILRVTVEDKDLVNTANWRANYTILKGNENGNFKIVTDAKTNEGVLCVVKPLNYEEKQQMILQIGVVNEAPFSREASPRSAMSTATVTVNVEDQDEGPECNPPIQTVRMKENAEVGTTSNGYKAYDPETRSSSGIRYKKLTDPTGWVTIDENTGSIKVFRSLDREAETIKNGIYNITVLASDQGGRTCTGTLGIILQDVNDNSPFIPKKTVIICKPTMSSAEIVAVDPDEPIHGPPFDFSLESSTSEVQRMWRLKAINDTAARLSYQNDPPFGSYVVPITVRDRLGMSSVTSLDVTLCDCITENDCTHRVDPRIGGGGVQLGKWAILAILLGIALLFCILFTLVCGASGTSKQPKVIPDDLAQQNLIVSNTEAPGDDKVYSANGFTTQTVGASAQGVCGTVGSGIKNGGQETIEMVKGGHQTSESCRGAGHHHTLDSCRGGHTEVDNCRYTYSEWHSFTQPRLGEKVYLCNQDENHKHAQDYVLTYNYEGRGSVAGSVGCCSERQEEDGLEFLDNLEPKFRTLAEACMKR

SEQ ID NO: 9867 - protein, 847 aa, Homo sapiens
MEAARPSGSWNGALCRLLLLTLAILIFASDACKNVTLHVPSKLDAEKLVGRVNLKECFTAANLIHSSDPDFQILEDGSVYTTNTILLSSEKRSFTILLSNTENQEKKKIFVFLEHQTKVLKKRHTKEKVLRRAKRRWAPIPCSMLENSLGPFPLFLQQVQSDTAQNYTIYYSIRGPGVDQEPRNLFYVERDTGNLYCTRPVDREQYESFEIIAFATTPDGYTPELPLPLIIKIEDENDNYPIFTEETYTFTIFENCRVGTTVGQVCATDKDEPDTMHTRLKYSIIGQVPPSPTLFSMHPTTGVITTTSSQLDRELIDKYQLKIKVQDMDGQYFGLQTTSTCIINIDDVNDHLPTFTRTSYVTSVEENTVDVEILRVTVEDKDLVNTANWRANYTILKGNENGNFKIVTDAKTNEGVLCVVKPLNYEEKQQMILQIGVVNEAPFSREASPRSAMSTATVTVNVEDQDEGPECNPPIQTVRMKENAEVGTTSNGYKAYDPETRSSSGIRYKKLTDPTGWVTIDENTGSIKVFRSLDREAETIKNGIYNITVLASDQGGRTCTGTLGIILQDVNDNSPFIPKKTVIICKPTMSSAEIVAVDPDEPIHGPPFDFSLESSTSEVQRMWRLKAINDTAARLSYQNDPPFGSYVVPITVRDRLGMSSVTSLDVTLCDCITENDCTHRVDPRIGGGGVQLGKWAILAILLGIALLFCILFTLVCGASGTSKQPKVIPDDLAQQNLIVSNTEAPGDDKVYSANGFTTQTVGASAQGVCGTVGSGIKNGGQETIEMVKGGHQTSESCRGAGHHHTLDSCRGGHTEVDNCRYTYSEWHSFTQPRLGEESIRGHTLIKN

SEQ ID NO: 9868 - protein, 245 aa, Homo sapiens
MASPSRRLQTKPVITCFKSVLLIYTFIFWITGVILLAVGIWGKVSLENYFSLLNEKATNVPFVLIATGTVIILLGTFGCFATCRASAWMLKLYAMFLTLVFLVELVAAIVGFVFRHEIKNSFKNNYEKALKQYNSTGDYRSHAVDKIQNTLHCCGVTDYRDWTDTNYYSEKGFPKSCCKLEDCTPQRDADKVNNEGCFIKVMTIIESEMGVVAGISFGVACFQLIGIFLAYCLSRAITNNQYEIV

SEQ ID NO: 9869 - protein, 941 aa, Homo sapiens
MEDELKSELLKRWDLSAREESGAGARPRRRSADSGAAGAGRGGGGEAAGKEEEGESRSRRASMGRLASRPLLLALLSLALCRGRVVRVPTATLVRVVGTELVIPCNVSDYDGPSEQNFDWSFSSLGSSFVELASTWEVGFPAQLYQERLQRGEILLRRTANDAVELHIKNVQPSDQGHYKCSTPSTDATVQGNYEDTVQVKVLADSLHVGPSARPPPSLSLREGEPFELRCTAASASPLHTHLALLWEVHRGPARRSVLALTHEGRFHPGLGYEQRYHSGDVRLDTVGSDAYRLSVSRALSADQGSYRCIVSEWIAEQGNWQEIQEKAVEVATVVIQPSVLRAAVPKNVSVAEGKELDLTCNITTDRADDVRPEVTWSFSRMPDSTLPGSRVLARLDRDSLVHSSPHVALSHVDARSYHLLVRDVSKENSGYYYCHVSLWAPGHNRSWHKVAEAVSSPAGVGVTWLEPDYQVYLNASKVPGFADDPTELACRVVDTKSGEANVRFTVSWYYRMNRRSDNVVTSELLAVMDGDWTLKYGERSKQRAQDGDFIFSKEHTDTFNFRIQRTTEEDRGNYYCVVSAWTKQRNNSWVKSKDVFSKPVNIFWALEDSVLVVKARQPKPFFAAGNTFEMTCKVSSKNIKSPRYSVLIMAEKPVGDLSSPNETKYIISLDQDSVVKLENWTDASRVDGVVLEKVQEDEFRYRMYQTQVSDAGLYRCMVTAWSPVRGSLWREAATSLSNPIEIDFQTSGPIFNASVHSDTPSVIRGDLIKLFCIITVEGAALDPDDMAFDVSWFAVHSFGLDKAPVLLSSLDRKGIVTTSRRDWKSDLSLERVSVLEFLLQVHGSEDQDFGNYYCSVTPWVKSPTGSWQKEAEIHSKPVFITVKMDVLNAFKYPLLIGVGLSTVIGLLSCLIGYCSSHWCCKKEVQETRRERRRLMSMEMD

SEQ ID NO: 9870 - protein, 544 aa, Homo sapiens
MASEELYEVERIVDKRKNKKGKTEYLVRWKGYDSEDDTWEPEQHLVNCEEYIHDFNRRHTEKQKESTLTRTNRTSPNNARKQISRSTNSNFSKTSPKALVIGKDHESKNSQLFAASQKFRKNTAPSLSSRKNMDLAKSGIKILVPKSPVKSRTAVDGFQSESPEKLDPVEQGQEDTVAPEVAAEKPVGALLGPGAERARMGSRPRIHPLVPQVPGPVTAAMATGLAVNGKGTSPFMDALTANGTTNIQTSVTGVTASKRKFIDDRRDQPFDKRLRFSVRQTESAYRYRDIVVRKQDGFTHILLSTKSSENNSLNPEVMREVQSALSTAAADDSKLVLLSAVGSVFCCGLDFIYFIRRLTDDRKRESTKMAEAIRNFVNTFIQFKKPIIVAVNGPAIGLGASILPLCDVVWANEKAWFQTPYTTFGQSPDGCSTVMFPKIMGGASANEMLLSGRKLTAQEACGKGLVSQVFWPGTFTQEVMVRIKELASCNPVVLEESKALVRCNMKMELEQANERECEVLKKIWGSAQGMDSMLKYLQRKIDEF

SEQ ID NO: 9871 - protein, 598 aa, Homo sapiens [sequence omitted]

SEQ ID NO: 9872 - protein, 128 aa, Homo sapiens
MDKQNSQMNASHPETNLPVGYPPQYPPTAFQGPPGYSGYPGPQVSYPPPPAGHSGPGPAGFPVPNQPVYNQPVYNQPVGAAGVPWMPAPQPPLNCPPGLEYLSQVISKTQNTHKKQNCASSLLNQISK

SEQ ID NO: 9873 - protein, 318 aa, Homo sapiens
MDKQNSQMNASHPETNLPVGYPPQYPPTAFQGPPGYSGYPGPQVSYPPPPAGHSGPGPAGFPVPNQPVYNQPVYNQPVGAAGVPWMPAPQPPLNCPPGLEYLSQIDQILIHQQIELLEVLTGFETNNKYEIKNSFGQRVYFAAEDTDCCTRNCCGPSRPFTLRIIDNMGQEVITLERPLRCSSCCCPCCLQEIEIQAPPGVPIGYVIQTWHPCLPKFTIQNEKREDVLKISGPCVVCSCCGDVDFEIKSLDEQCVVGKISKHWTGILREAFTDADNFGIQFPLDLDVKMKAVMIGACFLIDFMFFESTGSQEQKSGVW

SEQ ID NO: 9874 - protein, 309 aa, Homo sapiens
MDALTANGTTNIQTSVTGVTASKRKFIDDRRDQPFDKRLRFSVRQTESAYRYRDIVVRKQDGFTHILLSTKSSENNSLNPEVMREVQSALSTAAADDSKLVLLSAVGSVFCCGLDFIYFIRRLTDDRKRESTKMAEAIRNFVNTFIQFKKPIIVAVNGPAIGLGASILPLCDVVWANEKAWFQTPYTTFGQSPDGCSTVMFPKIMGGASANEMLLSGRKLTAQEACGKGLVSQVFWPGTFTQEVMVRIKELASCNPVVLEESKALVRCNMKMELEQANERECEVLKKIWGSAQGMDSMLKYLQRKIDEF

SEQ ID NO: 9875 - protein, 1046 aa, Homo sapiens
TALPRSHDNDTGGRVAWRAKCRLQQVSDCSALAEAPDLGASRVWLLFLRLPLGQLPKPAGTRRVKMVHHSGSIQSFKQQKGMNISKSEITKETSLKPSRRSLPCLAQSYAYSKSLSQSTSLFQSTESESQAPTSITLISTDKAEQVNTEENKNDSVLRCSFADLSDFCLALGKDKDYTDESEHATYDRSRLINDFVIKDKSEFKTKLSKNDMNYIASSGPLFKDGKKRIDYILVYRKTNIQYDKRNTFEKNLRAEGLMLEKEPAIASPDIMFIKIHIPWDTLCKYAERLNIRMPFRKKCYYTDGRSKSMGRMQTYFRRIKNWMAQNPMVLDKSAFPDLEESDCYTGPFSRARIHHFIINNKDTFFSNATRSRIVYHMLERTKYENGISKVGIRKLINNGSYIAAFPPHEGAYKSSQPIKTHGPQNNRHLLYERWARWGMWYKHQPLDLIRLYFGEKIGLYFAWLGWYTGMLIPAAIVGLCVFFYGLFTMNNSQVSQEICKATEVFMCPLCDKNCSLQRLNDSCIYAKVTYLFDNGGTVFFAIFMAIWATVFLEFWKRRRSILTYTWDLIEWEEEEETLRPQFEAKYYKMEIVNPITGKPEPHQPSSDKVTRLLVSVSGIFFMISLVITAVFGVVVYRLVVMEQFASFKWNFIKQYWQFATSAAAVCINFIIIMLLNLAYEKIAYLLTNLEYPRTESEWENSFALKMFLFQFVNLNSSIFYIAFFLGRFVGHPGKYNKLFDRWRLEECHPSGCLIDLCLQMGVIMFLKQIWNNFMELGYPLIQNWWSRHKIKRGIHDASIPQWENDWNLQPMNLHGLMDEYLEMVLQFGFTTIFVAAFPLAPLLALLNNIIEIRLDAYKFVTQWRRPLPARATDIGIWLGILEGIGILAVITNAFVIAITSDYIPRFVYEYKYGPCANHVEPSENCLKGYVNNSLSFFDLSELGMGKSGYCRYRDYRGPPWSSKPYEFTLQYWHILAARLAFIIVFEHLVFGIKSFIAYLIPDVPKGLHDRIRREKYLVQEMMYEAELEHLQQQRRKSGQPVHHEWP

SEQ ID NO: 9876 - protein, 715 aa, Homo sapiens
MHLLPALAGVLATLVLAQPCEGTDPASPGAVETSVLRDCIAEAKLLVDAAYNWTQKSIKQRLRSGSASPMDLLSYFKQPVAATRTVVRAADYMHVALGLLEEKLQPQRSGPFNVTDVLTEPQLRLLSQASGCALRDQAERCSDKYRTITGRCNNKRRPLLGASNQALARWLPAEYEDGLSLPFGWTPSRRRNGFLLPLVRAVSNQIVRFPNERLTSDRGRALMFMQWGQFIDHDLDFSPESPARVAFTAGVDCERTCAQLPPCFPIKIPPNDPRIKNQRDCIPFFRSAPSCPQNKNRVRNQINALTSFVDASMVYGSEVSLSLRLRNRTNYLGLLAINQRFQDNGRALLPFDNLHDDPCLLTNRSARIPCFLAGDTRSTETPKLAAMHTLFMREHNRLATELRRLNPRWNGDKLYNEARKIMGAMVQIITYRDFLPLVLGKARARRTLGHYRGYCSNVDPRVANVFTLAFRFGHTMLQPFMFRLDSQYRASAPNSHVPLSSAFFASWRIVYEGGIDPILRGLMATPAKLNRQDAMLVDELRDRLFRQVRRIGLDLAALNMQRSRDHGLPGYNAWRRFCGLSQPRNLAQLSRVLKNQDLARKFLNLYGTPDNIDIWIGAIAEPLLPGARVGPLLACLFENQFRRARDGDRFWWQKRGVFTKRQRKALSRISLSRIICDNTGITTVSRDIFRANIYPRGFVNCSRIPRLNLSAWRGT

SEQ ID NO: 9877 - protein, 466 aa, Homo sapiens
  VARIANT 94, 329: Xaa = Any Amino Acid
MALLTAAARLLGTKNASCLVLAAQHASASSMNLKDILADLIPKEQARIKTFRQQHGKKVVGQITVDMMYGGMRGMKGLVYETSVLDPDEGIRFXGFSIPECQKLLPKAKGGEEPLPEGLFWLLVTGCIPTEEQVSWLSKEWAKRAALPSHVVTMLDNFPTNLHPMSQLSAAVTALNSESNFAQAYARGISRTQYWELIYEDSVDLITKLPCVAAKIYRNLYGEGSGIGAIDSNLDWSHSFTNMLGYTDHQFPELMHLYLTIHSDHEGGNVSAHTSHLVGSGLSDPYLSFAAAMNGLAGPLHGLANQEVLVWLTQLQKEVGKDVSDEKLXDYIWNTLNSGRAVPGYGHAVLRKTDPRYTCQREFALKHLPNDPMFKLVAQLCKIVPNVLLEQGKAKNPWPNVDAHSGVLLQYYGMMEMNYYTVLFGVSRALGVLAQLIWSRALGFPLERPKSMSTEGLMKFVDSKSG

SEQ ID NO: 9878 - protein, 267 aa, Homo sapiens
MTLGRRLACLFLACVLPALLLGGTALASEIVGGRRARPHAWPFMVSLQLRGGHFCGATLIAPNFVMSAAHCVANVNVRAVRVVLGAHNLSRREPTRQVFAVQRIFENGYDPVNLLNDIVILQLNGSATINANVQVAQLPAQGRRLGNGVQCLAMGWGLLGRNRGIASVLQELNVTVVTSLCRRSNVCTLVRGRQAGVCFGDSGSPLVCNGLIHGIASFVRGGCASGLYPDAFAPVAQFVNWIDSIIQRSEDNPCPHPRDPDPASRTH

SEQ ID NO: 9879 - protein, 1111 aa, Homo sapiens
MPALWLGCCLCFSLLLPAARATSRREVCDCNGKSRQCIFDRELHRQTGNGFRCLNCNDNTDGIHCEKCKNGFYRHRERDRCLPCNCNSKGSLSARCDNSGRCSCKPGVTGARCDRCLPGFHMLTDAGCTQDQRLLDSKCDCDPAGIAGPCDAGRCVCKPAVTGERCDRCRSGYYNLDGGNPEGCTQCFCYGHSASCRSSAEYSVHKITSTFHQDVDGWKAVQRNGSPAKLQWSQRHQDVFSSAQRLDPVYFVAPAKFLGNQQVSYGQSLSFDYRVDRGGRHPSAHDVILEGAGLRITAPLMPLGKTLPCGLTKTYTFRLNEHPSNNWSPQLSYFEYRRLLRNLTALRIRATYGEYSTGYIDNVTLISARPVSGAPAPWVEQCICPVGYKGQFCQDCASGYKRDSARLGPFGTCIPCNCQGGGACDPDTGDCYSGDENPDIECADCPIGFYNDPHDPRSCKPCPCHNGFSCSVMPETEEVVCNNCPPGVTGARCELCADGYFGDPFGEHGPVRPCQPCQCNNNVDPSASGNCDRLTGRCLKCIHNTAGIYCDQCKAGYFGDPLAPNPADKCRACNCNPMGSEPVGCRSDGTCVCKPGFGGPNCEHGAFSCPACYNQVKIQMDQFMQQLQRMEALISKAQGGDGVVPDTELEGRMQQAEQALQDILRDAQISEGASRSLGLQLAKVRSQENSYQSRLDDLKMTVERVRALGSQYQNRVRDTHRLITQMQLSLAESEASLGNTNIPASDHYVGPNGFKSLAQEATRLAESHVESASNMEQLTRETEDYSKQALSLVRKALHEGVGSGSGSPDGAVVQGLVEKLEKTKSLAQQLTREATQAEIEADRSYQHSLRLLDSVSRLQGVSDQSFQVEEAKRIKQKADSLSTLVTRHMDEFKRTQKNLGNWKEEAQQLLQNGKSGREKSDQLLSRANLAKSRAQEALSMGNATFYEVESILKNLREFDLQVDNRKAEAEEAMKRLSYISQKVSDASDKTQQAERALGSAAADAQRAKNGAGEALEISSEIEQEIGSLNLEANVTADGALAMEKGLASLKSEMREVEGELERKELEFDTNMDAVQMVITEAQKVDTRAKNAGVTIQDTLNTLDGLLHLMGM

SEQ ID NO: 9880 - protein, 1193 aa, Homo sapiens
MPALWLGCCLCFSLLLPAARATSRREVCDCNGKSRQCIFDRELHRQTGNGFRCLNCNDNTDGIHCEKCKNGFYRHRERDRCLPCNCNSKGSLSARCDNSGRCSCKPGVTGARCDRCLPGFHMLTDAGCTQDQRLLDSKCDCDPAGIAGPCDAGRCVCKPAVTGERCDRCRSGYYNLDGGNPEGCTQCFCYGHSASCRSSAEYSVHKITSTFHQDVDGWKAVQRNGSPAKLQWSQRHQDVFSSAQRLDPVYFVAPAKFLGNQQVSYGQSLSFDYRVDRGGRHPSAHDVILEGAGLRITAPLMPLGKTLPCGLTKTYTFRLNEHPSNNWSPQLSYFEYRRLLRNLTALRIRATYGEYSTGYIDNVTLISARPVSGAPAPWVEQCICPVGYKGQFCQDCASGYKRDSARLGPFGTCIPCNCQGGGACDPDTGDCYSGDENPDIECADCPIGFYNDPHDPRSCKPCPCHNGFSCSVMPETEEVVCNNCPPGVTGARCELCADGYFGDPFGEHGPVRPCQPCQCNNNVDPSASGNCDRLTGRCLKCIHNTAGIYCDQCKAGYFGDPLAPNPADKCRACNCNPMGSEPVGCRSDGTCVCKPGFGGPNCEHGAFSCPACYNQVKIQMDQFMQQLQRMEALISKAQGGDGVVPDTELEGRMQQAEQALQDILRDAQISEGASRSLGLQLAKVRSQENSYQSRLDDLKMTVERVRALGSQYQNRVRDTHRLITQMQLSLAESEASLGNTNIPASDHYVGPNGFKSLAQEATRLAESHVESASNMEQLTRETEDYSKQALSLVRKALHEGVGSGSGSPDGAVVQGLVEKLEKTKSLAQQLTREATQAEIEADRSYQHSLRLLDSVSRLQGVSDQSFQVEEAKRIKQKADSLSTLVTRHMDEFKRTQKNLGNWKEEAQQLLQNGKSGREKSDQLLSRANLAKSRAQEALSMGNATFYEVESILKNLREFDLQVDNRKAEAEEAMKRLSYISQKVSDASDKTQQAERALGSAAADAQRAKNGAGEALEISSEIEQEIGSLNLEANVTADGALAMEKGLASLKSEMREVEGELERKELEFDTNMDAVQMVITEAQKVDTRAKNAGVTIQDTLNTLDGLLHLMDQPLSVDEEGLVLLEQKLSRAKTQINSQLRPMMSELEERARQQRGHLHLLETSIDGILADVKNLENIRDNLPPGCYNTQALEQQ

SEQ ID NO: 9881 - protein, 576 aa, Homo sapiens
PQEPALKSEFSQVASNTIPLPLPQPNTCKDNGPCKQVCSTVGGSAICSCFPGYAIMADGVSCEDQDECLMGAHDCSRRQFCVNTLGSFYCVNHTVLCADGYILNAHRKCVDINECVTDLHTCSRGEHCVNTLGSFHCYKALTCEPGYALKDGECEDVDECAMGTHTCQPGFLCQNTKGSFYCQARQRCMDGFLQDPEGNCVDINECTSLSEPCRPGFSCINTVGSYTCQRNPLICARGYHASDDGTKCVDVNECETGVHRCGEGQVCHNLPGSYRCDCKAGFQRDAFGRGCIDVNECWASPGRLCQHTCENTLGSYRCSCASGFLLAADGKRCEDVNECEAQRCSQECANIYGSYQCYCRQGYQLAEDGHTCTDIDECAQGAGILCTFRCLNVPGSYQCACPEQGYTMTANGRSCKDVDECALGTHNCSEAETCHNIQGSFRCLRFECPPNYVQVSKTKCERTTCHDFLECQNSPARITHYQLNFQTGLLVPAHIFRIGPAPAFTGDTIALNIIKGNEEGYFGTRRLNAYTGVVYLQRAVLEPRDFALDVEMKLWRQGSVTTFLAKMHIFFTTFAL

SEQ ID NO: 9882 - protein, 1184 aa, Homo sapiens
MVLLWEPAGAWLALGLALALGPSVAAAAPRQDCTGVECPPLENCIEEALEPGACCATCVQQGCACEGYQYYDCLQGGFVRGRVPAGQSYFVDFGSTECSCPPGGGKISCQFMLCPELPPNCIEAVVVADSCPQCGQVGCVHAGHEYAAGHTVHLPPCRACHCPDAGGELICYQLPGCHGNFSDAEEGDPERHYEDPYSYDQEVAEVEAATALGGEVQAGAVQAGAGGPPAALGGGSQPLSTIQAPPWPAVLPRPTAAAALGPPAPVQAKARRVTEDSEEEEEEEEEREEMAVTEQLAAGGHRGLDGLPTTAPAGPSLPIQEERAEAGARAEAGARPEENLILDAQATSRSTGPEGVTHAPSLGKAALVPTQAVPGSPRDPVKPSPHNILSTSLPDAAWIPPTREVPRKPQVLPHSHVEEDTDPNSVHSIPRSSPEGSTKDLIETCCAAGQQWAIDNDECLEIPESGTEDNVCRTAQRHCCVSYLQEKSCMAGVLGAKEGETCGAEDNDSCGISLYKQCCDCCGLGLRVRAEGQSCESNPNLGYPCNHVMLSCCEGEEPLIVPEVRRPPEPAAAPRRVSEAEMAGREALSLGTEAELPNSLPGDDQDECLLLPGELCQHLCINTVGSYHCACFPGFSLQDDGRTCRPEGHPPQPEAPQEPALKSEFSQVASNTIPLPLPQPNTCKDNGPCKQVCSTVGGSAICSCFPGYAIMADGVSCEDINECVTDLHTCSRGEHCVNTLGSFHCYKALTCEPGYALKDGECEDVDECAMGTHTCQPGFLCQNTKGSFYCQARQRCMDGFLQDPEGNCVDINECTSLSEPCRPGFSCINTVGSYTCQRNPLICARGYHASDDGAKCVDVNECETGVHRCGEGQVCHNLPGSYRCDCKAGFQRDAFGRGCIDVNECWASPGRLCQHTCENTLGSYRCSCASGFLLAADGKRCEDVNECEAQRCSQECANIYGSYQCYCRQGYQLAEDGHTCTDIDECAQGAGILCTFRCLNVPGSYQCACPEQGYTMTANGRSCKDVDECALGTHNCSEAETCHNIQGSFRCLRFECPPNYVQVSKTKCERTTCHDFLECQNSPARITHYQLNFQTGLLVPAHIFRIGPAPAFTGDTIALNIIKGNEEGYFGTRRLNAYTGVVYLQRAVLEPRDFALDVEMKLWRQGSVTTFLAKMHIFFTTFAL

SEQ ID NO: 9883 - protein, 346 aa, Homo sapiens
MFLSILVALCLWLHLALGVRGAPCEAVRIPMCRHMPWNITRMPNHLHHSTQENAILAIEQYEELVDVNCSAVLRFFFCAMYAPICTLEFLHDPIKPCKSVCQRARDDCEPLMKMYNHSWPESLACDELPVYDRGVCISPEAIVTDLPEDVKWIDITPDMMVQERPLDVDCKRLSPDRCKCKKVKPTLATYLSKNYSYVIHAKIKAVQRSGCNEVTTVVDVKEIFKSSSPIPRTQVPLITNSSCQCPHILPHQDVLIMCYEWRSRMMLLENCLVEKWRDQLSKRSIQWEERLQEQRRTVQDKKKTAGRTSRSNPPKPKGKPPAPKPASPKKNIKTRSAQKRTNPKRV

SEQ ID NO: 9884 - protein, 346 aa, Homo sapiens
  VARIANT 80: Xaa = Any Amino Acid
MDPARKAGAQAMIWTAGWLLLLLLRGGAQALECYSCVQKADDGCSPNKMKTVKCAPGVDVCTEAVGAVETIHGQFSLAVXGCGSGLPGKNDRGLDLHGLLAFIQLQQCAQDRCNAKLNLTSRALDPAGNESAYPPNGVECYSCVGLSREACQGTSPPVVSCYNASDHVYKGCFDGNVTLTAANVTVSLPVRGCVQDEFCTRDGVTGPGFTLSGSCCQGSRCNSDLRNKTYFSPRIPPLVRLPPPEPTTVASTTSVTTSTSAPVRPTSTTKPMPAPTSQTPRQGVEHEASRDEEPRLTGGAAGHQDRSNSGQYPAKGGPQQPHNKGCVAPTAGLAALLLAVAAGVLL

SEQ ID NO: 9885 - protein, 486 aa, Homo sapiens
HVYTRAAVAADAKQCSKIGRDALRDGGSAVDAAIAALLCVGLMNAHSMGIGGGLFLTIYNSTTLRDCAWDAACERSRCPPLRVTNYGSLSPGGLSVAVPGEIRGYELAHQRHGRLPWARLFQPSIQLARQGFPVGKGLAAALENKRTVIEQQPVLCEVFCRDRKVLREGERLTLPQLADTYETLAIEGAQAFYNGSLTAQIVKDIQAAGGIVTAEDLNNYRAELIEHPLNISLGDVVLYMPSAPLSGPVLALILNILKGYNFSRESVESPEQKGLTYHRIVEAFRFAYAKRTLLGDPKPALGSRQVVRNMTSEFFAAQLRAQISDDTTHPISYYKPEFYTPDDGGTAHLSVVAEDGSAVSATSTINLYFGSKVRSPVSGILFNNEMDDFSSPSITNEFGVPPSPANFIQPGKQPLSSMCPTIMVGQDGQVRMVVGAAGGTQITTATALAIIYNLWFGYDVKRAVEEPRLHNQLLPNVTTVERNIDQ

SEQ ID NO: 9886 - protein, 252 aa, Homo sapiens
MTSEFFAAQLRAQISDDTTHPISYYKPEFYTPVDGGTAHLSVVAEDGSAVSATSTINLYFGSKVRSPVSEILFNDEMDDFSSPNITNEFGVPPSPANFIQPGKQPLSSMCPTIMVGQDGQVRMVVGAAGGTQITTATALICVTPFLPGRAHPAQPPSHADHTPMPQAIIYNLWFGYDVKRAVEEPRLHNQLLPNVTTVERNIDQAVTAALETRHHHTQIASTFIAVVQAIVRTAGGWAAASDSRKGGEPAGY

SEQ ID NO: 9887 - protein, 252 aa, Homo sapiens
MTSEFFSAQLRAQISDDTTHPISYYKPEFYMPDDGGTAHLSVVAEDGSAVSATSTINLYFGSKVRSPVSGILLNNEMDDFSSTSITNEFGVPPSPANFIQPGKQPLSSMCPTIMVGQDGQVRMVVGAAGGTQITMATALVCVTPFLPGRAHPAQPPSHADHTPMPQAIIYNLWFGYDVKWAVEEPRLHNQLLPNVTTVERNIDQEVTAALETRHHHTQITSTFIAVVQAIVRMAGGWAAASDSRKGGEPAGY

SEQ ID NO: 9888 - protein, 225 aa, Homo sapiens
MTSEFFAAQLRAQISDDTTHPISYYKPEFYTPDDGGTAHLSVVAEDGSAVSATSTINLYFGSKVRSPVSGILFNNEMDDFSSPSITNEFGVPPSPANFIQPGKQPLSSMCPTIMVGQDGQVRMVVGAAGGTQITTATALAIIYNLWFGYDVKRAVEEPRLHNQLLPNVTTVERNIDQAVTAALETRHHHTQIASTFIAVVQAIVRTAGGWAAASDSRKGGEPAGY

SEQ ID NO: 9889 - protein, 199 aa, Homo sapiens [sequence omitted]

SEQ ID NO: 9890 - protein, 251 aa, Homo sapiens
MTSEFFAAQLRAQISDDTTHPISYYKPEFYTPVDGGTAHLSVVAEDGSAVSTTSTINLYFGSKVRSPVSGILFNDEMDDFSSPNITNEFGVPPPANFIQPGKQPLSSMCPTIMVGQDGQVRMVVGAAGGTQITTATALICVTAFLPGRAHPAQPPSHADHTPMPQAIIYNLWFGYDVKRAVEEPRLHNQLLPNVTTVERNIDQAVTAALETRHHHTQIASTFIAVVQAIVHTAGGWAAASDSRKGGEPAGY

SEQ ID NO: 9891 - protein, 225 aa, Homo sapiens
MTSEFFAAQLRAQISDDTTHPISYYKPEFYTPVDGGTAHLSVVAEDGSAVSATSTINLYFGSKVRSPVSEILFNDEMDDFSSPNITNEFGVPPSPANFIQPGKQPLSSMCPTIMVGQDGQVRMVVGAAGGTQITTATALAIIYNLWFGYDVKRAVEEPRLHNQLLPNVTTVERNIDQAVTAALETRHHHTQIASTFIAVVQAIVRTAGGWAAASDSRKGGEPAGY

SEQ ID NO: 9892 - protein, 225 aa, Homo sapiens
MTSEFFSAQLRAQISDDTTHPISYYKPEFYMPDDGGTAHLSVVAEDGSAVSATSTINLYFGSKVRSPVSGILLNNEMDDFSSTSITNEFGVPPSPANFIQPGKQPLSSMCPTIMVGQDGQVRMVVGAAGGTQITMATALAIIYNLWFGYDVKWAVEEPRLHNQLLPNVTTVERNIDQEVTAALETRHHHTQITSTFIAVVQAIVRMAGGWAAASDSRKGGEPAGY

SEQ ID NO: 9893 - protein, 221 aa, Homo sapiens
  VARIANT 23: Xaa = Any Amino Acid
MESVMERHLPGILLLTTLSRDMXGKAFIFPQESATVYVSLIPKVKKPLKNFKLCLKTFTDFTCPYSLFYSTRSQDNELLLLVNKMGMYLLHIGNAAVTFNGPTPCPRSPYASTHVNVSWESASGIATLWANGKLVGRKGVWKGYSVGEEAKIILGQEQDSFGGHFDENQSFVGVIWDVFLWDHVLPPKEMCDSCYSGSLLNRHTLTYEDNGYVVTKPKVWA

SEQ ID NO: 9894 - protein, 629 aa, Homo sapiens
MAISPRSDATFSSQKSTPSESPRTKKFPLTEEEIFYMNCRAAYLTVFKSSLENIISKDQLYLALQHAGRNPSQKTINKYWTPQTAKLNFDDFCIILRKEKPTSKAELLKSFKQLDVNDDGCILHTDLYKFLTKRGEKMTREEVNAIINLADVNADGKFDYIKFCKLYMTTNEQCLKTTLEKLEVDSKLMRHQFGNHIEGSPERDPSPVPKPSPKITRKTDPETFLNKGDTRSSLLSATRKFKTSVSFIVTMGANGNRNSKLTEPNLIKDWQHMQSKGCFFLEEDGEIISHQYRMQIAQRSMVYLTIKPLNLSQVEGKPSPWLSVDTALYILKENESQANLQLVCFTELRNREVFGWTGELGPGIYWLIPSTTGCKLRKKIKPVTDEAQLVYRDETGELFLTKEFKSTLSDIFEVIDLDGNGLLSLEEYNFFELRTSGEKCDEDAWAVCRENFDTKRNELTRQGFMDLNLMEANDREGDPCDLWVTLHSMGYNKALELTEACPFVIDIYAEKCKPKIKAVHMEACSGQLEKAICKSVLSNGDAKVMDGYENIIVHTYSCDTWITSVIENKSDEKVIIHISNELSKNCINNRGLNIFAVEVGPKSTMVCQHVMPLNERQEWIYYCIYSLIS

SEQ ID NO: 9895 - protein, 610 aa, Homo sapiens
ARIRMAISPRSDATFSSQKSTPSESPRTKKFPLTEEEIFYMNCRAAYLTVFKSSLENIISKDQLYLALQHAGRNPSQKTINKYWTPQTAKLNFDDFCIILRKEKPTSKAELLKSFKQLDVNDDGCILHTDLYKFLTKRGEKMTREEVNAIINLADVNADGKFDYIKFCKLYMTTNEQCLKTTLEKLEVDSKLMRHQFGNHIEGSPERDPSPVPKPSPKITRKTDPETFLNKGDTRSSLLSATRKFKTSVSFTVTMGANGNRNSKLMEPNLIKDWQHMQSKGCFFLEEDGEIISHQYRMQIAQRSMVYLTIKPLNLSQVEGKPSPWLSVDTALYILKENESQANLQLVCFTELRNREVFGWTGELGPGIYWLIPSTTGCRLRKKIKPVTDEAQLVYRDETGELFLTKEFKSTLSDIFEVIDLDGNGLLSLEEYNFFELRTSGEKCDEDAWAVCRENFDTKRNELTRQGFMDLNLMEANDREGDPCDLWVTLHSMGYNKALELTEACPFVIDIYAEKCKPKIKAVHMEACSGQLEKAICKSVLSNGDAKVMDGYENIIVHTYSCDTWITSVIENKSDEKVIIHISNELSKNCINNRGLNIFAVEVGPKSTMP

SEQ ID NO: 9896 - protein, 426 aa, Homo sapiens
MANDSGGPGGPSPSERDRQYCELCGKMENLLRCSRCRSSFYCCKEHQRQDWKKHKLVCQGSEGALGHGVGPHQHSGPAPPAAVPPPRAGAREPRKAAARRDNASGDAAKGKVKAKPPADPAAAASPCRAAAGGQGSAVAAEAEPGKEEPPARSSLFQEKANLYPPSNTPGDALSPGGGLRPNGQTKPLPALKLALEYIVPCMNKHGICVVDDFLGKETGQQIGDEVRALHDTGKFTDGQLVSQKSDSSKDIRGDKITWIEGKEPGCETIGLLMSSMDDLIRHCNGKLGSYKINGRTKAMVACYPGNGTGYVRHVDNPNGDGRCVTCIYYLNKDWDAKVSGGILRIFPEGKAQFADIEPKFDRLLFFWSDRRNPHEVQPAYATRYAITVWYFDADERARAKVKYLTGEKGVRVELNKPSDSVGKDVF

SEQ ID NO: 9897 - protein, 404 aa, Homo sapiens
MANDSGGPGGPSPSERDRQYCELCGKMENLLRCSRCRSSFYCCKEHQRQDWKKHKLVCQGSEGALGHGVGPHQHSGPAPPAAVPPPRAGAREPRKAAARRDNASGDAAKGKVKAKPPADPAAAASPCRAAAGGQGSAVAAEAEPGKEEPPARSSLFQEKANLYPPSNTPGDALSPGGGLRPNGQTKPLPALKLALEYIVPCMNKHGICVVDDFLGKETGQQIGDEVRALHDTGKFTDGQLVSQKSDSSKDIRGDKITWIEGKEPGCETIGLLMSSMDDLIRHCNGKLGSYKINGRTKAMVACYPGNGTGYVRHVDNPNGDGRCVTCIYYLNKDWDAKFDRLLFFWSDRRNPHEVQPAYATRYAITVWYFDADERARAKVKYLTGEKGVRVELNKPSDSVGKDVF

SEQ ID NO: 9898 - protein, 3012 aa, Homo sapiens
MASQQDSGFFEISIKYLLKSWSNTSPVGNGYIKPPVPPASGTHREKGPPTMLPINVDPDSKPGEYVLKSLFVNFTTQAERKIRIIMAEPLEKPLTKSLQRGEDPQFDQVISSMSSLSEYCLPSILRTLFDWYKRQNGIEDESHEYRPRTSNKSKSDEQQRDYLMERRDLAIDFIFSLVLIEVLKQIPLHPVIDSLIHDVINLAFKHFKYKEGYLGPNTGNMHIVADLYAEVIGVLAQAKFPAVKKKFMAELKELRHKEQNPYVVQSIISLIMGMKFFRIKMYPVEDFEASLQFMQECAHYFLEVKDKDIKHALAGLFVEILVPVAAAVKNEVNVPCLRNFVESLYDTTLELSSRKKHSLALYPLVTCLLCVSQKQLFLNRWHIFLNNCLSNLKNKDPKMARVALESLYRLLWVYMIRIKCESNTATQSRLITIITTLFPKGSRGVVPRDMPLNIFVKIIQFIAQERLDFAMKEIIFDFLCVGKPAKAFSLNPERMNIGLRAFLVIADSLQQKDGEPPMPVTGAVLPSGNTLRVKKTYLSKTLTEEEAKMIGMSLYYSQVRKAVDNILRHLDKEVGRCMMLTNVQMLNKEPEDMITGERKPKIDLFRTCVAAIPRLLPDGMSKLELIDLLARLSIHMDDELRHIAQNSLQGLLVDFSDWREDVLFGFTNFLLREVNDMHHTLLDSSLKLLLQLLTQWKLVIQTQGKVYEQANKIRNSELIANGSSHRIQSERGPHCSVLHAVEGFALVLLCSFQVATRKLSVLILKEIRALFIALGQPEDDDRPMIDVMDQLSSSILESFIHVAVSDSATLPLTHNVDLQWLVEWNAVLVNSHYDVKSPSHVWIFAQSVKDPWVLCLFSFLRQENLPKHCPTALSYAWPYAFTRLQSVMPLVDPNSPINAKKTSTAGSGDNYVTLWRNYLILCFGVAKPSIMSPGHLRASTPEIMATTPDGTVSYDNKAIGTPSVGVLLKQLVPLMRLESIEITESLVLGFGRTNSLVFRELVEELHPLMKEALERRPENKKRRERRDLLRLQLLRIFELLADAGVISDSTNGALERDTLALGALFLEYVDLTRMLLEAENDKEVEILKDIRAHFSAMVANLIQCVPVHHRRFLFPQQSLRHHLFILFSQWAGPFSIMFTPLDRYSDRNHQITRYQYCALKAMSAVLCCGPVFDNVGLSPDGYLYKWLDNILACQDLRVHQLGCEVVVLLLELNPDQINLFNWAIDRCYTGSYQLASGCFKAIATVCGSRNYPFDIVTLLNLVLFKASDTNREIYEISMQLMQILEAKLFVYSKKVAEQRPGSILYGTHGPLPPLYSVSLALLSCELARMYPELTLPLFSGKPAIPHNTPQRAPDHAYLPAALAAQHRAGGQQAPPPGSSPSSPEDEVKDREGDVTASHGLRGNGWGSPEATSLVLNNLMYMTAKYGDEVPGPEMENAWNALANNEKWSNNLRITLQFLISLCGVSSDTVLLPYIKKVAIYLCRNNTIQTMEELLFELQQTEPVNPIVQHCDNPPFYRFTASSKASAAASGTTSSSNTVVAGQENFPDAEENKILKESDERFSNVIRAHTRLESRYSNSSGGSYDEDKNDPISPYTGWLLTITETKQPQPLPMPCTGGCWAPLVDYLPETITPRGPLHRCNIAVIFMTEMVVDHSVREDWALHLPLLLHAVFLGLDHYRPEVFEHSKKLLLHLLIALSCNSNFHSIASVLLQTREMGEAKTLTVQPAYQPEYLYTGGFDFLREDQSSPVPDSGLSSSSTSSSISLGGSSGNLPQMTQEVEDVDTAAETDEKANKLIEFLTTRAFGPLWCHEDITPKNQNSKSAEQLTNFLRHVVSVFKDSKSGFHLEHQLSEVALQTALASSSRHYAGRSFQIFRALKQPLSAHALSDLLSRLVEVIGEHGDEIQGYVMEALLTLEAAVDNLSDCLKNSDLLTVLSRSSSPDLSSSSKLTASRKSTGQLNMNPGTTSGNTATAERSRHQRSFSVPKKFGVIDRSSDPPRSATLDRIQACTQQGLSSKTRSSSSLKDSLTDPSHINHPTNLLATIFWVTVALMESDFEFEYLMALRLLSRLLAHMPLDKAENREKLEKLQAQLKWADFSGLQQLLLKGFTSLTTTDLTLQLFSLLTPVSKISMVDASHAIGFPLNVLCLLPQLIQHFENPNQFCKDIAERIAQVCLEEKNPKLSNLAHVMTLYKTHSYTRDCATWVNVVCRYLHEAYADITLNMVTYLAELLEKGLPSVQQPLLQVIYSLLSYMDLSVVPVKQFNVEVLKTIEKYVQSVHWREALNILKLVVSRSASLVLPSYQHSDLSKIEIHRVWTSASKELPGKTLDFHFDISETPIIGRRYDELQNSSGRDGKPRAMAVTRSTSSTSSGSNSNVLVPVSWKRPQYSQKRTKEKLVHVLSLCGQEVGLSKNPSVIFSSCGDLDLLEHQTSLVSSEDGAREQENMDDTNSEQQFRVFRDFDFLDVELEDGEGESMDNFNWGVRRRSLDSLDKCDMQILEERQLSGSTPSLNKMHHEDSDESSEEEDLTASQILEHSDLIMTLSPSEETNPMELLTTACDSTPAEPHSFNTRMSSFDASLPDMNNLQISEGSKAEAVREEEDTTVHEDDLSSSINELPAAFECSDSFSLDMTEGEEKGNRALDQFTLASFGEGDRGVSPPPSPFFSAILAAFQPAACDDAEEAWRSHINQLMCDSDGSCAVYTFHVFSSLFKNIQKRFCFLTCDAASYLGDNLRGIGSKFVSSSQMLTSCSECPTLFVDAETLLSCGLLDKLKFSVLELQEYLDTYNNRKEATLSWLANCKATFAGGSRDGVITCQPGDSEEKQLELCQRLYKLHFQLLLLFQSYCKLIGQVHEVSSMPELLNMSRELSDLKKHLKEASAVIAADPLYSDGAWSEPTFTSTEAAIQSMLECLKNNELGKALRQIRECRSLWPNDIFGSSSDDEVQTLLNIYFRHQTLGQTGTYALVGSNQSLTEICTKLMELNMEIRDMIRRAQSYRVLTTFLPDSSVSGTSL

SEQ ID NO: 9899 - protein, 1849 aa, Homo sapiens
GERKPKIDLFRTCVAAIPRLLPDGMSKLELIDLLARLSIHMDDELRHIAQNSLQGLLVDFSDWREDVLFGFTNFLLREVNDMHHTLLDSSLKLLLQLLTQWKLVIQTQGKVYEQANKIRNSELIANGSSHRIQSERGPHCSVLHAVEGFALVLLCSFQVATRKLSVLILKEIRALFIALGQPEDDDRPMIDVMDQLSSSILESFIHVAVSDSATLPLTHNVDLQWLVEWNAVLVNSHYDVKSPSHVWIFAQSVKDPWVLCLFSFLRQENLPKHCPTALSYAWPYAFTRLQSVMPLVDPNSPINAKKTSTAGSGDNYVTLWRNYLILCFGVAKPSIMSPGHLRASTPEIMATTPDGTVSYDNKAIGTPSVGVLLKQLVPLMRLESIEITESLVLGFGRTNSLVFRELVEELHPLMKEALERRPENKKRRERRDLLRLQLLRIFELLADAGVISDSTNGALERDTLALGALFLEYVDLTRMLLEAENDKEVEILKDIRAHFSAMVANLIQCVPVHHRRFLFPQQSLRHHLFILFSQWAGPFSIMFTPLDRYSDRNHQITRYQYCALKAMSAVLCCGPVFDNVGLSPDGYLYKWLDNILACQDLRVHQLGCEVVVLLLELNPDQINLFNWAIDRCYTGSYQLASGCFKAIATVCGSRNYPFDIVTLLNLVLFKASDTNREIYEISMQLMQILEAKLFVYSKKVAEQRPGSILYGTHGPLPPLYSVSLALLSCELARMYPELTLPLFSGKPAIPHNTPQRAPDHAYLPAALAAQHRAGGQQAPPPGSSPSSPEDEVKDREGDVTASHGLRGNGWGSPEATSLVLNNLMYMTAKYGDEVPGPEMENAWNALANNEKWSNNLRITLQFLISLCGVSSDTVLLPYIKKVAIYLCRNNTIQTMEELLFELQQTEPVNPIVQHCDNPPFYRFTASSKASAAASGTTSSSNTVVAGQENFPDAEENKILKESDERFSNVIRAHTRLESRYSNSSGGSYDEDKNDPISPYTGWLLTITETKQPQPLPMPCTGGCWAPLVDYLPETITPRGPLHRCNIAVIFMTEMVVDHSVREDWALHLPLLLHAVFLGLDHYRPEVFEHSKKLLLHLLIALSCNSNFHSIASVLLQTREMGEAKTLTVQPAYQPEYLYTGGFDFLREDQSSPVPDSGLSSSSTSSSISLGGSSGNLPQMTQEVEDVDTAAETDEKANKLIEFLTTRAFGPLWCHEDITPKNQNSKSAEQLTNFLRHVVSVFKDSKSGFHLEHQLSEVALQTALASSSRHYAGRSFQIFRALKQPLSAHALSDLLSRLVEVIGEHGDEIQGYVMEALLTLEAAVDNLSDCLKNSDLLTVLSRSSSPDLSSSSKLTASRKSTGQLNMNPGTTSGNTATAERSRHQRSFSVPKKFGVIDRSSDPPRSATLDRIQACTQQGLSSKTRSSSSLKDSLTDPSHINHPTNLLATIFWVTVALMESDFEFEYLMALRLLSRLLAHMPLDKAENREKLEKLQAQLKWADFSGLQQLLLKGFTSLTTTDLTLQLFSLLTPVSKISMVDASHAIGFPLNVLCLLPQLIQHFENPNQFCKDIAERIAQVCLEEKNPKLSNLAHVMTLYKTHSYTRDCATWVNVVCRYLHEAYADITLNMVTYLAELLEKGLPSVQQPLLQVIYSLLSYMDLSVVPVKQFNVEVLKTIEKYVQHSDLSKIEIHRVWTSASKELPGKTLDFHFDISETPIIGRRYDELQNSSGRDGKPRAMAVTRSTSSTSSGSNSNVLVPVSWKRPQYSQKRTKEKLVHVLSLCGQEVGLSKNPSVIFSSCGDLDLLEHQTSLVSSEDGAREQENMDDTNSEQQFRVFRDFDFLDVELEDGE

SEQ ID NO: 9900 - protein, 490 aa, Homo sapiens
MVRTDGHTLSEKRNYQVTNSMFGASRKKFVEGVDSDYHDENMYYSQSSMFPHRSEKDMLASPSTSGQLSQFGASLYGQQSALGLPMRGMSNNTPQLNRSLSQGTQLPSHVTPTTGVPTMSLHTPPSPSRGILPMNPRNMMNHSQVGQGIGIPSRTNSMSSSGLGSPNRSSPSIICMPKQQPSRQPFTVNSMSGFGMNRNQAFGMNNSLSSNIFNGTDGSENVTGLDLSDFPALPGSSYKDPTSSNDDSKSNLNTSGKTTSSTDGPKFPGDKSSTTQNNNQQKKGIQVLPDGRVTNIPQGMVTDQFGMIGLLTFIRAAETDPGMVHLALGSDLTTLGLNLNSPENLYPKFASPWASSPCRPQDIDFHVPSEYLTNIHIRDKLAAIKLGRYGEDLLFYLYYMNGGDVLQLLAAVELFNRDWRYHKEERVWITRAPGMEPTMKTNTYERGTYYFFDCLNWRKVAKEFHLEYDKLEERPHLPSTFNYNPAQQAF

SEQ ID NO: 9901 - protein, 540 aa, Homo sapiens
MVRTDGHTLSEKRNYQVTNSMFGASRKKFVEGVDSDYHDENMYYSQSSMFPHRSEKDMLASPSTSGQLSQFGASLYGQQSALGLPMRGMSNNTPQLNRSLSQGTQLPSHVTPTTGVPTMSLHTPPSPSRGILPMNPRNMMNHSQVGQGIGIPSRTNSMSSSGLGSPNRSSPSIICMPKQQPSRQPFTVNSMSGFGMNRNQAFGMNNSLSSNIFNGTDGSENVTGLDLSDFPALADRNRREGSGNPTPLINPLAGRAPYVGMVTKPANEQSQDFSIHNEDFPALPGSSYKDPTSSNDDSKSNLNTSGKTTSSTDGPKFPGDKSSTTQNNNQQKKGIQVLPDGRVTNIPQGMVTDQFGMIGLLTFIRAAETDPGMVHLALGSDLTTLGLNLNSPENLYPKFASPWASSPCRPQDIDFHVPSEYLTNIHIRDKLAAIKLGRYGEDLLFYLYYMNGGDVLQLLAAVELFNRDWRYHKEERVWITRAPGMEPTMKTNTYERGTYYFFDCLNWRKVAKEFHLEYDKLEERPHLPSTFNYNPAQQAF

SEQ ID NO: 9902 - protein, 465 aa, Homo sapiens
MAMTGSTPCSSMSNHTKERVTMTKVTLENFYSNLIAQHEEREMRQKKLEKVMEEEGLKDEEKRLRRSAHARKETEFLRLKRTRLGLEDFESLKVIGRGAFGEVRLVQKKDTGHVYAMKILRKADMLEKEQVGHIRAERDILVEADSLWVVKMFYSFQDKLNLYLIMEFLPGGDMMTLLMKKDTLTEEETQFYIAETVLAIDSIHQLGFIHRDIKPDNLLLDSKGHVKLSDFGLCTGLKKAHRTEFYRNLNHSLPSDFTFQNMNSKRKAETWKRNRRQLAFSTVGTPDYIAPEVFMQTGYNKLCDWWSLGVIMYEMLIGYPPFCSETPQETYKKVMNWKETLTFPPEVPISEKAKDLILRFCCEWEHRIGAPGVEEIKSNSFFEGVDWEHIRERPAAISIEIKSIDDTSNFDEFPESDILKPTVATSNHPETDYKNKDWVFINYTYKRFEGLTARGAIPSYMKAAK

SEQ ID NO: 9903 - protein, 264 aa, Homo sapiens
YILEPGEYPTSEAWGTSDPSVGSLKPMRLGCPSVEKPGEPRAVVYEAPGFQGRSWEVSRDIYNLQQPEDSQSPHLASVGSLRVLGGCWVGYEKEGFRGHQYLLEEGEYPDWSHWGGYDELLTSLRVIRTDFGDPAVVLFEAMDFEGHGVEVSKALPDVELVQHGPSTQAIHVLSGVWVAYQEVGFSGEQYVLEKGVYRNCEDWGAGNSTLASLQPVLQVRAGRGGRGLPGGGTWSSGAPRPHAEVAGWRTCLGAWGGALEGGGA

SEQ ID NO: 9904 - protein, 624 aa, Homo sapiens
MQPDPRPSGAGACCRFLPLQSQCPEGAGDAVMYASTECKAEVTPSQHGNRTFSYTLEDHTKQAFGIMNELRLSQQLCDVTLQVKYQDAPAAQFMAHKVVLASSSPVFKAMFTNGLREQGMEVVSIEGIHPKVMERLIEFAYTASISMGEKCVLHVMNGAVMYQIDSVVRACSDFLVQQLDPSNAIGIANFAEQIGCVELHQRAREYIYMHFGEVAKQEEFFNLSHCQLVTLISRDDLNVRCESEVFHACINWVKYDCEQRRFYVQALLRAVRCHSLTPNFLQMQLQKCEILQSDSRCKDYLVKIFEELTLHKPTQVMPCRAPKVGRLIYTAGGYFRQSLSYLEAYNPSNGTWLRLADLQVPRSGLAGCVVGGLLYAVGGRNNSPDGNTDSSALDCYNPMTNQWSPCAPMSVPRNRIGVGVIDGHIYAVGGSHGCIHHNSVERYEPERDEWHLVAPMLTRRIGVGVAVLNRLLYAVGGFDGTNRLNSAECYYPERNEWRMITAMNTIRSGAGVCVLHNCIYAAGGYDGQDQLNSVERYDVETETWTFVAPMKHRRSALGITVHQGRIYVLGGYDGHTFLDSVECYDPDTDTWSEVTRMTSGRSGVGVAVTMEPCRKQIDQQNCTC

SEQ ID NO: 9905 - protein, 624 aa, Homo sapiens
MQPDPRPSGAGACCRFLPLQSQCPEGAGDAVMYASTECKAEVTPSQHGNRTFSYTLEDHTKQAFGIMNELRLSQQLCDVTLQVKYQDAPAAQFMAHKVVLASSSPVFKAMFTNGLREQGMEVVSIEGIHPKVMERLIEFAYTASISMGEKCVLHVMNGAVMYQIDSVVRACSDFLVQQLDPSNAIGIANFAEQIGCVELHQRAREYIYMHFGEVAKQEEFFNLSHCQLVTLISRDDLNVRCESEVFHACINWVKYDCEQRRFYVQALLRAVRCHSLTPNFLQMQLQKCEILQSDSRCKDYLVKIFEELTLHKPTQVMPCRAPKVGRLIYTAGGYFRQSLSYLEAYNPSDGTWLRLADLQVPRSGLAGCVVGGLLYAVGGRNNSPDGNTDSSALDCYNPMTNQWSPCAPMSVPRNRIGVGVIDGHIYAVGGSHGCIHHNSVERYEPERDEWHLVAPMLTRRIGVGVAVLNRLLYAVGGFDGTNRLNSAECYYPERNEWRMITAMNTIRSGAGVCVLHNCIYAAGGYDGQDQLNSVERYDVETETWTFVAPMKHRRSALGITVHQGRIYVLGGYDGHTFLDSVECYDPDTDTWSEVTRMTSGRSGVGVAVTMEPCRKQIDQQNCTC

SEQ ID NO: 9906 - protein, 1710 aa, Homo sapiens
MDQEGGGDGQKAPSFQWRNYKLIVDPALDPALRRPSQKVYRYDGVHFSVNDSKYIPVEDLQDPRCHVRSKNRDFSLPVPKFKLDEFYIGQIPLKEVTFARLNDNVRETFLKDMCRKYGEVEEVEILLHPRTRKHLGLARVLFTSTRGAKETVKNLHLTSVMGNIIHAQLDIKGQQRMKYYELIVNGSYTPQTVPTGGKALSEKFQGSGAATETAESRRRSSSDTAAYPAGTTAVGTPGNGTPCSQDTSFSSSRQDTPSSFGQFTPQSSQGTPYTSRGSTPYSQDSAYSSSTTSTSFKPRRSENSYQDAFSRRHFSASSASTTASTAIAATTAATASSSASSSSLSSSSSSSSSSSSSQFRSSDANYPAYYESWNRYQRHTSYPPRRATREEPPGAPFAENTAERFPPSYTSYLPPEPSRPTDQDYRPPASEAPPPEPPEPGGGGGGGGPSPEREEVRTSPRPASPARSGSPAPETTNESVPFAQHSSLDSRIEMLLKEQRSKFSFLASDTEEEEENSSMVLGARDTGSEVPSGSGHGPCTPPPAPANFEDVAPTGSGEPGATRESPKANGQNQASPCSSGDDMEISDDDRGGSPPPAPTPPQQPPPPPPPPPPPPPYLASLPLGYPPHQPAYLLPPRPDGPPPPEYPPPPPPPPHIYDFVNSLELMDRLGAQWGGMPMSFQMQTQMLTRLHQLRQGKGLIAASAGPPGGAFGEAFLPFPPPQEAAYGLPYALYAQGQEGRGAYSREAYHLPMPMAAEPLPSSSVSGEEARLPPREEAELAEGKTLPTAGTVGRVLAMLVQEMKSIMQRDLNRKMVENVAFGAFDQWWESKEEKAKPFQNAAKQQAKEEDKEKTKLKEPGLLSLVDWAKSGGTTGIEAFAFGSGLRGALRLPSFKVKRKEPSEISEASEEKRPRPSTPAEEDEDDPEQEKEAGEPGRPGTKPPKRDEERGKTQGKHRKSFALDSEGEEASQESSSEKDEEDDEEDEEDEDREEAVDTTKKETEVSDGEDEESDSSSKCSLYADSDGENDSTSDSESSSSSSSSSSSSSSSSSSSSSSSSESSSEDEEEEERPAALPSASPPPREVPVPTPAPVEVPVPERVAGSPVTPLPEQEASPARPAGPTEESPPSAPLRPPEPPAGPPAPAPRPDERPSSPIPLLPPPKKRRKTVSFSAIEVVPAPEPPPATPPQAKFPGPASRKAPRGVERTIRNLPLDHASLVKSWPEEVSRGGRSRAGGRGRLTEEEEAEPGTEVDLAVLADLALTPARRGLPALPAVEDSEATETSDEAERPRPLLSHILLEHNYALAVKPTPPAPALRPPEPVPAPAALFSSPADEVLEAPEVVVAEAEEPKPQQLQQQREEGEEEGEEEGEEEEEESSDSSSSSDGEGALRRRSLRSHARRRRPPPPPPPPPPRAYEPRSEFEQMTILYDIWNSGLDSEDMSYLRLTYERLLQQTSGADWLNDTHWVHHTNILITNLTTPKRKRRPQDGPREHQTGSARSEGYYPISKKEKDKYLDVCPVSARQLEGVDTQGTNRVLSERRSEQRRLLSAIGTSAIMDSDLLKLNQLKFRKKKLRFGRSRIHEWGLFAMEPIAADEMVIEYVGQNIRQMVADMREKRYVQEGIGSSYLFRVDHDTIIDATKCGNLARFINHCCTPNCYAKVITIESQKKIVIYSKQPIGVDEEITYDYKFPLEDNKIPCLCGTESCRGSLN

SEQ ID NO: 9907 - protein, 238 aa, Homo sapiens
SLLQIGCDRSQNLVDICRERQFQAFVCDALAVPVRSGSCDACISIAVIHHFATAERRVAALQEIVRLLRPGGKALIYVWAMEQEYNKQKSKYLRGNRNSQGKKEEMNSDTSVQRSLVEQMRDMGSRDSASSVPRINDSQEGGCNSRQVSNSKLPVHVNRTSFYSQDVLVPWHLKGNPDKGKPVEPFGPIGSQDPSPVFHRYYHVFREGELEGACRTVSDVRILQSYYDQGNWCVILQK

SEQ ID NO: 9908 - protein, 343 aa, Homo sapiens
MDGRRVLGRFWSGWRRGLGVRPVPEDAGFGTEARHQRQPRGSCQRSGPLGDQPFAGLLPKNLSREELVDALRAAVVDRKGPLVTLNKPQGLPVTGKPGELTLFSVLPELSQSLGLREQELQVVRASGKESSGLVLLSSCPQTASRLQKYFTHARRAQRPTATYCAVTDGIPAASEGKIQAALKLEHIDGVNLTVPVKAPSRKDILEGVKKTLSHFRVVATGSGCALVQLQPLTVFSSQLQVHMVLQLCPVLGDHMYSARVGTVLGQRFLLPAENNKPQRQVLDEALLRRLHLTPSQAAQLPLHLHLHRLLLPGTRARDTPVELLAPLPPYFSRTLQCLGLRLQ

SEQ ID NO: 9909 - protein, 390 aa, Homo sapiens
MGEAGAGAGASGGPEASPEAEVVKLLPFLAPGARADLQAAAVRHVLALTGCGPGRALLAGQAALLQALMELAPASAPARDAARALVNLAADPGLHETLLAADPGLPARLMGRALDPQWPWAEEAAAALANLSREPAPCAALMAALAAAEPADSGLERLVRALCTPGYNARAPLHYLAPLLSNLSQRPAARAFLLDPDRCVVQRLLPLTQYPDSSVRRGGVVGTLRNCCFEHRHHEWLLGPEVDILPFLLLPLAGPEDFSEEEMERLPVDLQYLPPDKQREPDADIRKMLVEAIMLLTATAPGRQQVRDQGAYLILRELHSWEPEPDVRTACEKLIQVLIGDEPERGMENLLEVQVPEDVEQQLQQLDCREQEQLERELAPEPWVERATPT

SEQ ID NO: 9910 - protein, 255 aa, Homo sapiens
MRRKKSTRGDQAPGHDREAEAAVKEKEEGPEPRLTIDEAPQERLRETEGPDFPSPSVPLKASDPEEASQAQEDPGQGDQQVCAEEADPELEPASGGEQEPRPQQAQVGGSGPWLLSTSGADSGRGALLPRAASRPRPRALGAGVGKEGAPRHLPPLQTKAASQILENGEEAPGPDPSLDRMLSSSSSVSSLNSSTVRREGGDPGGRGVDPFRCVAPACPSLAAGPTAAAPQPATYDPGLKPPRCPRPRREPCERP

SEQ ID NO: 9911 - protein, 196 aa, Homo sapiens
RLQILRRRPRPRKILAKETNRSVPRRLTRSWSPRRGESRSRGPSQAQVGGSGPWLLSTSGADSGRGALLPRAASRPRPRALGAGVGKEGAPRHLPPLQTKAASQILENGEEAPGPDPSLDRMLSSSSSVSSLNSSTVRREGGDPGGRGVDPFRCVAPACPSLAAGPTAAAPQPATYDPGLKPPRCPRPRREPCERP

SEQ ID NO: 9912 - protein, 895 aa, Homo sapiens
MKIGSGFLSGGGGTGSSGGSGSGGGGSGGGGGGGSSGRRAEMEPTFPQGMVMFNHRLPPVTSFTRPAGSAAPPPQCVLSSSTSAAPAAEPPPPPAPDMTFKKEPAASAAAFPSQRTSWGFLQSLVSIKQEKPADPEEQQSHHHHHHHHYGGLFAGAEERSPGLGGGEGGSHGVIQDLSILHQHVQQQPAQHHRDVLLSSSSRTDDHHGTEEPKQDTNVKKAKRPKPESQGIKAKRKPSASSKPSLVGDGEGAILSPSQKPHICDHCSAAFRSSYHLRRHVLIHTGERPFQCSQCSMGFIQKYLLQRHEKIHSREKPFGCDQCSMKFIQKYHMERHKRTHSGEKPYKCDTCQQYFSRTDRLLKHRRTCGEVIVKGATSAEPGSSNHTNMGNLAVLSQGNTSSSRRKTKSKSIAIENKEQKTGKTNESQISNNINMQSYSVEMPTVSSSGGIIGTGIDELQKRVPKLIFKKGSRKNTDKNYLNFVSPLPDIVGQKSLSGKPSGSLGIVSNNSVETIGLLQSTSGKQGQISSNYDDAMQFSKKRRYLPTASSNSAFSINVGHMVSQQSVIQSAGVSVLDNEAPLSLIDSSALNAEIKSCHDKSGIPDEVLQSILDQYSNKSESQKEDPFNIAEPRVDLHTSGEHSELVQEENLSPGTQTPSNDKASMLQEYSKYLQQAFEKSTNASFTLGHGFQFVSLSSPLHNHTLFPEKQIYTTSPLECGFGQSVTSVLPSSLPKPPFGMLFGSQPGLYLSALDATHQQLTPSQELDDLIDSQKNLETSSAFQSSSQKLTSQKEQKNLESSTGFQIPSQELASQIDPQKDIEPRTTYQIENFAQAFGSQFKSGSRVPMTFITNSNGEVDHRVRTSVSDFSGYTNMMSDVSEPCSTRVKTPTSQSYR

SEQ ID NO: 9913 - protein, 2068 aa, Homo sapiens
MAAQVAPAAASSLGNPPPPPPSELKKAEQQQREEAGGEAAAAAAAERGEMKAAAGQESEGPAVGPPQPLGKELQDGAESNGGGGGGGAGSGGGPGAEPDLKNSNGNAGPRPALNNNLTEPPGGGGGGSSDGVGAPPHSAAAALPPPAYGFGQPYGRSPSAVAAAAAAVFHQQHGGQQSPGLAALQSGGGGGLEPYAGPQQNSHDHGFPNHQYNSYYPNRSAYPPPAPAYALSSPRGGTPGSGAAAAAGSKPPPSSSASASSSSSSFAQQRFGAMGGGGPSAAGGGTPQPTATPTLNQLLTSPSSARGYQGYPGGDYSGGPQDGGAGKGPADMASQCWGAAAAAAAAAAASGGAQQRSHHAPMSPGSSGGGGQPLARTPQPSSPMDQMGKMRPQPYGGTNPYSQQQGPPSGPQQGHGYPGQPYGSQTPQRYPMTMQGRAQSAMGGLSYTQQIPPYGQQGPSGYGQQGQTPYYNQQSPHPQQQQPPYSQQPPSQTPHAQPSYQQQPQSQPPQLQSSQPPYSQQPSQPPHQQSPAPYPSQQSTTQQHPQSQPPYSQPQAQSPYQQQQPQQPAPSTLSQQAAYPQPQSQQSQQTAYSQQRFPPPQELSQDSFGSQASSAPSMTSSKGGQEDMNLSLQSRPSSLPDLSGSIDDLPMGTEGALSPGVSTSGISSSQGEQSNPAQSPFSPHTSPHLPGIRGPSPSPVGSPASVAQSRSGPLSPAAVPGNQMPPRPPSGQSDSIMHPSMNQSSIAQDRGYMQRNPQMPQYSSPQPGSALSPRQPSGGQIHTGMGSYQQNSMGSYGPQGGQYGPQGGYPRQPNYNALPNANYPSAGMAGGINPMGAGGQMHGQPGIPPYGTLPPGRMSHASMGNRPYGPNMANMPPQVGSGMCPPPGGMNRKTQETAVAMHVAANSIQNRPPGYPNMNQGGMMGTGPPYGQGINSMAGMINPQGPPYSMGGTMANNSAGMAASPEMMGLGDVKLTPATKMNNKADGTPKTESKSKKSSSSTTTNEKITKLYELGGEPERKMWVDRYLAFTEEKAMGMTNLPAVGRKPLDLYRLYVSVKEIGGLTQVNKNKKWRELATNLNVGTSSSAASSLKKQYIQCLYAFECKIERGEDPPPDIFAAADSKKSQPKIQPPSPAGSGSMQGPQTPQSTSSSMAEGGDLKPPTPASTPHSQIPPLPGMSRSNSVGIQDAFNDGSDSTFQKRNSMTPNPGYQPSMNTSDMMGRMSYEPNKDPYGSMRKAPGSDPFMSSGQGPNGGMGDPYSRAAGPGLGNVAMGPRQHYPYGGPYDRVRTEPGIGPEGNMSTGAPQPNLMPSNPDSGMYSPSRYPPQQQQQQQQRHDSYGNQFSTQGTPSGSPFPSQQTTMYQQQQQVSSPAPLPRPMENRTSPSKSPFLHSGMKMQKAGPPVPASHIAPAPVQPPMIRRDITFPPGSVEATQPVLKQRRRLTMKDIGTPEAWRVMMSLKSGLLAESTWALDTINILLYDDNSIMTFNLSQLPGLLELLVEYFRRCLIEIFGILKEYEVGDPGQRTLLDPGRFSKVSSPAPMEGGEEEEELLGPKLEEEEEEEVVENDEEIAFSGKDKPASENSEEKLISKFDKLPVKIVQKNDPFVVDCSDKLGRVQEFDSGLLHWRIGGGDTTEHIQTHFESKTELLPSRPHAPCPPAPRKHVTTAEGTPGTTDQEGPPPDGPPEKRITATMDDMLSTRSSTLTEDGAKSSEAIKESSKFPFGISPAQSHRNIKILEDEPHSKDETPLCTLLDWQDSLAKRCVCVSNTIRSLSFVPGNDFEMSKHPGLLLILGKLILLHHKHPERKQAPLTYEKEEEQDQGVSCNKVEWWWDCLEMLRENTLVTLANISGQLDLSPYPESICLPVLDGLLHWAVCPSAEAQDPFSTLGPNAVLSPQRLVLETLSKLSIQDNNVDLILATPPFSRLEKLYSTMVRFLSDRKNPVCREMAVVLLANLAQGDSLAARAIAVQKGSIGNLLGFLEDSLAATQFQQSQASLLHMQNPPFEPTSVDMMRRAARALLALAKVDENHSEFTLYESRLLDISVSPLMNSLVSQVICDVLFLIGQS

SEQ ID NO: 9914 - protein, 1374 aa, Homo sapiens
MAAQVAPAAASSLGNPPPPPPSELKKAEQQQREEAGGEAAAAAAAERGEMKAAAGQESEGPAVGPPQPLGKELQDGAESNGGGGGGGAGSGGGPGAEPDLKNSNGNAGPRPALNNNLTEPPGGGGGGSSDGVGAPPHSAAAALPPPAYGFGQPYGRSPSAVAAAAAAVFHQQHGGQQSPGLAALQSGGGGGLEPYAGPQQNSHDHGFPNHQYNSYYPNRSAYPPPAPAYALSSPRGGTPGSGAAAAAGSKPPPSSSASASSSSSSFAQQRFGAMGGGGPSAAGGGTPQPTATPTLNQLLTSPSSARGYQGYPGGDYSGGPQDGGAGKGPADMASQCWGAAAAAAAAAAASGGAQQRSHHAPMSPGSSGGGGQPLARTPQPSSPMDQMGKMRPQPYGGTNPYSQQQGPPSGPQQGHGYPGQPYGSQTPQRYPMTMQGRAQSAMGGLSYTQQIPPYGQQGPSGYGQQGQTPYYNQQSPHPQQQQPPYSQQPPSQTPHAQPSYQQQPQSQPPQLQSSQPPYSQQPSQPPHQQSPAPYPSQQSTTQQHPQSQPPYSQPQAQSPYQQQQPQQPAPSTLSQQAAYPQPQSQQSQQTAYSQQRFPPPQELSQDSFGSQASSAPSMTSSKGGQEDMNLSLQSRPSSLPDLSGSIDDLPMGTEGALSPGVSTSGISSSQGEQSNPAQSPFSPHTSPHLPGIRGPSPSPVGSPASVAQSRSGPLSPAAVPGNQMPPRPPSGQSDSIMHPSMNQSSIAQDRGYMQRNPQMPQYSSPQPGSALSPRQPSGGQIHTGMGSYQQNSMGSYGPQGGQYGPQGGYPRQPNYNALPNANYPSAGMAGGINPMGAGGQMHGQPGIPPYGTLPPGRMSHASMGNRPYGPNMANMPPQVGSGMCPPPGGMNRKTQETAVAMHVAANSIQNRPPGYPNMNQGGMMGTGPPYGQGINSMAGMINPQGPPYSMGGTMANNSAGMAASPEMMGLGDVKLTPATKMNNKADGTPKTESKSKKSSSSTTTNEKITKLYELGGEPERKMWVDRYLAFTEEKAMGMTNLPAVGRKPLDLYRLYVSVKEIGGLTQVNKNKKWRELATNLNVGTSSSAASSLKKQYIQCLYAFECKIERGEDPPPDIFAAADSKKSQPKIQPPSPAGSGSMQGPQTPQSTSSSMAEGGDLKPPTPASTPHSQIPPLPGMSRSNSVGIQDAFNDGSDSTFQKRNSMTPNPGYQPSMNTSDMMGRMSYEPNKDPYGSMRKAPGSDPFMSSGQGPNGGMGDPYSRAAGPGLGNVAMGPRQHYPYGGPYDRVRTEPGIGPEGNMSTGAPQPNLMPSNPDSGMYSPSRYPPQQQQQQQQRHDSYGNQFSTQGTPSGSPFPSQQTTMYQQQQQEPRRHGG

SEQ ID NO: 9915 - protein, 1317 aa, Homo sapiens
MLIFWNRSLSQRSSEVEYINKYRQLEAQELDVCRSVQPTSGPGPRPSLAKLSSVTCIPGTTYKYPDLPISRYKEEVVSLIESNSVVIIHGATGSGKSTQLPQYILDHYVQRSAYCSIVVTQPRKIGASSIARWISKERAWTLGGVVGYQVGLEKIATEDTRLIYMTTGVLLQKIVSAKSLMEFTHIIIDEVHERTEEMDFLLLVVRKLLRTNSRFVKVVLMSATISCKEFADYFAVPVQNKMNPAYIFEVEGKPHSVEEYYLNDLEHIHHSKLSPHLLEEPVITKDIYEVAVSLIQMFDDLDMKESGNKAWSGAQFVLERSSVLVFLPGLGEINYMHELLTSLVHKRLQVYPLHSSVALEEQNNVFLSPVPGYRKIILSTNIAESSVTVPDVKYVIDFCLTRTLVCDEDTNYQSLRLSWASKTSCNQRKGRAGRVSRGYCYRLVHKDFWDNSIPDHVVPEMLRCPLGSTILKVKLLDMGEPRALLATALSPPGLSDIERTILLLKEVGALAVSGQREDENPHDGELTFLGRVLAQLPVNQQLGKLIVLGHVFGCLDECLIIAAALSLKNFFAMPFRQHLDGYRNKVNFSGSSKSDCIALVEAFKTWKACRQTGELRYPKDELNWGRLNYIQIKRIREVAELYEELKTRISQFNMHVDSRRPVMDQEYIYKQRFILQVVLAGAFYPNYFTFGQPDEEMAVRELAGKDPKTTVVLKHIPPYGFLYYKQLQSLFRQCGQVKSIVFDGAKAFVEFSRNPTERFKTLPAVYMAIKMSQLKVSLELSVHSAEEIEGKVQGMNVSKLRNTRVNVDFQKQTVDPMQVSFNTSDRSQTVTDLLLTIDVTEVVEVGHFWGYRIDENNSEILKKLTAEINQLTLVPLPTHPHPDLVCLAPFADFDKQRYFRAQVLYVSGNSAEVFFVDYGNKSHVDLHLLMEIPCQFLELPFQALEFKICKMRPSAKSLVCGKHWSDGASQWFASLVSGCTLLVKVFSVVHSVLHVDVYQYSGVQDAINIRDVLIQQGYAELTEESYESKQSHEVLKGLFSKSVENMTDGSVPFPMKDDEKYLIRILLESFSTNKLGTPNCKAELHGPFNPYELKCHSLTRISKFRCVWIEKESINSVIISDAPEDLHQRMLVAASLSINATGSTMLLRETSLMPHIPGLPALLSMLFAPVIELRIDQNGKYYTGVLCGLGWNPATGASILPEHDMELAFDVQFSVEDVVEVNILRAAINKLVCDGPNGCKCLGPERVAQLQDIARQKLLGLFCQSKPREKIVPKWHEKPYEWNQVDPKLVMEQADRESSRGKNTFLYQLHKLVVLGT

SEQ ID NO: 9916 - protein, 988 aa, Homo sapiens
  VARIANT 43, 212, 481: Xaa = Any Amino Acid
AKDGTKDGLERTRAAVKRGRSFIRTKSLIAQDHRSSLEEEQNXFIDVDCKHPEAILTPMPEGLSQQQVVRRYILGSVVDSEKNYVDALKRILEQYEKPLSEMEPKVLSERKLKTVFYRVKEILQCHSLFQIALASRVSEWDSVEMIGDVFVASFSKSMVLDAYSEYVNNFSTAVAVLKKTCATKPAFLEFLKQEQEASPDRTTLYSLMMKPXQRFPQFILLLQDMLKNTSKGHPDRLPLQMALTELETLAEKLNERKRDADQRCEVKQIAKAINERYLNKLLSSGSRYLIRSDDMIETVYNDRGEIVKTKERRVFMLNDVLMCATVSSRPSHDSRVMSSQRYLLKWSVPLGHVDAIEYGSSAGTGEHSRHLAVHPPESLAVVANAKPNKVYMGPGQLYQDLQNLLHDLNVIGQITQLIGNLKGNYQNLNQSVAHDWTSGLQRLILKKEDEIRAADCCRIQLQLPGKQDKSGRPTFFTAVFXTFTPAIKESWVNSLQMAKLALEEENHMGWFCVEDDGNHIKKEKHPLLVGHMPVMVAKQQEFKIGSCTHQMGQIAIVSFQNSTPKVIECFNVESRILCMLYVPVEEKRREPGAPPDPETPAVRASDVPTICVGTEEGSISIYKSSQGSKKVRLQHFFTPEKSSVMSLACTSQSLYAGLVNGAVATYARAPDGSWDSEPQKVIKLGVLPVRSLLMMEDTLWAASGGQVFIISVETHAVEGQLEAHQEEGMVISHMAVSGVGIWIAFTSGSTLRLFHTETLKHLQDINIATPVHNMLPGHQRLSVTSLLVCHGLLMVGTSLGVLVALPVPRLQGIPKVTGRGMVSYHAHNSPVKFIVLATALHEKDKDKSRDSLAPGPEPQDEDQKDALPSGGAGSSLSQGDPDAAIWLGDSLGSMTQKSDLSSSSGSLSLSHGSSSLEHRSEDSTIYDLLKDPVSLRSKARRAKKAKASSALVVCGGQGHRRVHRKARQPHQEELAPTVMVWQIPLLNI

SEQ ID NO: 9917 - protein, 1405 aa, Homo sapiens
GSRGTRGTRGTRGTAGNGGEQRGTAGNSGGRRGTAGDCGSRPGRRGAPSLNRAERGIWSCSMDQREPLPPAPAENEMKYDTNNNEEEEGEQFDFDSGDEIPEADRQAPSAPETGGAGASEAPAPTGGEDGAGAETTPVAEPTKLVLPMKVNPYSVIDITPFQEDQPPTPVPSAEEENVGLHVPCGYLVPVPCGYAVPSNLPLLLPAYSSPVIICATSLDEEETPEVTEDRQPNSLSSEEPPTSEDQVGREDSALARWAADPANTAWMENPEEAIYDDVPRENSDSEPDEMIYDDVENGDEGGNSSLEYGWSSSEFESYEEQSDSECKNGIPRSFLRSNHKKQLSHDLTRLKEHYEKKMRDLMASTVGVVEIQQLRQKHELKMQKLVKAAKDGTKDGLERTRAAVKRGRSFIRTKSLIAQDHRSSLEEEQNLFIDVDCKHPEAILTPMPEGLSQQQVVRRYILGSVVDSEKNYVDALKRILEQYEKPLSEMEPKVLSERKLKTVFYRVKEILQCHSLFQIALASRVSEWDSVEMIGDVFVASFSKSMVLDAYSEYVNNFSTAVAVLKKTCATKPAFLEFLKQEQEASPDRTTLYSLMMKPIQRFPQFILLLQDMLKNTSKGHPDRLPLQMALTELETLAEKLNERKRDADQRCEVKQIAKAINERYLNKLLSSGSRYLIRSDDMIETVYNDRGEIVKTKERRVFMLNDVLMCATVSSRPSHDSRVMSSQRYLLKWSVPLGHVDAIEYGSSAGTGEHSRHLAVHPPESLAVVANAKPNKVYMGPGQLYQDLQNLLHDLNVIGQITQLIGNLKGNYQNLNQSVAHDWTSGLQRLILKKEDEIRAADCCRIQLQLPGKQDKSGRPTFFTAVFNTFTPAIKESWVNSLQMAKLALEEENHMGWFCVEDDGNHIKKEKHPLLVGHMPVMVAKQQEFKIECAAYNPEPYLNNESQPDSFSTAHGFLWIGSCTHQMGQIAIVSFQNSTPKVIECFNVESRILCMLYVPVEEKRREPGAPPDPETPAVRASDVPTICVGTEEGSISIYKSSQGSKKVRLQHFFTPEKSTVMSLACTSQSLYAGLVNGAVASYARAPDGSWDSEPQKVIKLGVLPVRSLLMMEDTLWAASGGQVFIISVETHAVEGQLEAHQEEGMVISHMAVSGVGIWIAFTSGSTLRLFHTETLKHLQDINIATPVHNMLPGHQRLSVTSLLVCHGLLMVGTSLGVLVALPVPRLQGIPKVTGRGMVSYHAHNSPVKFIVLATALHEKDKDKSRDSLAPGPEPQDEDQKDALPSGGAGSSLSQGDPDAAIWLGDSLGSMTQKSDLSSSSGSLSLSHGSSSLEHRSEDSTIYDLLKDPVSLRSKARRAKKAKASSALVVCGGQGHRRVHRKARQPHQEELAPTVMVWQIPLLNI

SEQ ID NO: 9918 - protein, 582 aa, Homo sapiens
MEALSRAGQEMSLAALKQHDPYITSIADLTGQVALYTFCPKANQWEKTDIEGTLFVYRRSASPYHGFTIVNRLNMHNLVEPVNKDLEFQLHEPFLLYRNASLSIYSIWFYDKNDCHRIAKLMADVVEEETRRSQQAARDKQSPSQANGCSDHRPIDILEMLSRAKDEYERNQMGDSNISSPGLQPSTQLSNLGSTETLEEMPSGSQDKSAPSGHKHLTVEELFGTSLPKEQPAVVGLDSEEMERLPGDASQKEPNSFLPFPFEQLGGAPQSETLGVPSAAHHSVQPEITTPVLITPASITQSNEKHAPTYTIPLSPVLSPTLPAEAPTAQVPPSLPRNSTMMQAVKTTPRQRSPLLNQPVPELSHASLIANQSPFRAPLNVTNTAGTSLPSVDLLQKLRLTPQHDQIQTQPLGKGAMVASFSPAAGQLATPESFIEPPSKTAAARVAASASLSNMVLAPLQSMQQNQDPEVFVQPKVLSSAIPVAGAPLVTATTTAVSSVLLAPSVFQQTVTRSSDLERKASSPSPLTIGTPESQRKPSIILSKSQLQDTLIHLIKNDSSFLSTLHEVYLQVLTKNKDNHNL

SEQ ID NO: 9919 - protein, 917 aa, Homo sapiens
RMVQKESQATLEERESELSSNPAASAGASLEPPAAPAPGEDNPAGAGGAAVAGAAGGARRFLCGVVEGFYGRPWVMEQRKELFRRLQKWELNTYLYAPKDDYKHRMFWREMYSVEEAEQLMTLISAAREYEIEFIYAISPGLDITFSNPKEVSTLKRKLDQVSQFGCRSFALLFDDIDHNMCAADKEVFSSFAHAQVSITNEIYQYLGEPETFLFCPTEYCGTFCYPNVSQSPYLRTVGEKLLPGIEVLWTGPKVVSKEIPVESIEEVSKIIKRAPVIWDNIHANDYDQKRLFLGPYKGRSTELIPRLKGVLTNPNCEFEANYVAIHTLATWYKSNMNGVRKDVVMTDSEDSTVSIQIKLENEGSDEDIETDVLYSPQMALKLALTEWLQEFGVPHQYSSRQVAHSGAKASVVDGTPLVAAPSLNATTVVTTVYQEPIMSQGAALSGEPTTLTKEEEKKQPDEEPMDMVVEKQEETDHKNDNQILSEIVEAKMAEELKPMDTDKESIAESKSPEMSMQEDCISDIAPMQTDEQTNKEQFVPGPNEKPLYTAEPVTLEDLQLLADLFYLPYEHGPKGAQMLREFQWLRANSSVVSVNCKGKDSEKIEEWRSRAAKFEEMCGLVMGMFTRLSNCANRTILYDMYSYVWDIKSIMSMVKSFVQWLGCRSHSSAQFLIGDQEPWAFRGGLAGEFQRLLPIDGANDLFFQPPPLTPTSKVYTIRPYFPKDEASVYKICREMYDDGVGLPFQSQPDLIGDKLVGGLLSLSLDYCFVLEDEDGICGYALGTVDVTPFIKKCKISWIPFMQEKYTKPNGDKELSEAEKIMLSFHEEQEVLPETFLANFPSLIKMDIHKKVTDPSVAKSMMACLLSSLKANGSRGAFCEVRPDDKRILEFYSKLGCFEIAKMEGFPKDVVILGRSL

SEQ ID NO: 9920 - protein, 987 aa, Homo sapiens
PRTRGWRQQQRESSGLGGETAEDLRLSGGQQRQRTRTGPLAVFFQGTRGHSLALRLGFWRPSLKPRLRLTKGSRRCRRPSHPGIRVPAEREGEGQRGRGRSRRGAHLELKPSPGLRAGAPTDRGRGGPAEVAAAGGRRMVQKESQATLEERESELSSNPAASAGASLEPPAAPAPGEDNPAGAGGAAVAGAAGGARRFLCGVVEGFYGRPWVMEQRKELFRRLQKWELNTYLYAPKDDYKHRMFWREMYSVEEAEQLMTLISAAREYEIEFIYAISPGLDITFSNPKEVSTLKRKLDQVSQFGCRSFALLFDDIDHNMCAADKEVFSSFAHAQVSITNEIYQYLGEPETFLFCPTEYCGTFCYPNVSQSPYLRTVGEKLLPGIEVLWTGPKVVSKEIPVESIEEVSKIIKRAPVIWDNIHANDYDQKRLFLGPYKGRSTELIPRLKGVLTNPNCEFEANYVAIHTLATWYKSNMNGVRKDVVMSRQVAHSGAKASVVDGTPLVAAPSLNATTVVTTVYQEPIMSQGAALSGEPTTLTKEEEKKQPDEEPMDMVVEKQEETDHKNDNQILSEIVEAKMAEELKPMDTDKESIAESKSPEMSMQEDCISDIAPMQTDEQTNKEQFVPGPNEKPLYTAEPVTLEDLQLLADLFYLPYEHGPKGAQMLREFQWLRANSSVVSVNCKGKDSKKIEEWRSRAAKFEEMCGLVMGMFTRLSNCANRTILYDMYSYVWDIKSIMSMVKSFVQWLGCRSHSSAQFLIGDQEPWAFRGGLAGEFQPPPLTPTSKVYTIRPYFPKDEASVYKICREMYDDGVGLPFQSQPDLIGDKLVGGLLSLSLDYCFVLEDEDGICGYALGTVDVTPFIKKCKISWIPFMQEKYTKPNGDKELSEAEKIMLSFHEEQEVLPETFLANFPSLIKMDIHKKVTDPSVAKSMMACLLSSLKANGSRGAFCEVRPDDKRILEFYSKLGCFEIAKMEGFPKDVVILGRSL

SEQ ID NO: 9921 - protein, 797 aa, Homo sapiens
LRNLSLRFLLSRPRPGPAPPSVPPARGRPGAPAEARTDGRTGERRGDRPSAGRRRQVWDRHWPQTGATLRSALLPLAATQDTMSQSGAVSCCPGATNGSLGRSDGVAKMSPKDLFEQRKKYSNSNVIMHETSQYHVQHLATFIMDKSEAITSVDDAIRKLVQLSSKEKIWTQEMLLQVNDQSLRLLDIESQEELEDFPLPTVQRSQTVLNQLRYPSVLLLVCQDSEQSKPDVHFFHCDEVEAELVHEDIESALADCRLGKKMRPQTLKGHQEKIRQRQSILPPPQGPAPIPFQHRGGDSPEAKNRVGPQVPLSEPGFRRRESQEEPRAVLAQKIEKETQILNCALDDIEWFVARLQKAAEAFKQLNQRKKGKKKGKKAPAEGVLTLRARPPSEGEFIDCFQKIKLAINLLAKLQKHIQNPSAAELVHFLFGPLDLIVNTCSGPDIARSVSCPLLSRDAVDFLRGHLVPKEMSLWESLGESWMRPRSEWPREPQVPLYVPKFHSGWEPPVDVLQEAPWEVEGLASAPIEEVSPVSRQSIRNSQKHSPTSEPTPPGDALPPVSSPHTHRGYQPTPAMAKYVKILYDFTARNANELSVLKDEVLEVLEDGRQWWKLRSRSGQAGYVPCNILGEARPEDAGAPFEQAGQKYWGPASPTHKLPPSFPGNKDELMQHMDEVNDELIRKISNIRAQPQRHFRVERSQPVSQPLTYESGPDEVRAWLEAKAFSPRIVENLGILTGPQLFSLNKEELKKVCGEEGVRVYSQLTMQKAFLEKQQSGSELEELMNKFHSMNQRRGEDS

SEQ ID NO: 9922 - protein, 270 aa, Homo sapiens
MVAHFELQELNLGINRTRHIALEGLASCHSLKSSGLRSNGLIELPRGFLAAMPRLQRLNLANNQLRSAMLCMNETGFVSGLWALDLSKNRLCTLSPVIFSCLPHLRELLLQGNQLVCLKDQVFQGLQRLQTLNLGNNPLVTLAPEAQVLEGWGNRHSPRPYCITGLPSLQELKLQALQSQACPCPVRLEELVGELPRLDMLQLSQTGLETLSAAAFGGLGSLQVLVLDREKDFMLDDSLQEHSPRMPQYIYILTSSLACQCANACVGPWL

SEQ ID NO: 9923 - protein, 109 aa, Homo sapiens
MAYQLYRNTTLGNSLQESLDELIQSQQITPQLALQVLLQFDKAINAALAQRVRNRVNFRGSLNTYRFCDNVWTFVLNDVEFREVTELIKVDKVKIVACDGKNTGSNTTE

SEQ ID NO: 9924 - protein, 2813 aa, Homo sapiens [sequence omitted]

SEQ ID NO: 9925 - protein, 2813 aa, Homo sapiens
MKLNPQQAPLYGDCVVTVLLAEEDKAEDDVVFYLVFLGSTLRHCTSTRKVSSDTLETIAPGHDCCETVKVQLCASKEGLPVFVVAEEDFHFVQDEAYDAAQFLATSAGNQQALNFTRFLDQSGPPSGDVNSLDKKLVLAFRHLKLPTEWNVLGTDQSLHDAGPRETLMHFAVRLGLLRLTWFLLQKPGGRRALSIHNQEGATPVSLALERGYHKLHQLLTEENAGEPDSWSSLSYEIPYGDCSVRHHRELDIYTLTSESDSHHEHPFPGDGCTGPIFKLMNIQQQLMKTNLKQMDSLMPLMMTAQDPSSAPETDGQFLPCAPEPTDPQRLSSSEETESTQCCPGSPVAQTESPRDLSSIVEEENTDRSCRKKNKGVERKGEEVEPAPIVDSGTVSDQDSCLQSLPDCGVKGTEGLSSCGNRNEETGTKSSGMPTDQESLSSGDAVLQRDLVMEPGTAQYSSGGELGGISTTNVSTPDTAGEMEHGLMNPDATVWKNVLQGGESTKERFENSNIGTAGASDVHVTSKPVDKISVPNCAPAASSLDGNKPAESSLAFSNEETSTEKTAETETSRSCEESADAPVDQNSVVIPAAAKDKISDGLEPYTLLAVGIGETMSPPDLALLGLEEDVMPHQNSETNSSHAQSQKGKSSPICSTTGDDKLCADSACQQNTVTSSGDLVAKLCDNIVSESESTTARQPSSQDPPDASHCEDPQAHTVTSDPVRDTQERADFCPFKVVDNKGQRKDVKLDKPLTNMLEVVSHPHPVVPKMEKELVPDQAVISDSTFSLANSPGSESVTKDDALSFVPSQKEKGTATPELHTATDYRDGPDGNSNEPDTRPLEDRAVGLSTSSTAAELQHGMGNTSLTGLGGEHEGPAPPAIPEALNIKGNTDSSLQSVGKATLALDSVLTEEGKLLVVSESSAAQEQDKDKAVTCSSIKENALSSGTLQEEQRTPPPGQDTQQFHEKSISADCAKDKALQLSNSPGASSAFLKAETEHNKEVAPQVSLLTQGGAAQSLVPPGASLATESRQEALGAEHNSSALLPCLLPDGSDGSDALNCSQPSPLDVGVKNTQSQGKTSACEVSGDVTVDVTGVNALQGMAEPRRENISHNTQDILIPNVLLSQEKNAVLGLPVALQDKAVTDPQGVGTPEMIPLDWEKGKLEGADHSCTMGDAEEAQIDDEAHPVLLQPVAKELPTDMELSAHDDGAPAGVREVMRAPPSGRERSTPSLPCMVSAQDAPLPKGADLIEEAASRIVDAVIEQVKAAGALLTEGEACHMSLSSPELGPLTKGLESAFTEKVSTFPPGESLPMGSTPEEATGSLAGCFAGREEPEKIILPVQGPEPAAEMPDVKAEDEVDFRASSISEEVAVGSIAATLKMKQGPMTQAINRENWCTIEPCPDAASLLASKQSPECENFLDVGLGRECTSKQGVLKRESGSDSDLFHSPSDDMDSIIFPKPEEEHLACDITGSSSSTDDTASLDRHSSHGSDVSLSQILKPNRSRDRQSLDGFYSHGMGAEGRESESEPADPGDVEEEEMDSITEVPANCSVLRSSMRSLSPFRRHSWGPGKNAASDAEMNHRSSMRVLGDVVRRPPIHRRSFSLEGLTGGAGVGNKPSSSLEVSSANAEELRHPFSGEERVDSLVSLSEEDLESDQREHRMFDQQICHRSKQQGFNYCTSAISSPLTKSISLMTISHPGLDNSRPFHSTFHNTSANLTESITEENYNFLPHSPSKKDSEWKSGTKVSRTFSYIKNKMSSSKKSKEKEKEKDKIKEKEKDSKDKEKDKKTVNGHTFSSIPVVGPISCSQCMKPFTNKDAYTCANCSAFVHKGCRESLASCAKVKMKQPKGSLQAHDTSSLPTVIMRNKPSQPKERPRSAVLLVDETATTPIFANRRSQQSVSLSKSVSIQNITGVGNDENMSNTWKFLSHSTDSLNKISKVNESTESLTDEGVGTDMNEGQLLGDFEIESKQLEAESWSRIIDSKFLKQQKKDVVKRQEVIYELMQTEFHHVRTLKIMSGVYSQGMMADLLFEQQMVEKLFPCLDELISIHSQFFQRILERKKESLVDKSEKNFLIKRIGDVLVNQFSGENAERLKKTYGKFCGQHNQSVNYFKDLYAKDKRFQAFVKKKMSSSVVRRLGIPECILLVTQRITKYPVLFQRILQCTKDNEVEQEDLAQSLSLVKDVIGAVDSKVASYEKKVRLNEIYTKTDSKSIMRMKSGQMFAKEDLKRKKLVRDGSVFLKNAAGRLKEVQAVLLTDILVFLQEKDQKYIFASLDQKSTVISLKKLIVREVAHEEKGLFLISMGMTDPEMVEVHASSKEERNSWIQIIQDTINTLNRDEDEGIPSENEEEKKMLDTRARELKEQLHQKDQKILLLLEEKEMIFRDMAECSTPLPEDCSPTHSPRVLFRSNTEEALKGGPLMKSAINEVEILQGLVSGNLGGTLGPTVSSPIEQDVVSPVSLPRRAETFGGFDSHQMNASKGGEKEEGDDGQDLRRTESDSGLKKGGNANLVFMLKRNSEQVVQSVVHLYELLSALQGVVLQQDSYIEDQKLVLSERALTRSLSRPSSLIEQEKQRSLEKQRQDLANLQKQQAQYLEEKRRREREWEARERELRDGRPSWPSARRRCSRGSRTWKRSGRSSSRRRAHSQYDLERLRAAQKQLEREQEQLRREAERLSQRQTERDLCQVSHPHTKLMRIPSFFPSPEEPPSPSAPSIAKSGSLDSELSVSPKRNSISRTHKDKGPFHILSSTSQTNKGPEGQSQAPASTSASTRLFGLTKPKEKKEKKKKNKTSRSQPGDGPASEVSAEGEEIFC

SEQ ID NO: 9926 - protein, 1058 aa, Homo sapiens
MSSSKKSKEKEKEKDKIKEKEKDSKDKEKDKKTVNGHTFSSIPVVGPISCSQCMKPFTNKDAYTCANCSAFVHKGCRESLASCAKVKMKQPKGSLQAHDTSSLPTVIMRNKPSQPKERPRSAVLLVDETATTPIFANRRSQQSVSLSKSVSIQNITGVGNDENMSNTWKFLSHSTDSLNKISKVNESTESLTDEGVGTDMNEGQLLGDFEIESKQLEAESWSRIIDSKFLKQQKKDVVKRQEVIYELMQTEFHHVRTLKIMSGVYSQGMMADLLFEQQMVEKLFPCLDELISIHSQFFQRILERKKESLVDKSEKNFLIKRIGDVLVNQFSGENAERLKKTYGKFCGQHNQSVNYFKDLYAKDKRFQAFVKKKMSSSVVRRLGIPECILLVTQRITKYPVLFQRILQCTKDNEVEQEDLAQSLSLVKDVIGAVDSKVASYEKKVRLNEIYTKTDSKSIMRMKSGQMFAKEDLKRKKLVRDGSVFLKNAAGRLKEVQAVLLTDILVFLQEKDQKYIFASLDQKSTVISLKKLIVREVAHEEKGLFLISMGMTDPEMVEVHASSKEERNSWIQIIQDTINTLNRDEDEGIPSENEEEKKMLDTRARELKEQLHQKDQKILLLLEEKEMIFRDMAECSTPLPEDCSPTHSPRVLFRSNTEEALKGGPLMKSAINEVEILQGLVSGNLGGTLGPTVSSPIEQDVVGPVSLPRRAETFGGFDSHQMNASKGGEKEEGDDGQDLRRTESDSGLKKGGNANLVFMLKRNSEQVVQSVVHLYELLSALQGVVLQQDSYIEDQKLVLSERALTRSLSRPSSLIEQEKQRSLEKQRQDLANLQKQQAQYLEEKRRREREWEARERELREREALLAQREEEVQQGQQDLEKEREELQQKKGTYQYDLERLRAAQKQLEREQEQLRREAERLSQRQTERDLCQVSHPHTKLMRIPSFFPSPEEPPSPSAPSIAKSGSLDSELSVSPKRNSISRTHKDKGPFHILSSTSQTNKGPEGQSQAPASTSASTRLFGLTKPKEKKEKKKKNKTSRSQPGDGPASEVSAEGEEIFC

SEQ ID NO: 9927 - protein, 2817 aa, Homo sapiens [sequence omitted]

SEQ ID NO: 9928 - protein, 551 aa, Homo sapiens
MEEELPLFSGDSGKPVQATLSSLKMLDVGKWPIFSLCSEEELQLIRQACVFGSAGNEVLYTTVNDEIFVLGTNCCGCLGLGDVQSTIEPRRLDSLNGKKIACLSYGSGPHIVLATTEGEVFTWGHNAYSQLGNGTTNHGLVPCHISTNLSNKQVIEVACGSYHSLVLTSDGEVFAWGYNNSGQVGSGSTVNQPIPRRVTGCLQNKVVVTIACGQMCCMAVVDTGEVYVWGYNGNGQLGLGNSGNQPTPCRVAALQGIRVQRVACGYAHTLVLTDEGQVYAWGANSYGQLGTGNKSNQSYPTPVTVEKDRIIEIAACHSTHTSAAKTQGGHVYMWGQCRGQSVILPHLTHFSCTDDVFACFATPAVTWRLLSVEPDDHLTVAESLKREFDNPDTADLKFLVDGKYIYAHKVLLKIRCEHFRSSLEDNEDDIVEMSEFSYPVYRAFLEYLYTDSISLSPEEAVGLLDLATFYRENRLKKLCQQTIKQGICEENAIALLSAAVKYDAQDLEEFCFRFCINHLTVVTQTSGFAEMDHDLLKNFISKASRVGAFKN

SEQ ID NO: 9929 - protein, 775 aa, Homo sapiens
AATHPQMVGPEDAGACSGRNPKLLPVPAPDPVGQDRKVIRATGGFGGGVGAVEPPEEADEEEETPPRQLLQRYLAAAGEQLEPGLCYCPLPAGQAGAPPPSAAPRSDACLLGSGSKHRGAEVADGRAPRHEGMTNGDSGFLPGRDCRDLEEARGLARAGGRESRRRRPYGRLRLEGPGDEDADGAGSPSDWASPLEDPLRSCCLVAADAQEPEGAGSDSGDSPASSCSSSEDSEQRGVGAGGPEEGAPPATSAERTNGGAEPRLGFSDIHFNSRNTFQVSRGQSARDHLPPAGPPVPLPAAEQGPAGASARARRSGGFADFFTRNLFPKRTKELKSVVHSAPGWKLFGKVPPRENLQKTSKIIQQEYEARTGRTCKPPPQSSRRKNFEFEPLSTTALILEDRPSNLPAKSVEEALRHRQEYDEMVAEAKKREIKEAHKRKRIMKERFKQEENIASAMVIWINEILPNWEVMRSTRRVRELWWQGLPPSVRGKVWSLAVGNELNITPELYEIFLSRAKERWKSFSETSSENDTEGVSVADREASLELIKLDISRTFPSLYIFQKGGPYHDVLHSILGAYTCYRPDVGYVQGMSFIAAVLILNLEEADAFIAFANLLNKPCQLAFFRVDHSMMLKYFATFEVFFEENLSKLFLHFKSYSLTPDIYLIDWIFTLYSKSLPLDLACRVWDVFCRDGEEFLFRTGLGILRLYEDILLQMDFIHIAQFLTKLPEDITSEKLFSCIAAIQMQNSTKKWTQVFASVMKDIKEGDKNSSPALKS

SEQ ID NO: 9930 - protein, 319 aa, Homo sapiens
MAICPELAQTDKSALANLSDETETLKNFTDEVQTSSSFSSSGGRQSSPLTSGSKLEREKQTPSLEQGDTQSELLDYKNYEKKLSKKWINYLKLKDSNFERHQPDTKLPTEITRVSDEELNALQSYCTMKINLIHRRGDSKKKTSSRHKKLHLGLDVEASERDAFSCTVPDELLNRIYFKNMRTTPKQEAAAKQHISYQCPYCNRKRAELALSAFLKQKKTLLESFLLQERIDEHLHTKDFLTRIGEAHQDFPRLSDDPRIIWKRLTEKSHIRYSGFERSETEQKMQRDGNSACHLPFSLPFLKRLTLIKPELVIVNDNV

SEQ ID NO: 9931 - protein, 2499 aa, Homo sapiens
METPGVVNGFGEWSDSTKNNRNLCPPDRNTSFVVSGEVSRYVVWTGMESLVGSWVQREQHYSSVSGVDKQVTNSSSVDRGWVTHSVCGDSALMEAEEAQRGASPPISAIEEFSIIPKAPMRSSQVSALGLEAQEDEDPSYKWREEHRLSATQQSELRDVCDYAIETMPSFPKEGSADVEPNQESLVAEACDTPEHWEAVPQSLAGRQARTLAPPELWACPIQSEHLDMAPFSSDLGGEEEEVEFWPGLTSLTLGSGQAEEEEETSSDNSGQTRYYSPCEEHPAETNQNEGAESGTIRQGEELPSEELQESQGLLHPQEVQVLEEQGQQEAGFRGEGTLREDVCADGLLGEEQMIEQVNDEKGEQKQKQEQVQDVMLGRQGERMGLTGEPEGLNDGEWEQEDMERKAQGQGGPEQGEERKRELQVPEENRADSQDEKSQTFLGKSEEVTGKQEDHGIKEKGVPVSGQEAKEPESWDGGRLGAVGRARSREEENEHHGPSMPALIAPEDSPHCDLFPGASYLVTQIPGTQTESRAEELSPAALSPSLEPIRCSHQPISLLGSFLTEESPDKEIDQNSQQEGSRLRKGTVSSQGTEVVFASASVTPPRTPDSAPPSPAEAYPITPASVSARPPVAFPRRETSCAARAPETASAPLSMDDPSPCGTSEMCPAALYGFPSTGTSPPRPPANSTGTVQHLRSDSFPGSHRTEQTPDLVGMLLSYSHSELPQRPPKPAIYSSVTPRRDRRSGRDYSTVSASPTALSTLKQDSQESISNLERPSSPPSIQPWVSPHNPAFATESPAYGSSPSFVSMEDVRIHEPLPPPPPQRRDTHPSVVETDGHARVVVPTLKQHSHPPPLALGSGLHAPHKGPLPQASDPAVARQHRPLPSTPDSSHHAQATPRWRYNKPLPPTPDLPQPHLPPISAPGSSRIYRPLPPLPIIDPPTEPPPLPPKSRGRSRSTWGGHMNSGGHAKTRPACQDWTVPLPASAGRTSWPPATARSTESFTSTSRSKSEVSPGMAFSNMTNFLCPSSPTTPWTPELQGPTSKDEAGVSEHPEAPAREPLRRTTPQQGASGPGRSPVGQARQPEKPSHLHLEKASSWPHRRDSGRPPGDSSGQAVAPSEGANKHKGWSRQGLRRPSILPEGSSGFLTFSLLASLTCVPNLNTERAPKCPPSSLGCSSFFFPSISLSLPQPAPSLDVPRSSLALSIPLKSQLSSPFPLLDSRGPAVEKHPGPSDTVVFREKKPKEVMGGFSRRCSKLINSSQLLYQEYSDVVLNKEIQSQQRLESLSETPGPSSPRQPRKALVSSESYLQRLSMASSGSLWQEIPVVRNSTVLLSMTHEDQKLQEVKFELIVSEASYLRSLNIAVDHFQLSTSLRATLSNQEHQWLFSRLQDVRDVSATFLSDLEENFENNIFSFQVCDVVLNHAPDFRRVYLPYVTNQTYQERTFQSLMNSNSNFREVLEKLESDPVCQRLSLKSFLILPFQRITRLKLLLQNILKRTQPGSSEEAEATKAHHALEQLIRDCNNNVQSMRRTEELIYLSQKIEFECKIFPLISQSRWLVKSGELTALEFSASPGLRRKLNTRPVHLHLFNDCLLLSRPREGSRFLVFDHAPFSSIRGEKCEMKLHGPHKNLFRLFLRQNTQGAQAEFLFRTETQSEKLRWISALAMPREELDLLECYSDPLHSGPLRLVVTCAFGFQTQGCVFSTACCGQCYCGDRQSSLDAMEEPGATPQPYLGLVLEELRRVVAALPESMRPDENPYGFPSELVVCAAVIGFFVVLLFLWRSFRSVRSRLYVGREQKLGATLSGLIEEKCKLLEKFSLIQKEYEGYEVESSLEDASFEKAAAEEARSLEATCEKLNRSNSELEDEILCLEKDLKEEKSKHSQQDELMADISKSIQSLEDESKSLKSQIAEAKIICKTFKMSEERRAIAIKDALNENSQLQTSHKQLFQQEAEVWKGQVSELNKQKITFEDSKVHAEQVLNDKENHIKTLTGHLPMMKDQAAVLEEDTTDDDNLELEVNSQWENGANLDDPLKGALKKLIHAAKLNVSLKSLEGERNHIIIQLSEVDKTKEELTEHIKNLQTQQASLQSENIYFESENQKLQQKLKIMTEFYQENEMKLYRKLTVEENYRIEEEEKLSRVEEKISRATEGLETYRKLAKDLEEELERTVHFYQKQVISYEKRGHDNWLAARTAERNLSDLRKENAHNKQKLTETELKFELLEKDPNALDVSNTAFGREHSPCSPSPLGRPSSETRAFPSPQTLLEDPLRLSPVLPGGGGRGPSSPGNPLDHQITNERGEPSYDRLIDPHRAPSDTGSLSSPVEQDRRMMFPPPGQSYPDSTLPPQREDRFYSNSERLSGPAEPRSFKMTSLDKMDRSMPSEMESSRNDAKDDLGNLNVPDSSLPAENEATGPGFIPPPLAPVRGPLFPVDTRGPFMRRGPPFPPPPPGTMFGASRGYFPPRDFPGPPHAPFAMRNIYPPRGLPPYLHPRPGFYPNPTF

SEQ ID NO: 9932 - protein, 882 aa, Homo sapiens
MEPAPARSPRPQQDPARPQEPTMPPPETPSEGRQPSPSPSPTERAPASEEEFQFLRCQQCQAEAKCPKLLPCLHTLCSGCLEASGMQCPICQAPWPLGADTPALDNVFFESLQRRLSVYRQIVDAQAVCTRCKESADFWCFECEQLLCAKCFEAHQWFLKHEARPLAELRNQSVREFLDGTRKTNNIFCSNPNHRTPTLTSIYCRGCSKPLCCSCALLDSSHSELKCDISAEIQQRQEELDAMTQALQEQDSAFGAVHAQMHAAVGQLGRARAETEELIRERVRQVVAHVRAQERELLEAVDARYQRDYEEMASRLGRLDAVLQRIRTGSALVQRMKCYASDQEVLDMHGFLRQALCRLRQEEPQSLQAAVRTDGFDEFKVRLQDLSSCITQGKDAAVSKKASPEAASTPRDPIDVDLPEEAERVKAQVQALGLAEAQPMAVVQSVPGAHPVPVYAFSIKGPSYGEDVSNTTTAQKRKCSQTQCPRKVIKMESEEGKEARLARSSPEQPRPSTSKAVSPPHLDGPPSPRSPVIGSEVFLPNSNHVASGAGEAEERVVVISSSEDSDAENSSSRELDDSSSESSDLQLEGPSTLRVLDENLADPQAEDRPLVFFDLKIDNETQKISQLAAVNRESKFRVVIQPEALFSIYSKAVSLEVGLQHFLSFLSSMRRPILACYKLWGPGLPNFFRALEDINRLWEFQEAISGFLAALPLIRERVPGASSFKLKNLAQTYLARNMSERSAMAAVLAMRDLCRLLEVSPGPQLAQHVYPFSSLQCFASLQPLVQAAVLPRAEARLLALHNVSFMELLSAHRRDRQGGLKKYSRYLSLQTTTLPPAQPAFNLQALGTYFEGLLEGPALARAEGVSTPLAGRGLAERASQQS

SEQ ID NO: 9933 - protein, 268 aa, Homo sapiens
MSGKANASKKNAQQLKRNPKRKKDNEEVVLSENKVRNTVKKNKNHLKDLSSEGQTKHTNLKHGKTAASKRKTWQPLSKSTRDHLQTMMESVIMTILSNSIKEKEEIQYHLNFLKKRLLQQCETLKVPPKKMEDLTNVSSLLNMERARDKANEEGLALLQEEIDKMVETTELMTGNIQSLKNKIQILASEVEEEEERVKQMHQINSSGVLSLPELSQKTLKAPTLQKEILALIPNQNALLKDLDILHNSSQMKSMSTFIEEAYKKLDAS

SEQ ID NO: 9934 - protein, 1835 aa, Homo sapiens
MANSTGKAPPDERRKGLAFLDELRQFHHSRGSPFKKIPAVGGKELDLHGLYTRVTTLGGFAKVSEKNQWGEIVEEFNFPRSCSNAAFALKQYYLRYLEKYEKVHHFGEDDDEVPPGNPKPQLPIGAIPSSYNYQQHSVSDYLRQSYGLSMDFNSPNDYNKLVLSLLSGLPNEVDFAINVCTLLSNESKHVMQLEKDPKIITLLLANAGVFDDTLGSFSTVFGEEWKEKTDRDFVKFWKDIVDDNEVRDLISDRNKSHEGTSGEWIWESLFHPPRKLGINDIEGQRVLQIAVILRNLSFEEGNVKLLAANRTCLRFLLLSAHSHFISLRQLGLDTLGNIAAELLLDPVDFKTTHLMFHTVTKCLMSRDRFLKMRGMEILGNLCKAEDNGVLICEYVDQDSYREIICHLTLPDVLLVISTLEVLYMLTEMGDVACTKIAKVEKSIDMLVCLVSMDIQMFGPDALAAVKLIEHPSSSHQMLSEIRPQAIEQVQTQTHVASAPASRAVVAQHVAPPPGIVEIDSEKFACQWLNAHFEVNPDCSVSRAEMYSEYLSTCSKLARGGILTSTGFYKCLRTVFPNHTVKRVEDSSSNGQAHIHVVGVKRRAIPLPIQMYYQQQPVSTSVVRVDSVPDVSPAPSPAGIPHGSQTIGNHFQRTPVANQSSNLTATQMSFPVQGVHTVAQTVSRIPQNPSPHTHQQQNAPVTVIQSKAPIPCEVVKATVIQNSIPQTGVPVSIAVGGGPPQSSVVQNHSTGPQPVTVVNSQTLLHHPSVIPQQSPLHTVVPGQIPSGTPVTVIQQAVPQSHMFGRVQNIPACTSTVSQGQQLITTSPQPVQTSSQQTSAGSQSQDTVIIAPPQYVTTSASNIVSATSVQNFQVATGQMVTIAGVPSPQASRVGFQNIAPKPLPSQQVSSTVVQQPIQQPQQPTQQSVVIVSQPAQQGQTYAPAIHQIVLANPAALPAGQTVQLTGQPNITPSSSPSPVPATNNQVPTAMSSSSTPQSQGPPPTVSQMLSVKRQQQQQHSPAPPPQQVQVQVQQPQQVQMQVQPQQSNAGVGQPASGESSLIKQLLLPKRGPSTPGGKLILPAPQIPPPNNARAPSPQVVYQVASNQAAGFGVQGQTPAQQLLVGQQNVQLVPSAMPPSGGVQTVPISNLQILPGPLISNSPATIFQGTSGNQVTITVVPNTSFAPATVSQGNATQLIAPAGITMSGTQTGVGLPVQTLPATQASPAGQSSCTTATPPFKGDKIICQKEEEAKEATGLHVHERKIEVMENPSCRRGATNTSNGDTKENEMHVGSLLNGRKYSDSSLPPSNSGKIQSETNQCSLISNGPSLELGENGASGKQNSEQIDMQDIKSDLRKPLVNGICDFDKGDGSHLSKNIPNHKTSNHVGNGEISPMEPQGTLDITQQDTAKGDQLERISNGPVLTLGGSSVSSIQEASNAATQQFSGTDLLNGPLASSLNSDVPQQRPSVVVSPHSTTSVIQGHQIIAVPDSGSKVSHSPALSSDVRSTNGTAECKTVKRPAEDTDRETVAGIPNKVGVRIVTISDPNNAGCSATMVAVPAGADPSTVAKVAIESAVQQKQQHPPTYVQNVVPQNTPMPPSPAVQVQGQPNSSQPSPFSGSSQPGDPMRKPGQNFMCLWQSCKKWFQTPSQVFYHAATEHGGKDVYPGQCLWEGCEPFQRQRFSFITHLQDKHCSKDALLAGLKQDEPGQAGSQKSSTKQPTVGGTSSTPRAQKAIVNHPSAALMALRRGSRNLVFRDFTDEKEGPITKHIRLTAALILKNIGKYSECGRRLLKRHENNLSVLAISNMEASSTLAKCLYELNFTVQSKEQEKDSEMLQ

SEQ ID NO: 9935 - protein, 1043 aa, Homo sapiens
MNFSVITCPNGGTNQGLLPYLMALDQYQLEEFKLCLEPQQLMDFWSAPQGHFPRIPWANLRAADPLNLSFLLDEHFPKGQAWKVVLGIFQTMNLTSLCEKVRAEMKENVQTQELQDPTQEDLEMLEAAAGNMQTQGCQDPNQEELDELEEETGNVQAQGCQDPNQEEPEMLEEADHRRKYRENMKAELLETWDNISWPKDHVYIRNTSKDEHEELQRLLDPNRTRAQAQTIVLVGRAGVGKTTLAMRAMLHWANGVLFQQRFSYVFYLSCHKIRYMKETTFAELISLDWPDFDAPIEEFMSQPEKLLFIIDGFEEIIISESRSESLDDGSPCTDWYQELPVTKILHSLLKKELVPLATLLITIKTWFVRDLKASLVNPCFVQITGFTGDDLRVYFMRHFDDSSEVEKILQQLRKNETLFHSCSAPMVCWTVCSCLKQPKVRYYDLQSITQTTTSLYAYFFSNLFSTAEVDLADDSWPGQWRALCSLAIEGLWSMNFTFNKEDTEIEGLEVPFIDSLYEFNILQKINDCGGCTTFTHLSFQEFFAAMSFVLEEPREFPPHSTKPQEMKMLLQHVLLDKEAYWTPVVLFFFGLLNKNIARELEDTLHCKISPRVMEELLKWGEELGKAESASLQFHILRLFHCLHESQEEDFTKKMLGRIFEVDLNILEDEELQASSFCLKHCKRLNKLRLSVSSHILERDLEILETSKFDSRMHAWNSICSTLVTNENLHELDLSNSKLHASSVKGLCLALKNPRCKVQKLTCKSVTPEWVLQDLIIALQGNSKLTHLNFSSNKLGMTVPLILKALRHSACNLKYLCLEKCNLSAASCQDLALFLTSIQHVTRLCLGFNRLQDDGIKLLCAALTHPKCALERLELWFCQLAAPACKHLSDALLQNRSLTHLNLSKNSLRDEGVKFLCEALGRPDGNLQSLNLSGCSFTREGCGELANALSHNHNVKILDLGENDLQDDGVKLLCEALKPHRALHTLGLAKCNLTTACCQHLFSVLSSSKSLVNLNLLGNELDTDGVKMLCKALKKSTCRLQKLG

SEQ ID NO: 9936 - protein, 1995 aa, Homo sapiens
MAAVTMSVPGRKAPPRPGPVPEAAQPFLFTPRGPSAGGGPGSGTSPQVEWTARRLVWVPSELHGFEAAALRDEGEEEAEVELAESGRRLRLPRDQIQRMNPPKFSKAEDMAELTCLNEASVLHNLRERYYSGLIYTYSGLFCVVINPYKQLPIYTEAIVEMYRGKKRHEVPPHVYAVTEGAYRSMLQDREDQSILCTGESGAGKTENTKKVIQYLAHVASSPKGRKEPGVPGELERQLLQANPILEAFGNAKTVKNDNSSRFGKFIRINFDVAGYIVGANIETYLLEKSRAIRQAKDECSFHIFYQLLGGAGEQLKADLLLEPCSHYRFLTNGPSSSPGQERELFQETLESLRVLGFSHEEIISMLRMVSAVLQFGNIALKRERNTDQATMPDNTAAQKLCRLLGLGVTDFSRALLTPRIKVGRDYVQKAQTKEQADFALEALAKATYERLFRWLVLRLNRALDRSPRQGASFLGILDIAGFEIFQLNSFEQLCINYTNEKLQQLFNHTMFVLEQEEYQREGIPWTFLDFGLDLQPCIDLIERPANPPGLLALLDEECWFPKATDKSFVEKVAQEQGGHPKFQRPRHLRDQADFSVLHYAGKVDYKANEWLMKNMDPLNDNVAALLHQSTDRLTAEIWKDVEGIVGLEQVSSLGDGPPGGRPRRGMFRTVGQLYKESLSRLMATLSNTNPSFVRCIVPNHEKRAGKLEPRLVLDQLRCNGVLEGIRICRQGFPNRILFQEFRQRYEILTPNAIPKGFMDGKQACEKMIQALELDPNLYRVGQSKIFFRAGVLAQLEEERDLKVTDIIVSFQAAARGYLARRAFQKRQQQQSALRVMQRNCAAYLKLRHWQWWRLFTKVKPLLQVTRQDEVLQARAQELQKVQELQQQSAREVGELQGRVAQLEEERARLAEQLRAEAELCAEAEETRGRLAARKQELELVVSELEARVGEEEECSRQMQTEKKRLQQHIQELEAHLEAEEGARQKLQLEKVTTEAKMKKFEEDLLLLEDQNSKLSKSGSCWKIVWPSSHPRQLRRRRRSRASISYGSNMRPQSQTWRDRLRKEEKGRQELEKLKRRLDGESSELQEQMVEQQQRAEELRAQLGRKEEELQAALARAEDEGGARAQLLKSLREAQAALAEAQEDLESERVARTKAEKQRRDLGEELEALRGELEDTLDSTNAQQELRSKREQEVTELKKTLEEETRIHEAAVQELRQRHGQALGELAEQLEQARRGKGAWEKTRLALEAEVSELRAELSSLQTARQEGEQRRRRLELQLQEVQGRAGDGERARAEAAEKLQRAQAELENVSGALNEAESKTIRLSKELSSTEAQLHDAQELLQEETRAKLALGSRVRAMEAEAAGLREQLEEEAAARERAGRELQTAQAQLSEWRRRQEEEAGALEAGEEARRRAAREAEALTQRLAEKTETVDRLERGRRRLQQELDDATMDLEQQRQLVSTLEKKQRKFDQLLAEEKAAVLRAVEERERAEAEGREREARALSLTRALEEEQEAREELERQNRALRAELEALLSSKDDVGKSVHELERACRVAEQAANDLRAQVTELEDELTAAEDAKLRLEVTVQALKTQHERDLQGRDEAGEERRRQLAKQLRDAEVERDEERKQRTLAVAARKKLEGELEELKAQMASAGQGKEEAVKQLRKMQAQMKELWREVEETRTSREEIFSQNRESEKRLKGLEAEVLRLQEELAASDRARRQAQQDRDEMADEVANGNLSKAAILEEKRQLEGRLGQLEEELEEEQSNSELLNDRYRKLLLQVESLTTELSAERSFSAKAESGRQQLERQIQELRGRLGEEDAGARARHKMTIAALESKLAQAEEQLEQETRERILSGKLVRRAEKRLKEVVLQVEEERRVADQLRDQLEKGNLRVKQLKRQLEEAEEEASRAQAGRRRLQRELEDVTESAESMNREVTTLRNRLRRGPLTFTTRTVRQVFRLEEGVASDEEAEEAQPGSGPSPEPEGSPPAHPQ

SEQ ID NO: 9937 - protein, 182 aa, Homo sapiens
EKLQRAQAELENVSGALNEAESKTIRLSKELSSTEAQLHDAQELLQEETRAKLALGSRVRAMEAEAAGLREQLEEEAAARERAGRELQTAQAQLSEWRRRQEEEAGALEAGEEARRRAAREAEALTQRLAEKTETVDRLERGRRRLQQELDDATLSPDALTDGAQPPSSLDPTGPCPRNPAL

SEQ ID NO: 9938 - protein, 655 aa, Homo sapiens
MAELGAGGDGHRGGDGAVRSETAPDSYKVQDKKNASSRPASAISGQNNNHSGNKPDPPPVLRVDDRQRLARERREEREKQLDPDRRSVSTMNLSKYVDPVISKRLSSSSATLLNSPDRARRLQLSPWESSVVNRLLTPTHSFLARSKSTAALSGEAASCSPIIMPYKAAHSRNSMDRPKLFVTPPEGSSRRRIIHGTASYKKERERENVLFLTSGTRRAVSPSNPKARQPARSRLWLPSKSLPHLPGTPRPTSSLPPGSVKAAPAQVRPPSPGNIRPVKREVKVEPEKKDPEKEPQKVANEPSLKGRAPLVKVEEATVEERTPAEPEVGPAAPAMAPAPASAPAPASAPAPAPVPTPAMVSAPSSTVNASASVKTSAGTTDPEEATRLLAEKRRLAREQREKEERERREQEELERQKREELAQRVAEERTTRREEESRRLEAEQAREKEEQLQRQAEERALREREEAERAQRQKEEEARVREEAERVRQEREKHFQREEQERLERKKRLEEIMKRTRRTEATDKKTSDQRNGDIAKGALTGGTEVSALPCTTNAPGNGKPVGSPHVVTSHQSKVTVESTPDLEKQPNENGVSVQNENFEEIINLPIGSKPSRLDVTNSESPEIPLNPILAFDDEGTLGPLPQVDGVQTQQTAEVI

SEQ ID NO: 9939 - protein, 749 aa, Homo sapiens
MAELGAGGDGHRGGDGAVRSETAPDSYKVQDKKNASSRPASAISGQNNNHSGNKPDPPPVLRVDDRQRLARERREEREKQLAAREIVWLEREERARQHYEKHLEERKKRLEEQRQKEERRRAAVEEKRRQRLEEDKERHEAVVRRTMERSQKPKQKHNRWSWGGSLHGSPSIHSADPDRRSVSTMNLSKYVDPVISKRLSSSSATLLNSPDRARRLQLSPWESSVVNRLLTPTHSFLARSKSTAALSGEAASCSPIIMPYKAAHSRNSMDRPKLFVTPPEGSSRRRIIHGTASYKKERERENVLFLTSGTRRAVSPSNPKARQPARSRLWLPSKSLPHLPGTPRPTSSLPPGSVKAAPAQVRPPSPGNIRPVKREVKVEPEKKDPEKEPQKVANEPSLKGRAPLVKVEEATVEERTPAEPEVGPAAPAMAPAPASAPAPASAPAPAPVPTPAMVSAPSSTVNASASVKTSAGTTDPEEATRLLAEKRRLAREQREKEERERREQEELERQKREELAQRVAEERTTRREEESRRLEAEQAREKEEQLQRQAEERALREREEAERAQRQKEEEARVREEAERVRQEREKHFQREEQERLERKKRLEEIMKRTRRTEATDKKTSDQRNGDIAKGALTGGTEVSALPCTTNAPGNGKPVGSPHVVTSHQSKVTVESTPDLEKQPNENGVSVQNENFEEIINLPIGSKPSRLDVTNSESPEIPLNPILAFDDEGTLGPLPQVDGVQTQQTAEVI

SEQ ID NO: 9940 - protein, 712 aa, Homo sapiens
MAELGAGGDGHRGGDGAVRSETAPDSYKVQDKKNASSRPASAISGQNNNHSGNKPDPPPVLRVDDRQRLARERREEREKQLAAREIVWLEREERARQHYEKHLEERKKRLEEQRQKEERRRAAVEEKRRQRLEEDKERHEAVVRRTMERSQKPKQKHNRWSWGGSLHGSPSIHSAARRLQLSPWESSVVNRLLTPTHSFLARSKSTAALSGEAASCSPIIMPYKAAHSRNSMDRPKLFVTPPEGSSRRRIIHGTASYKKERERENVLFLTSGTRRAVSPSNPKARQPARSRLWLPSKSLPHLPGTPRPTSSLPPGSVKAAPAQVRPPSPGNIRPVKREVKVEPEKKDPEKEPQKVANEPSLKGRAPLVKVEEATVEERTPAEPEVGPAAPAMAPAPASAPAPASAPAPAPVPTPAMVSAPSSTVNASASVKTSAGTTDPEEATRLLAEKRRLAREQREKEERERREQEELERQKREELAQRVAEERTTRREEESRRLEAEQAREKEEQLQRQAEERALREREEAERAQRQKEEEARVREEAERVRQEREKHFQREEQERLERKKRLEEIMKRTRRTEATDKKTSDQRNGDIAKGALTGGTEVSALPCTTNAPGNGKPVGSPHVVTSHQSKVTVESTPDLEKQPNENGVSVQNENFEEIINLPIGSKPSRLDVTNSESPEIPLNPILAFDDEGTLGPLPQVDGVQTQQTAEVI

SEQ ID NO: 9941 - protein, 305 aa, Homo sapiens
MDFISIQQLVSGERVEGKVLGFGHGVPDPGAWPSDWRRGPQEAVAREKLKLEEEKKKKLERFNSTRFNLDNLADLENLVQRRKKRLRHRVPPRKPEPLVKPQSQAQVEPVGLEMFLKAAAENQEYLIDKYLTDGGDPNAHDKLHRTALHWACLKGHSQLVNKLLVAGATVDARDLLDRTPVFWACRGGHLVILKQLLNQGARVNARDKIGSTPLHVAVRTRHPDCLEHLIECGAHLNAQDKEGDTALHEAVRHGSYKAMKLLLLYGAELGVRNAASVTPVQLARDWQRGIREALQAHVAHPRTRC

SEQ ID NO: 9942 - protein, 263 aa, Homo sapiens
MDFISIQQLVSGERVEGKVLGFGHGVPDPGAWPSDWRRGPQEAVAREKLKLEEEKKKKLERFNSTRFNLDNLADLENLVQRRKKRLRHRVPPRKPEPLVKLHRTALHWACLKGHSQLVNKLLVAGATVDARDLLDRTPVFWACRGGHLVILKQLLNQGARVNARDKIGSTPLHVAVRTRHPDCLEHLIECGAHLNAQDKEGDTALHEAVRHGSYKAMKLLLLYGAELGVRNAASLTPVQLARDWQRGIREALQAHVAHPRTRC

SEQ ID NO: 9943 - protein, 268 aa, Homo sapiens
MDFISIQQLVSGERVEGKVLGFGHGVPDPGAWPSDWRRGPQEAVAREKLKLEEEKKKKLERFNSTRFNLDNLADLENLVQRRKKRLRHRVPPRKPEPLVKPQSQAQVEPVGLEMFLKAAAENQEYLIDKYLTDGGDPNAHDKLHRTALHWACLKGHSQLVNKLLVAGATVDARDLLDRTPVFWACRGGHLVILKQLLNQGARVNARDKIGSTPLHVAVRTRHPDCLEHLIECGAHLNAQDKLPRLPLPPSVRFKLHWCRPVLLVGLGP

SEQ ID NO: 9944 - protein, 289 aa, Homo sapiens
SRPDGGWRALRLRGAGVRLGRSRWETGGCRGDRSGPSLLRSPAPGPSPPRRAGGPRASAAGDPARGGAAPKMSQTAMSETYDFLFKFLVIGNAGTGKSCLLHQFIEKKFKDDSNHTIGVEFGSKIINVGGKYVKLQIWDTAGQERFRSVTRSYYRGAAGALLVYDITSRETYNALTNWLTDARMLASQNIVIILCGNKKDLDADREVTFLEASRFAQENELMFLETSALTGENVEEAFVQCARKILNKIESGELDPERMGSGIQYGDAALRQLRSPRRAQAPNAQECGC

SEQ ID NO: 9945 - protein, 312 aa, Homo sapiens
LQETQTKNDFLKSEVHDLRVVLHSADKELSSVKLEYSSFKTNQEKEFNKLSERHMHVQLQLDNLRLENEKLLESKACLQDSYDNLQEIMKFEIDQLSRNLQNFKKENETLKSDLNNLMELLEAEKERNNKLSLQFEEDKENSSKEILKVLEAVRQEKQKETAKCEQQMAKVQKLEESLLATEKVISSLEKSRDSDKKVVADLMNQIQELRTSVCEKTETIDTLKQELKDINCKYNSALVDREESRVLIKKQEVDILDLKETLRLRILSEDIKRDMLCEDLLMPLTADMLTEASKKHSGCCSLPRKELPRKKP

SEQ ID NO: 9946 - protein, 4029 aa, Homo sapiens
MHNTVVLFSSSDKFTLNQDMCVVCGSFGQGAEGRLLACSQCGQCYHPYCVSIKITKVVLSKGWRCLECTVCEACGKATDPGRLLLCDDCDISYHTYCLDPPLQTVPKGGWKCKWCVWCRHCGATSAGLRCEWQNNYTQCAPCASLSSCPVCYRNYREEDLILQCRQCDRWMHAVCQNLNTEEEVENVADIGFDCSMCRPYMPASNVPSSDCCESSLVAQIVTKVKELDPPKTYTQDGVCLTESGMTQLQSLTVTVPRRKRSKPKLKLKIINQNSVAVLQTPPDIQSEHSRDGEMDDSREGELMDCDGKSESSPEREAVDDETKGVEGTDGVKKRKRKPYRPGIGGFVVRQRSRTGQGKTKRSVIRKDSSGSISEQLPCRDDGWSEQLPDTLVDESVSVTESTEKIKKRYRKRKNKLEETFPAYLQEAFFGKDLLDTSRQSKISLDNLSEDGAQLLYKTNMNTGFLDPSLDPLLSSSSAPTKSGTHGPADDPLADISEVLNTDDDILGIISDDLAKSVDHSDIGPVTDDPSSLPQPNVNQSSRPLSEEQLDGILSPELDKMVTDGAILGKLYKIPELGGKDVEDLFTAVLSPANTQPTPLPQPPPPTQLLPIHNQDAFSRMPLMNGLIGSSPHLPHNSLPPGSGLGTFSAIAQSSYPDARDKNSAFNPMASDPNNSWTSSAPTVEGENDTMSNAQRSTLKWEKEEALGEMATVAPVLYTNINFPNLKEEFPDWTTRVKQIAKLWRKASSQERAPYVQKARDNRAALRINKVQMSNDSMKRQQQQDSIDPSSRIDSELFKDPLKQRESEHEQEWKFRQQMRQKSKQQAKIEATQKLEQVKNEQQQQQQQQFGSQHLLVQSGSDTPSSGIQSPLTPQPGNGNMSPAQSFHKELFTKQPPSTPTSTSSDDVFVKPQAPPPPPAPSRIPIQDSLSQAQTSQPPSPQVFSPGSSNSRPPSPMDPYAKMVGTPRPPPVGHSFSRRNSAAPVENCTPLSSVSRPLQMNETTANRPSPVRDLCSSSTTNNDPYAKPPDTPRPVMTDQFPKSLGLSRSPVVSEQTAKGPIAAGTSDHFTKPSPRADVFQRQRIPDSYARPLLTPAPLDSGPGPFKTPMQPPPSSQDPYGSVSQASRRLSVDPYERPALTPRPIDNFSHNQSNDPYSQPPLTPHPAVNESFAHPSRAFSQPGTISRPTSQDPYSQPPGTPRPVVDSYSQSSGTARSNTDPYSQPPGTPRPTTVDPYSQQPQTPRPSTQTDLFVTPVTNQRHSDPYAHPPGTPRPGISVPYSQPPATPRPRISEGFTRSSMTRPVLMPNQDPFLQAAQNRGPALPGPLVRPPDTCSQTPRPPGPGLSDTFSRVSPSAARDPYDQSPMTPRSQSDSFGTSQTAHDVADQPRPGSEGSFCASSNSPMHSQGQQFSGVSQLPGPVPTSGVTDTQNTVNMAQADTEKLRQRQKLREIILQQQQQKKIAGRQEKGSQDSPAVPHPGPLQHWQPENVNQAFTRPPPPYPGNIRSPVAPPLGPRYAVFPKDQRGPYPPDVASMGMRPHGFRFGFPGGSHGTMPSQERFLVPPQQIQGSGVSPQLRRSVSVDMPRPLNNSQMNNPVGLPQHFSPQSLPVQQHNILGQAYIELRHRAPDGRQRLPFSAPPGSVVEASSNLRHGNFIPRPDFPGPRHTDPMRRPPQGLPNQLPVHPDLEQVPPSQQEQGHSVHSSSMVMRTLNHPLGGEFSEAPLSTSVPSETTSDNLQITTQPSDGLEEKLDSDDPSVKELDVKDLEGVEVKDLDDEDLENLNLDTEDGKVVELDTLDNLETNDPNLDDLLRSGEFDIIAYTDPELDMGDKKSMFNEELDLPIDDKLDNQCVSVEPKKREQENKTLVLSDKHSPQKKSTVTNEVKTEVLSPNSKVESKCETEKNDENKDNVDTPCSQASAHSDLNDGEKTSLHPCDPDLFEKRTNRETAGPSANVIQASTQLPAQDVINSCGITGSTPVLSSLLANEKSDNSDIRPSGSPPPPTLPASPSNHVSSLPPFIAPPGRVLDNAMNSNVTVVSRVNHVFSQGVQVNPGLIPGQSTVNHSLGTGKPATQTGPQTSQSGTSSMSGPQQLMIPQTLAQQNRERPLLLEEQPLLLQDLLDQERQEQQQQRQMQAMIRQRSEPFFPNIDFDAITDPIMKAKMVALKGINKVMAQNNLGMPPMVMSRFPFMGQVVTGTQNSEGQNLGPQAIPQDGSITHQISRPNPPNFGPGFVNDSQRKQYEEWLQETQQLLQMQQKYLEEQIGAHRKSKKALSAKQRTAKKAGREFPEEDAEQLKHVTEQQSMVQKQLEQIRKQQKEHAELIEDYRIKQQQQCAMAPPTMMPSVQPQPPLIPGATPPTMSQPTFPMVPQQLQHQQHTTVISGHTSPVRMPSLPGWQPNSAPAHLPLNPPRIQPPIAQLPIKTCTPAPGTVSNANPQSGPPPRVEFDDNNPFSESFQERERKERLREQQERQRIQLMQEVDRQRALQQRMEMEQHGMVGSEISSSRTSVSQIPFYSSDLPCDFMQPLGPLQQSPQHQQQMGQVLQQQNIQQGSINSPSTQTFMQTNERRQVGPPSFVPDSPSIPVGSPNFSSVKQGHGNLSGTSFQQSPVRPSFTPALPAAPPVANSSLPCGQDSTITHGHSYPGSTQSLIQLYSDIIPEEKGKKKRTRKKKRDDDAESTKAPSTPHSDITAPPTPGISETTSTPAVSTPSELPQQADQESVEPVGPSTPNMAAGQLCTELENKLPNSDFSQATPNQQTYANSEVDKLSMETPAKTEEIKLEKAETESCPGQEEPKLEEQNGSKVEGNAVACPVSSAQSPPHSAGAPAAKGDSGNELLKHLLKNKKSSSLLNQKPEGSICSEDDCTKDNKLVEKQNPAEGLQTLGAQMQGGFGCGNQLPKTDGGSETKKQRSKRTQRTGEKAAPRSKKRKKDEEEKQAMYSSTDTFTHLKQVRQLSLLPLMEPIIGVNFAHFLPYGSGQFNSGNRLLGTFGSATLEGVSDYYSQLIYKQNNLSNPPTPPASLPPTPPPMACQKMANGFATTEELAGKAGVLVSHEVTKTLGPKPFQLPFRPQDDLLARALAQGPKTVDVPASLPTPPHNNQEELRIQDHCGDRDTPDSFVPSSSPESVVGVEVSRYPDLSLVKEEPPEPVPSPIIPILPSTAGKSSESRRNDIKTEPGTLYFASPFGPSPNGPRSGLISVAITLHPTAAENISSVVAAFSDLLHVRIPNSYEVSSAPDVPSMGLVSSHRINPGLEYRQHLLLRGPPPGSANPPRLVSSYRLKQPNVPFPPTSNGLSGYKDSSHGIAESAALRPQWCCHCKVVILGSGVRKSFKDLTLLNKDSRESTKRVEKDIVFCSNNCFILYSSTAQAKNSENKESIPSLPQSPMRETPSKAFHQYSNNISTLDVHCLPQLPEKASPPASPPIAFPPAFEAAQVEAKPDELKVTVKLKPRLRAVHGGFEDCRPLNKKWRGMKWKKWSIHIVIPKGTFKPPCEDEIDEFLKKLGTSLKPDPVPKDYRKCCFCHEEGDGLTDGPARLLNLDLDLWVHLNCALWSTEVYETQAGALINVELALRRGLQMKCVFCHKTGATSGCHRFRCTNIYHFTCAIKAQCMFFKDKTMLCPMHKPKGIHEQELSYFAVFRRVYVQRDEVRQIASIVQRGERDHTFRVGSLIFHTIGQLLPQQMQAFHSPKALFPVGYEASRLYWSTRYANRRCRYLCSIEEKDGRPVFVIRIVEQGHEDLVLSDISPKGVWDKILEPVACVRKKSEMLQLFPAYLKGEDLFGLTVSAVARIAESLPGVEACENYTFRYGRNPLMELPLAVNPTGCARSEPKMSAHVKRFVLRPHTLNSTSTSKSFQSTVTGELNAPYSKQFVHSKSSQYRKMKTEWKSNVYLARSRIQGLGLYAARDIEKHTMVIEYIGTIIRNEVANRKEKLYESQNRGVYMFRMDNDHVIDATLTGGPARYINHSCAPNCVAEVVTFERGHKIIISSSRRIQKGEELCYDYKFDFEDDQHKIPCHCGAVNCRKWMN

SEQ ID NO: 9947 - protein, 4911 aa, Homo sapiens
MSSEEDKSVEQPQPPPPPPEEPGAPAPSPAAADKRPRGRPRKDGASPFQRARKKPRSRGKTAVEDEDSMDGLETTETETIVETEIKEQSAEEDAEAEVDNSKQLIPTLQRSVSEESANSLVSVGVEAKISEQLCAFCYCGEKSSLGQGDLKQFRITPGFILPWRNQPSNKKDIDDNSNGTYEKMQNSAPRKQRGQRKERSPQQNIVSCVSVSTQTASDDQAGKLWDELSLVGLPDAIDIQALFDSTGTCWAHHRCVEWSLGVCQMEEPLLVNVDKAVVSGSTERCAFCKHLGATIKCCEEKCTQMYHYPCAAGAGTFQDFSHIFLLCPEHIDQAPERSKEDANCAVCDSPGDLLDQFFCTTCGQHYHGMCLDIAVTPLKRAGWQCPECKVCQNCKQSGEDSKMLVCDTCDKGYHTFCLQPVMKSVPTNGWKCKNCRICIECGTRSSSQWHHNCLICDNCYQQQDNLCPFCGKCYHPELQKDMLHCNMCKRWVHLECDKPTDHELDTQLKEEYICMYCKHLGAEMDPLQPGEEVEIAELTTDYNNEMEVEGPEDQMVFSEQAANKDVNGQESTPGIVPDAVQVHTEEQQKSHPSESLDTDSLLIAVSSQHTVNTELEKQISNEVDSEDLKMSSEVKHICGEDQIEDKMEVTENIEVVTHQITVQQEQLQLLEEPETVVSREESRPPKLVMESVTLPLETLVSPHEESISLCPEEQLVIERLQGEKEQKENSELSTGLMDSEMTPTIEGCVKDVSYQGGKSIKLSSETESSFSSSADISKADVSSSPTPSSDLPSHDMLHNYPSALSSSAGNIMPTTYISVTPKIGMGKPAITKRKFSPGRPRSKQGAWSTHNTVSPPSWSPDISEGREIFKPRQLPGSAIWSIKVGRGSGFPGKRRPRGAGLSGRGGRGRSKLKSGIGAVVLPGVSTADISSNKDDEENSMHNTVVLFSSSDKFTLNQDMCVVCGSFGQGAEGRLLACSQCGQCYHPYCVSIKITKVVLSKGWRCLECTVCEACGKATDPGRLLLCDDCDISYHTYCLDPPLQTVPKGGWKCKWCVWCRHCGATSAGLRCEWQNNYTQCAPCASLSSCPVCYRNYREEDLILQCRQCDRWMHAVCQNLNTEEEVENVADIGFDCSMCRPYMPASNVPSSDCCESSLVAQIVTKVKELDPPKTYTQDGVCLTESGMTQLQSLTVTVPRRKRSKPKLKLKIINQNSVAVLQTPPDIQSEHSRDGEMDDSREGELMDCDGKSESSPEREAVDDETKGVEGTDGVKKRKRKPYRPGIGGFVVRQRSRTGQGKTKRSVIRKDSSGSISEQLPCRDDGWSEQLPDTLVDESVSVTESTEKIKKRYRKRKNKLEETFPAYLQEAFFGKDLLDTSRQSKISLDNLSEDGAQLLYKTNMNTGFLDPSLDPLLSSSSAPTKSGTHGPADDPLADISEVLNTDDDILGIISDDLAKSVDHSDIGPVTDDPSSLPQPNVNQSSRPLSEEQLDGILSPELDKMVTDGAILGKLYKIPELGGKDVEDLFTAVLSPANTQPTPLPQPPPPTQLLPIHNQDAFSRMPLMNGLIGSSPHLPHNSLPPGSGLGTFSAIAQSSYPDARDKNSAFNPMASDPNNSWTSSAPTVEGENDTMSNAQRSTLKWEKEEALGEMATVAPVLYTNINFPNLKEEFPDWTTRVKQIAKLWRKASSQERAPYVQKARDNRAALRINKVQMSNDSMKRQQQQDSIDPSSRIDSELFKDPLKQRESEHEQEWKFRQQMRQKSKQQAKIEATQKLEQVKNEQQQQQQQQFGSQHLLVQSGSDTPSSGIQSPLTPQPGNGNMSPAQSFHKELFTKQPPSTPTSTSSDDVFVKPQAPPPPPAPSRIPIQDSLSQAQTSQPPSPQVFSPGSSNSRPPSPMDPYAKMVGTPRPPPVGHSFSRRNSAAPVENCTPLSSVSRPLQMNETTANRPSPVRDLCSSSTTNNDPYAKPPDTPRPVMTDQFPKSLGLSRSPVVSEQTAKGPIAAGTSDHFTKPSPRADVFQRQRIPDSYARPLLTPAPLDSGPGPFKTPMQPPPSSQDPYGSVSQASRRLSVDPYERPALTPRPIDNFSHNQSNDPYSQPPLTPHPAVNESFAHPSRAFSQPGTISRPTSQDPYSQPPGTPRPVVDSYSQSSGTARSNTDPYSQPPGTPRPTTVDPYSQQPQTPRPSTQTDLFVTPVTNQRHSDPYAHPPGTPRPGISVPYSQPPATPRPRISEGFTRSSMTRPVLMPNQDPFLQAAQNRGPALPGPLVRPPDTCSQTPRPPGPGLSDTFSRVSPSAARDPYDQSPMTPRSQSDSFGTSQTAHDVADQPRPGSEGSFCASSNSPMHSQGQQFSGVSQLPGPVPTSGVTDTQNTVNMAQADTEKLRQRQKLREIILQQQQQKKIAGRQEKGSQDSPAVPHPGPLQHWQPENVNQAFTRPPPPYPGNIRSPVAPPLGPRYAVFPKDQRGPYPPDVASMGMRPHGFRFGFPGGSHGTMPSQERFLVPPQQIQGSGVSPQLRRSVSVDMPRPLNNSQMNNPVGLPQHFSPQSLPVQQHNILGQAYIELRHRAPDGRQRLPFSAPPGSVVEASSNLRHGNFIPRPDFPGPRHTDPMRRPPQGLPNQLPVHPDLEQVPPSQQEQGHSVHSSSMVMRTLNHPLGGEFSEAPLSTSVPSETTSDNLQITTQPSDGLEEKLDSDDPSVKELDVKDLEGVEVKDLDDEDLENLNLDTEDGKVVELDTLDNLETNDPNLDDLLRSGEFDIIAYTDPELDMGDKKSMFNEELDLPIDDKLDNQCVSVEPKKREQENKTLVLSDKHSPQKKSTVTNEVKTEVLSPNSKVESKCETEKNDENKDNVDTPCSQASAHSDLNDGEKTSLHPCDPDLFEKRTNRETAGPSANVIQASTQLPAQDVINSCGITGSTPVLSSLLANEKSDNSDIRPSGSPPPPTLPASPSNHVSSLPPFIAPPGRVLDNAMNSNVTVVSRVNHVFSQGVQVNPGLIPGQSTVNHSLGTGKPATQTGPQTSQSGTSSMSGPQQLMIPQTLAQQNRERPLLLEEQPLLLQDLLDQERQEQQQQRQMQAMIRQRSEPFFPNIDFDAITDPIMKAKMVALKGINKVMAQNNLGMPPMVMSRFPFMGQVVTGTQNSEGQNLGPQAIPQDGSITHQISRPNPPNFGPGFVNDSQRKQYEEWLQETQQLLQMQQKYLEEQIGAHRKSKKALSAKQRTAKKAGREFPEEDAEQLKHVTEQQSMVQKQLEQIRKQQKEHAELIEDYRIKQQQQCAMAPPTMMPSVQPQPPLIPGATPPTMSQPTFPMVPQQLQHQQHTTVISGHTSPVRMPSLPGWQPNSAPAHLPLNPPRIQPPIAQLPIKTCTPAPGTVSNANPQSGPPPRVEFDDNNPFSESFQERERKERLREQQERQRIQLMQEVDRQRALQQRMEMEQHGMVGSEISSSRTSVSQIPFYSSDLPCDFMQPLGPLQQSPQHQQQMGQVLQQQNIQQGSINSPSTQTFMQTNERRQVGPPSFVPDSPSIPVGSPNFSSVKQGHGNLSGTSFQQSPVRPSFTPALPAAPPVANSSLPCGQDSTITHGHSYPGSTQSLIQLYSDIIPEEKGKKKRTRKKKRDDDAESTKAPSTPHSDITAPPTPGISETTSTPAVSTPSELPQQADQESVEPVGPSTPNMAAGQLCTELENKLPNSDFSQATPNQQTYANSEVDKLSMETPAKTEEIKLEKAETESCPGQEEPKLEEQNGSKVEGNAVACPVSSAQSPPHSAGAPAAKGDSGNELLKHLLKNKKSSSLLNQKPEGSICSEDDCTKDNKLVEKQNPAEGLQTLGAQMQGGFGCGNQLPKTDGGSETKKQRSKRTQRTGEKAAPRSKKRKKDEEEKQAMYSSTDTFTHLKQQNNLSNPPTPPASLPPTPPPMACQKMANGFATTEELAGKAGVLVSHEVTKTLGPKPFQLPFRPQDDLLARALAQGPKTVDVPASLPTPPHNNQEELRIQDHCGDRDTPDSFVPSSSPESVVGVEVSRYPDLSLVKEEPPEPVPSPIIPILPSTAGKSSESRRNDIKTEPGTLYFASPFGPSPNGPRSGLISVAITLHPTAAENISSVVAAFSDLLHVRIPNSYEVSSAPDVPSMGLVSSHRINPGLEYRQHLLLRGPPPGSANPPRLVSSYRLKQPNVPFPPTSNGLSGYKDSSHGIAESAALRPQWCCHCKVVILGSGVRKSFKDLTLLNKDSRESTKRVEKDIVFCSNNCFILYSSTAQAKNSENKESIPSLPQSPMRETPSKAFHQYSNNISTLDVHCLPQLPEKASPPASPPIAFPPAFEAAQVEAKPDELKVTVKLKPRLRAVHGGFEDCRPLNKKWRGMKWKKWSIHIVIPKGTFKPPCEDEIDEFLKKLGTSLKPDPVPKDYRKCCFCHEEGDGLTDGPARLLNLDLDLWVHLNCALWSTEVYETQAGALINVELALRRGLQMKCVFCHKTGATSGCHRFRCTNIYHFTCAIKAQCMFFKDKTMLCPMHKPKGIHEQELSYFAVFRRVYVQRDEVRQIASIVQRGERDHTFRVGSLIFHTIGQLLPQQMQAFHSPKALFPVGYEASRLYWSTRYANRRCRYLCSIEEKDGRPVFVIRIVEQGHEDLVLSDISPKGVWDKILEPVACVRKKSEMLQLFPAYLKGEDLFGLTVSAVARIAESLPGVEACENYTFRYGRNPLMELPLAVNPTGCARSEPKMSAHVKRFVLRPHTLNSTSTSKSFQSTVTGELNAPYSKQFVHSKSSQYRKMKTEWKSNVYLARSRIQGLGLYAARDIEKHTMVIEYIGTIIRNEVANRKEKLYESQNRGVYMFRMDNDHVIDATLTGGPARYINHSCAPNCVAEVVTFERGHKIIISSSRRIQKGEELCYDYKFDFEDDQHKIPCHCGAVNCRKWMN

SEQ ID NO: 9948 - protein, 4025 aa, Homo sapiens
MHNTVVLFSSSDKFTLNQDMCVVCGSFGQGAEGRLLACSQCGQCYHPYCVSIKITKVVLSKGWRCLECTVCEACGKATDPGRLLLCDDCDISYHTYCLDPPLQTVPKGGWKCKWCVWCRHCGATSAGLRCEWQNNYTQCAPCASLSSCPVCYRNYREEDLILQCRQCDRWMHAVCQNLNTEEEVENVADIGFDCSMCRPYMPASNVPSSDCCESSLVAQIVTKVKELDPPKTYTQDGVCLTESGMTQLQSLTVTVPRRKRSKPKLKLKIINQNSVAVLQTPPDIQSEHSRDGEMDDSREGELMDCDGKSESSPEREAVDDETKGVEGTDGVKKRKRKPYRPGIGGFMVRQRSRTGQGKTKRSVIRKDSSGSISEQLPCRDDGWSEQLPDTLVDESVSVTESTEKIKKRYRKRKNKLEETFPAYLQEAFFGKDLLDTSRQSKISLDNLSEDGAQLLYKTNMNTGFLDPSLDPLLSSSSAPTKSGTHGPADDPLADISEVLNTDDDILGIISDDLAKSVDHSDIGPVTDDPSSLPQPNVNQSSRPLSEEQLDGILSPELDKMVTDGAILGKLYKIPELGGKDVEDLFTAVLSPANTQPTPLPQPPPPTQLLPIHNQDAFSRMPLMNGLIGSSPHLPHNSLPPGSGLGTFSAIAQSSYPDARDKNSAFNPMASDPNNSWTSSAPTVEGENDTMSNAQRSTLKWEKEEALGEMATVAPVLYTNINFPNLKEEFPDWTTRVKQIAKLWRKASSQERAPYVQKARDNRAALRINKVQMSNDSMKRQQQQDSIDPSSRIDSELFKDPLKQRESEHEQEWKFRQQMRQKSKQQAKIEATQKLEQVKNEQQQQQQQQFGSQHLLVQSGSDTPSSGIQSPLTPQPGNGNMSPAQSFHKELFTKQPPSTPTSTSSDDVFVKPQAPPPPPAPSRIPIQDSLSQAQTSQPPSPQVFSPGSSNSRPPSPMDPYAKMVGTPRPPPVGHSFSRRNSAAPVENCTPLSSVSRPLQMNETTANRPSPVRDLCSSSTTNNDPYAKPPDTPRPVMTDQFPKSLGLSRSPVVSEQTAKGPIAAGTSDHFTKPSPRADVFQRQRIPDSYARPLLTPAPLDSGPGPFKTPMQPPPSSQDPYGSVSQASRRLSVDPYERPALTPRPIDNFSHNQSNDPYSQPPLTPHPAVNESFAHPSRAFSQPGTISRPTSQDPYSQPPGTPRPVVDSYSQSSGTARSNTDPYSQPPGTPRPTTVDPYSQQPQTPRPSTQTDLFVTPVTNQRHSDPYAHPPGTPRPGISVPYSQPPATPRPRISEGFTRSSMTRPVLMPNQDPFLQAAQNRGPALPGPLVRPPDTCSQTPRPPGPGLSDTFSRVSPSAARDPYDQSPMTPRSQSDSFGTSQTAHDVADQPRPGSEGSFCASSNSPMHSQGQQFSGVSQLPGPVPTSGVTDTQNTVNMAQADTEKLRQRQKLREIILQQQQQKKIAGRQEKGSQDSPAVPHPGPLQHWQPENVNQAFTRPPPPYPGNIRSPVAPPLGPRYAVFPKDQRGPYPPDVASMGMRPHGFRFGFPGGSHGTMPSQERFLVPPQQIQGSGVSPQLRRSVSVDMPRPLNNSQMNNPVGLPQHFSPQSLPVQQHNILGQAYIELRHRAPDGRQRLPFSAPPGSVVEASSNLRHGNFIPRPDFPGPRHTDPMRRPPQGLPNQLPVHPDLEQVPPSQQEQGHSVHSSSMVMRTLNHPLGGEFSEAPLSTSVPSETTSDNLQITTQPSDGLEEKLDSDDPSVKELDVKDLEGVEVKDLDDEDLENLNLDTEDGKVVELDTLDNLETNDPNLDDLLRSGEFDIIAYTDPELDMGDKKSMFNEELDLPIDDKLDNQCVSVEPKKKEQENKTLVLSDKHSPQKKSTVTNEVKTEVLSPNSKVESKCETEKNDENKDNVDTPCSQASAHSDLNDGEKTSLHPCDPDLFEKRTNRETAGPSANVIQASTQLPAQDVINSCGITGSTPVLSSLLANEKSDNSDIRPSGSPPPPTLPASPSNHVSSLPPFIAPPGRVLDNAMNSNVTVVSRVNHVFSQGVQVNPGLIPGQSTVNHSLGTGKPATQTGPQTSQSGTSSMSGPQQLMIPQTLAQQNRERPLLLEEQPLLLQDLLDQERQEQQQQRQMQAMIRQRSEPFFPNIDFDAITDPIMKAKMVALKGINKVMAQNNLGMPPMVMSRFPFMGQVVTGTQNSEGQNLGPQAIPQDGSITHQISRPNPPNFGPGFVNDSQRKQYEEWLQETQQLLQMQQKYLEEQIGAHRKSKKALSAKQRTAKKAGREFPEEDAEQLKHVTEQQSMVQKQLEQIRKQQKEHAELIEDYRIKQQQQCAMAPPTMMPSVQPQPPLIPGATPPTMSQPTFPMVPQQLQHQQHTTVISGHTSPVRMPSLPGWQPNSAPAHLPLNPPRIQPPIAQLPIKTCTPAPGTVSNANPQSGPPPRVEFDDNNPFSESFQERERKERLREQQERQRIQLMQEVDRQRALQQRMEMEQHGMVGSEISSSRTSVSQIPFYSSDLPCDFMQPLGPLQQSPQHQQQMGQVLQQQNIQQGSINSPSTQTFMQTNERRQVGPPSFVPDSPSIPVGSPNFSSVKQGHGNLSGTSFQQSPVRPSFTPALPAAPPVANSSLPCGQDSTITHGHSYPGSTQSLIQLYSDIIPEEKGKKKRTRKKKRDDDAESTKAPSTPHSDITAPPTPGISETTSTPAVSTPSELPQQADQESVEPVGPSTPNMAAGQLCTELENKLPNSDFSQATPNQQTYANSEVDKLSMETPAKTEEIKLEKAETESCPGQEEPKLEEQNGSKVEGNAVACPVSSAQSPPHSAGAPAAKGDSGNELLKHLLKNKKSSSLLNQKPEGSICSEDDCTKDNKLVEKQNPAEGLQTLGAQMQGGFGCGNQLPKTDGGSETKKQRSKRTQRTGEKAAPRSKKRKKDEEEKQAMYSSTDTFTHLKQVRQLSLLPLMEPIIGVNFAHFLPYGSGQFNSGNRLLGTFGSATLEGVSDYYSQLIYKQNNLSNPPTPPASLPPTPPPMACQKMANGFATTEELAGKAGVLVSHEVTKTLGPKPFQLPFRPQDDLLARALAQGPKTVDVPASLPTPPHNNQEELRIQDHCGDRDTPDSFVPSSSPESVVGVEVSRYPDLSLVKEEPPEPVPSPIIPILPSTAGKSSESRRNDIKTEPGTLYFASPFGPSPNGPRSGLISVAITLHPTAAENISSVVAAFSDLLHVRIPNSYEVSSAPDVPSMGLVSSHRINPGLEYRQHLLLRGPPPGSANPPRLVSSYRLKQPNVPFPPTSNGLSGYKDSSHGIAESAALRPQWCCHCKVVILGSGVRKSFKDLTLLNKDSRESTKRVEKDIVFCSNNCFILYSSTAQAKNSENKESIPSLPQSPMRETPSKAFHQYSNNISTLDVHCLPQLPEKASPPASPPIAFPPAFEAAQVEAKPDELKVTVKLKPRLRAVHGGFEDCRPLNKKWRGMKWKKWSIHIVIPKGTFKPPCEDEIDEFLKKLGTSLKPDPVPKDYRKCCFCHEEGDGLTDGPARLLNLDLDLWVHLNCALWSTEVYETQAGALINVELALRRGLQMKCVFCHKTGATSGCHRFRCTNIYHFTCAIKAQCMFFKDKTMLCPMHKPKGIHEQELSYFAVFRRVYVQRDEVRQIASIVQRGERDHTFRVGSLIFHTIGQLLPQQMQAFHSPKALFPVGYEASRLYWSTRYANRRCRYLCSIEEKDGRPVFVIRIVEQGHEDLVLSDISPKGVWDKILEPVACVRKKSEMLQLFPAYLKGEDLFGLTVSAVARIAESLPGVEACENYTFRYGRNPLMELPLAVNPTGCARSEPKMSAHVKRPHTLNSTSTSKSFQSTVTGELNAPYSKQFVHSKSSQYRKMKTEWKSNVYLARSRIQGLGLYAARDIEKHTMVIEYIGTIIRNEVANRKEKLYESQNRGVYMFRMDNDHVIDATLTGGPARYINHSCAPNCVAEVVTFERGHKIIISSSRRIQKGEELCYDYKFDFEDDQHKIPCHCGAVNCRKWMN

SEQ ID NO: 9949 - protein, 1436 aa, Homo sapiens
MLHLSAAPPAPPPEVTATARPCLCSVGRRGDGGKMAAAGALERSFVELSGAERERPRHFREFTVCSIGTANAVAGAVKYSESAGGFYYVESGKLFSVTRNRFIHWKTSGDTLELMEESLDINLLNNAIRLKFQNCSVLPGGVYVSETQNRVIILMLTNQTVHRLLLPHPSRMYRSELVVDSQMQSIFTDIGKVDFTDPCNYQLIPAVPGISPNSTASTAWLSSDGEALFALPCASGGIFVLKLPPYDIPGMVSVVELKQSSVMQRLLTGWMPTAIRGDQSPSDRPLSLAVHCVEHDAFIFALCQDHKLRMWSYKEQMCLMVADMLEYVPVKKDLRLTAGTGHKLRLAYSPTMGLYLGIYMHAPKRGQFCIFQLVSTESNRYSLDHISSLFTSQETLIDFALTSTDIWALWHDAENQTVVKYINFEHNVAGQWNPVFMQPLPEEEIVIRDDQDPREMYLQSLFTPGQFTNEALCKALQIFCRGTERNLDLSWSELKKEVTLAVENELQGSVTEYEFSQEEFRNLQQEFWCKFYACCLQYQEALSHPLALHLNPHTNMVCLLKKGYLSFLIPSSLVDHLYLLPYENLLTEDETTISDDVDIARDVICLIKCLRLIEESVTVDMSVIMEMSCYNLQSPEKAAEQILEDMITIDVENVMEDICSKLQEIRNPIHAIGLLIREMDYETEVEMEKGFNPAQPLNIRMNLTQLYGSNTAGYIVCRGVHKIASTRFLICRDLLILQQLLMRLGDAVIWGTGQLFQAQQDLLHRTAPLLLSYYLIKWGSECLATDVPLDTLESNLQHLSVLELTDSGALMANRFVSSPQTIVELFFQEVARKHIISHLFSQPKAPLSQTGLNWPEMITAITSYLLQLLWPSNPGCLFLECLMGNCQYVQLQDYIQLLHPWCQVNVGSCRFMLGRCYLVTGEGQKALECFCQAASEVGKEEFLDRLIRSEDGEIVSTPRLQYYDKVLRLLDVIGLPELVIQLATSAITEAGDDWKSQATLRTCIFKHHLDLGHNSQAYEALTQIPDSSRQLDCLRQLVVVLCERSQLQDLVEFPYVNLHNEVVGIIESRARAVDLMTHNYYELLYAFHIYRHNYRKAGTVMFEYGMRLGREVRTLRGLEKQGNCYLAALNCLRLIRPEYAWIVQPVSGAVYDRPGASPKRNHDGECTAAPTNRQIEILELEDLEKECSLARIRLTLAQHDPSAVAVAGSSSAEEMVTLLVQAGLFDTAISLCQTFKLPLTPVFEGLAFKCIKLQFGGEAAQAEAWAWLAANQLSSVITTKESSATDEAWRLLSTYLERYKVQNNLYHHCVINKLLSHGVPLPNWLINSYKKVDAAELLRLYLNYDLLEEAVDLVSEYVDAVLGKGHQYFGIEFPLSATAPMVWLPYSSIDQLLQALGENSANSHNIALSQKILDKLEDYQQKVDKATRDLLYRRTL

SEQ ID NO: 9950 - protein, 190 aa, Homo sapiens
MAAAGALERSFVELSGAERERPRHFREFTVCSIGTANAVAGAVKYSESAGGFYYVESGKLFSVTRNRFIHWKTSGDTLELMEESLDINLLNNAIRLKFQNCSVLPGGVYVSETQNRVIILMLTNQTVHRLLLPHPSRMYRSVSWLSAISFISQITLGVTNVVLERCLLELKEIWILVIPHQAYFDSYRLK

SEQ ID NO: 9951 - protein, 674 aa, Homo sapiens
MQTSSSRSVHLSEWQKNYFAITSGICTGPKADAYRAQILRIQYAWANSEISQVCATKLFKKYAEKYSAIIDSDNVESGLNNYAENILTLAGSQQTDSDKWQSGLSINNVFKMSSVQKMMQAGKKFKDSLLEPALASVVIHKEATVFDLPKFSVCGSSQESDSLPNSAHDRDRTQDFPESNRLKLLQNAQPPMVTNTARTCPTFSAPVGESATAKFHVTPLFGNVKKENHSSAKENIGLNVFLSNQSCFPAACENPQRKSFYGSGTIDALSNPILNKACSKTEDNGPKEDSSLPTFKTAKEQLWVDQQKKYHQPQRASGSSYGGVKKSLGASRSRGILGKFVPPIPKQDGGEQNGGMQCKPYGAGPTEPAHPVDERLKNLEPKMIELIMNEIMDHGPPVNWEDIAGVEFAKATIKEIVVWPMLRPDIFTGLRGPPKGILLFGPPGTGKTLIGKCIASQSGATFFSISASSLTSKWVGEGEKMVRALFAVARCQQPAVIFIDEIDSLLSQRGDGEHESSRRIKTEFLVQLDGATTSSEDRILVVGATNRPQEIDEAARRRLVKRLYIPLPEASARKQIVINLMSKEQCCLSEEEIEQIVQQSDAFSGADMTQLCREASLGPIRSLQTADIATITPDQVRPIAYIDFENAFRTVRPSVSPKDLELYENWNKTFGCGK

SEQ ID NO: 9952 - protein, 674 aa, Homo sapiens
MQTSSSRSVHLSEWQKNYFAITSGICTGPKADAYRAQILRIQYAWANSEISQVCATKLFKKYAEKYSAIIDSDNVESGLNNYAENILTLAGSQQTDSDKWQSGLSINNVFKMSSVQKMMQAGKKFKDSLLEPALASVVIHKEATVFDLPKFSVCGSSQESDSLPNSAHDRDRTQDFPESNRLKLLQNAQPPMVTNTARTCPTFSAPVGESATAKFHVTPLFGNVKKENHSSAKENIGLNVFLSNQSCFPAACENPQRKSFYGSGTIDALSNPILNKACSKTEDNGPKEDSSLPTFKTAKEQLWVDQQKKYHQPQRASGSSYGGVKKSLGASRSRGILGKFVPPIPKQDGGEQNGGMQCKPYGAGPTEPAHPVDERLKNLEPKMIELIMNEIMDHGPPVNWEDIAGVEFAKATIKEIVVWPMLRPDIFTGLRGPPKGILLFGPPGTGKTLIGKCIASQSGATFFSISASSLTSKWVGEGEKMVRALFAVARCQQPAVIFIDEIDSLLSQRGDGEHESSRRIKTEFLVQLDGATTSSEDRILVVGATNRPQEIDEAARRRLVKRLYIPLPEASARKQIVINLMSKEQCCLSEEEIEQIVQQSDAFSGADMTQLCRGASLGPIRSLQTADIATITPDQVRPIAYIDFENAFRTVRPSVSPKDLELYENWNKTFGCGK

SEQ ID NO: 9953 - protein, 582 aa, Homo sapiens
MRVLAGESCCLSKAGTYNFLNPKGDKGKNKGPLTFTDVAIKFSLEEWQFLDTAQQNLYRDVMLENYRNLVFLGVGVSKPDLITCLEQGKEPWNMKRHKMVAKPPVVCSHFAQDLWPEQGIKDSFQKVILRSYGKYGHDNLQLRKGCESVDECKMHKGGYDELKQCLTTTPSKIFQCDKYVKVFHKFSSSNSQKIRHTGNNSFKCKECGKSFCMLSHLTKHERNHTRVNCYKCEECGKAFSVPSKLNNHKRIHTGEKPYKCEECGKAFNVSSSLNNHKRIHTGEKPYKCEECGKTFNMFSSLNNHKRIHTGEKPYKCKECGKAFNVFSSLNNHKRIHTGEKPYKCEECGKAFNQPSHLATHKRIHTGEKLYKCEECGKAFSQSSHITTHKRIHTGEKPYKCEECGKAFKVSVHLTTHKRIHTGEKPYKCEECGKAFNQSSALTTHKIIHTGERPYKCKQCGKGFSQSSTLTKHKIIHTKEKPYKCEECGKAFNQYSTLNKHKIIHAREKPYKCEECGKAFNKCDNAFYEIPNFFKHKRNADNLYKYKECDEAINNCSHFNIRELIQALKVQLLSKDLPENISL

SEQ ID NO: 9954 - protein, 527 aa, Homo sapiens
ILASKTVQEVHPGEPPFDLELFYVKYRNFSYLHCKWATMEELEKDPRIAQKIKRFRNKQAQMKHIFTEPDEDLFNPDYVEVDRILEVAHTKDAETGEEVTHYLVKWCSLPYEESTWELEEDVDPAKVKEFESLQVLPEIKHVERPASDSWQKLEKSREYKNSNQLREYQLEGMNWLLFNWYNRKNCILADEMGLGKTIQSITFLSEIFLRGIHGPFLIIAPLSTITNWEREFRTWTEMNAIVYHGSQISRQMIQQYEMVYRDAQGNPLSGVFKFHVVITTFEMILADCPELKKIHCWGRWKDILTHGRFKWHLNEKDMEMICRALLVYCVKHYKGDEKIKSFIWELITPTKDGQAQTLQNHSGLSAPVPRGRKGKKTKNQLLIPELKDADWLATCNPEVVLHDDGYKKHLKQHCNKVLLRVRMLYYLKAEILGEAAEKAFEGSPARELDVPLPDIDYMEIPVDWWDAEADKSLLIGVFKHGYERYNAMRADPALCFLEKVGMPDEKSLSAEQGVTDGTSDIPERQHR

SEQ ID NO: 9955 - protein, 1281 aa, Homo sapiens
  VARIANT 1156: Xaa = Any Amino Acid
MANWEIYMYLCCVFQGSLTFWDVTIEFALEEWQCLDMAQQNLYRNVMLENYRNLVFLGIAVSKLDLITCLKQGKEPWNMKRHEMVTKPPVISSHFTQDFWPDQSIKDSFQEIILRTYARCGHKNLRLRKDCESVNEGKMHEEAYNKLNQCWTTTQGKIFQCNKYVKVFHKYSNSNRYKIRHTKKKTFKCMKCSKSFFMLSHLIQHKRIHTRENIYKCEERGKAFKWFSTLIKHKIIHTEDKPYKYKKCGKAFNISSMFTKCKIIHTGKKPCKCEECGKVFNNSSTLMKHKIIHTGKKPYKCEECGKAFKQSSHLTRHKAIHTGEKPYKCEECGKAFNHFSALRKHQIIHTGKKPYKCEECGKAFSQSSTLRKHEIIHTEEKPYKYEECGKAFSNLSALRKHEIIHTGQKPYKCEECGKAFKWSSKLTVHKVIHTAEKPCKCEECGKAFKRFSALRKHKIIHTGKQPYKCEECSKAFSNFSALRKHEIIHTGEKPYKCEECGKAFKWSSKLTVHKVIHMEEKPCKCEECGKAFKHFSALRKHKIIHTGKKPYKCEECGKAFNNSSTLMKHKIIHTGKKPYKCEECGKAFKQSSHLTRHKAIHTGEKPYKCEECGKAFNHFSALRKHQIIHTGKKPYKCEECGKAFSQSSTLRKHEIIHTGEKPYKCEECGKAFKWSSHLTRHKVIHTEEKPYKCEECGKAFNHFSALRKHKIIHTGKKPYKCEECGKAFSQSSTLRKHEIIHTGEKPYKCEECGKAFKWSSKLTVHKVIHTAEKPCKCEECGKAFKHFSALRKHKIIHTGKKPYKCEECGKAFNNSSTLRKHEIIHTGEKSYKCEECGKAFQWSSKLTLHKKPYKCEECGKAFNNSSTLRKHKIIYTGKKPYKCEECGKAFKQSSHLTRHKAVHTGEKPYKCGECGKAFNNSSTLKKHKLIHTREKSYKCEECGKAFSNFSALRKHKIIHTGEKPYKCEECDNYTGKKPYKCEECGKAFNNSSTLMKHKIIHTGEKPYKCEECGKGFNNFSTLMKHKIIHTGEKPYKCEECGKAFKQSSHLTKHKSIHTGEKPYKCEERGKAFSHFSRLTKHRIIHTGKKPYKCEECEKPYKCEECGKAFNQSSHLTQHKTIHTGGKTYKCEECGKAFNHLSALTKHKIIHTGEKPXKCEECVKAFNHFTNLNTHKIIYTRDRPSICEECGKAFNQSSSLNRQKTIHAGEKPHKCKECGKAFNHVSGPLRHPKRPSDGSRGGSRKLVGGTGPAGREDSSRKCSALWEAEAGRSRGNENALEE

SEQ ID NO: 9956 - protein, 773 aa, Homo sapiens
PVISSHFTQDFWPDQSIKDSFQEIILRTYARCGHKNLRLRKDCESVNEGKMHEEAYNKLNQCWTTTQGKIFQCNKYVKVFHKYSNSNRYKIRHTKKKTFKCMKCSKSFFMLSHLIQHKRIHTRENIYKCEERGKAFKWFSTLIKHKIIHTEDKPYKYKKCGKAFNISSMFTKCKIIHTGKKPCKCEECGKVFNNSSTLMKHKIIHTGKKPYKCEECGKAFKQSSHLTRHKAIHTGEKPYKCEECGKAFNHFSALRKHQIIHTGKKPYKCEECGKAFSQSSTLRKHEIIHTEEKPYKYEECGKAFSNLSALRKHEIIHTGQKPYKCEECGKAFNNFSALRKHEIIHTGEKPYKCEECGKAFKWSSKLTVHKVIHMEEKPCKCEECGKAFKHFSALRKHKIIHTGKKPYKCEECGKAFNNSSTLMKHKIIHTGKKPYKCEECGKAFKQSSHLTRHKAIHTGEKPYKCEECGKAFNHFSALRKHQIIHTGKKPYKCEECGKAFSQSSTLRKHEIIHTGEKPYKCEECGKAFKWSSHLTRHKVIHTEEKPYKCEECGKAFNHFSALRKHKIIHTGKKPYKCEECGKAFSQSSTLRKHEIIHTGEKPYKCEECGKAFKWSSKLTVHKVIHTAEKPCKCEECGKAFKHFSALRKHKIIHTGKKPYKCEECGKAFNNSSTLRKHEIIHTGEKSYKCEECGKAFQWSSKLTLHKVIHGEKPCKCEECGKAFKHFSALRKHEIIHTGKKPYKCEECGKAFNNSSTLRKHKIIYTGKKPYKCE

SEQ ID NO: 9957 - protein, 803 aa, Homo sapiens
MEVKPVGEPTQEVSKFKLSTKVESTGHWLVEDHVRIWEVLKTEESSIQDWGEEVEEGAVYHVTLKRVQIQQAANKGARWLGVEGDQLPPGHTVSQYETCKIRTIKAGTLEKLVENLLTAFGDNDFTYISIFLSTYRGFASTKEVLELLLDRYGNLTSPNCEEDGSQSSSESKMVIRNAIASILRAWLDQCAEDFREPPHFPCLQKLLDYLTRMMPGSDPERRAQNLLEQFQKQEVETDNGLPNTISFSLEEEEELEGGESAEFTCFSEDLVAEQLTYMDAQLFKKVVPHHCLGCIWSRRDKKENKHLAPTIRATISQFNTLTKCVVSTILGGKELKTQQRAKIIEKWINIAHECRLLKNFSSLRAIVSALQSNSIYRLKKTWAAVPRDRMLMFEELSDIFSDHNNHLTSRELLMKEGTSKFANLDSSVKENQKRTQRRLQLQKDMGVMQGTVPYLGTFLTDLTMLDTALQDYIEGGLINFEKRRREFEVIAQIKLLQSACNSYCMTPDQKFIQWFQRQQLLTEEESYALSCEIEAAADASTTSPKPRKSMVKRLSLLFLGSDMITSPTPTKEQPKSTASGSSGESMDSVSVSSCESNHSEAEEGSITPMDTPDEPQKKLSESSSSCSSIHSMDTNSSGMSSLINPLSSPPSCNNNPKIHKRSVSVTSITSTVLPPVYNQQNEDTCIIRISVEDNNGNMYKSIMLTSQDKTPAVIQRAMLKHNLDSDPAEEYELVQVISEDKELVIPDSANVFYAMNSQVNFDFILRKKNSMEEQVKLRSRTSLTLPRTAKRGCWSNRHSKITL

SEQ ID NO: 9958 - protein, 829 aa, Homo sapiens
PLWPESRAPAAAGAARRVSVRCGRSGPGPGRGAAGLSPADIALASEQGASCSVRAPERKLRMKLLWQAKMSSIQDWGEEVEEGAVYHVTLKRVQIQQAANKGARWLGVEGDQLPPGHTVSQYETCKIRTIKAGTLEKLVENLLTAFGDNDFTYISIFLSTYRGFASTKEVLELLLDRYGNLTSPNCEEDGSQSSSESKMVIRNAIASILRAWLDQCAEDFREPPHFPCLQKLLDYLTRMMPGSDPERRAQNLLEQFQKQEVETDNGLPNTISFSLEEEEELEGGESAEFTCFSEDLVAEQLTYMDAQLFKKVVPHHCLGCIWSRRDKKENKHLAPTIRATISQFNTLTKCVVSTILGGKELKTQQRAKIIEKWINIAHECRLLKNFSSLRAIVSALQSNSIYRLKKTWAAVPRDRMLMFEELSDIFSDHNNHLTSRELLMKEGTSKFANLDSSVKENQKRTQRRLQLQKDMGVMQGTVPYLGTFLTDLTMLDTALQDYIEGGLINFEKRRREFEVIAQIKLLQSACNSYCMTPDQKFIQWFQRQQLLTEEESYALSCEIEAAADASTTSPKPRKSMVKRLSLLFLGSDMITSPTPTKEQPKSTASGSSGESMDSVSVSSCESNHSEAEEGSITPMDTPDEPQKKLSESSSSCSSIHSMDTNSSGMSSLINPLSSPPSCNNNPKIHKRSVSVTSITSTVLPPVYNQQNEDTCIIRISVEDNNGNMYKSIMLTSQDKTPAVIQRAMLKHNLDSDPAEEYELVQVISEDKELVIPDSANVFYAMNSQVNFDFILRKKNSMEEQVKLRSRTSLTLPRTAKRGCWSNRHSKITL

SEQ ID NO: 9959 - protein, 224 aa, Homo sapiens
AGAGGEEKKGAGEGGKDGEGGKEGEKKNGKYEKPPPFSYNALIMMAIRQSPEKRLTLNGIYEFIMKNFPYYRENKQGWHNSIRDNLSLNKCFVKVPRHYDDPGKGNYWMLDPSSDDVFIGGTTGKLRRRSTTSRAKLAAFRWCALTSTGLTFMDRAGSLYWPMSPFLSLHHPRASSTLSYNGTTSAYPSHPMPYSSVLTQNSLGNNHSFSTANGLSVDRLVNGE

SEQ ID NO: 9960 - protein, 477 aa, Homo sapiens
MLDMGDRKEVKMIPKSSFSINSLVPEGLQNDNHHASHGHHNSHHPQHHHHHHHHHHHPPPPAPQPPPPRAAQQQQPPPPPLAPQAGGAAQSNDEKGPQLLLLPPTDHHRPPSGAKAGGCCRPGELGPVGPDEKEKGAGAGGEEKKGAGEGGKDGEGGKEGEKKNGKYEKPPFSYNALIMMAIRQSPEKRLTLNGIYEFIMKNFPYYRENKQGWQNSIRHNLSLNKCFVKVPRHYDDPGKGNYWMLDPSSDDVFIGGTTGKLRRRSTTSPAKLAFKRGAALTSTGLTFMDRAGSLYWPMSPFLSLHHPRASSTLSYNGTTSAYPSHPMPYSSVLTQNSLGNNHSFSTANGLSVDRLVNGEIPYATHHLTAAALAASVPCGLSVPCSGTYSLNPCSVNLLAGQTSYFFPHVPHPSMTSQSSTSMSARAASSSTSPPAPRPLPCESLRPSLPSFTTGLSGGLSDYFTHQNQGSSSNPLIH

SEQ ID NO: 9961 - protein, 489 aa, Homo sapiens
MLDMGDRKEVKMIPKSSFSINSLVPEAVQNDNHHASHGHHNSHHPQHHHHHHHHHHHPPPPAPQPPPPPQQQQPPPPPPPAPQPPQTRGAPAADDDKGPQQLLLPPPPPPPPAAALDGAKAVGLGGKGEPGGGPGELAPVGPDEKEKGAGAGGEEKKGAGEGGKDGEGGKEGEKKNGKYEKPPFSYNALIMMAIRQSPEKRLTLNGIYEFIMKNFPYYRENKQGWQNSIRHNLSLNMCFVKVPRHYDDPGKGNYWMLDPSSDDVFIGGTTGKLRRRSTTSRAKLAFKRGARLTSTGLTFMDRAGSLYWPMSPFLSLHHPRASSTLSYNGTTSAYPSHPMPYSSVLTQNSLGNNHSFSTANGLSVDRLVNGEIPYATHHLTAAALAASVPCGLSVPCSGTYSLNPCSVNLLAGQTSYFFPHVPHPSMTSQSSTSMSARATSSSTSPQAPSTLPCESLRPSLPSFTTGLSGGLSDYFTHQNQGSSSNPLIH

SEQ ID NO: 9962 - protein, 381 aa, Homo sapiens [sequence omitted]

SEQ ID NO: 9963 - protein, 381 aa, Homo sapiens
MQEKLGIVQGIVGARNTSAASTAQLVEATEELRREIGEATEHLTQLEADLTDVQDENFNANHALSGLERDRLALNLTLRQLDQHLDLLKHSNFLGAYDSIRHAHSQSAEAERRANTSALAVPSPVSNSASARHRTEALMDAQKEDFNSKHMANQRALGKLSAHTHTLSLTDINELVCGAPGDAPCATSPCGGAGCRDEDGQPRCGGLSCNGAAATADLALGRARHTQAELQRALAEGGSILSRVAETRRQASEAQQRAQAALDKANASRGQVEQANQELQELIQSVKDFLNQEGADPDSIEMVATRVLELSIPASAEQIQHLAGAIAERVRSLADVDAILARTGIAQGAIRGAVADTRDTEQPVPGTGEDGRCRAGTELCR

SEQ ID NO: 9964 - protein, 380 aa, Homo sapiens
MATLSFVFLLLGAVSWPPASASGQEFWPGQSAADILSGAASRRRYLLYDVNPPEGFNLRRDVYIRIASLLKTLLKTEEWVLVLPPWGRLYHWQSPDIHQVRIPWSEFFDLPSLNKNIPVIEYEQFIAESGGPFIDQVYVLQSYAEGWKEGTWEEKVDERPCIDQLLYSQDKHEYYRGWFWGYEETRGLNVSCLSVQGSASIVAPLLLRNTSARSVMLDRAENLLHDHYGGKEYWDTRRSMVFARHLREVGDEFRSRHLNSTDDADRIPFQEDWMKMKVKLGSALGGPYLGVHLRRKDFIWGHRQDVPSLEGAVRKIRSLMKTHRLDKVFVATDAVRKEYEELKKLLPEMVRFEPTWEELELYKDGGVAIIDQWICAHASS

SEQ ID NO: 9965 - protein, 424 aa, Homo sapiens
MATLSFVFLLLGAVSWPPASASGQEFWPGQSAADILSGAASRRRYLLYDVNPPEGFNLRRDVYIRIASLLKTLLKTEEWVLVLPPWGRLYHWQSPDIHQVRIPWSEFFDLPSLNKNIPVIEYEQFIAESGGPFIDQVYVLQSYAEGWKEGTWEEKVDERPCIDQLLYSQDKHEYYRGWFWGYEETRGLNVSCLSVQGSASIVAPLLLRNTSARSVMLDRAENLLHDHYGGKEYWDTRRSMVFARHLREVGDEFRSRHLNSTDDADRIPFQEDWMKMKVKLGSALGGPYLGVHLRRKDFIWGHRQDVPSLEGAVRKIRSLMKTHRLDKVFVATDAVRKEYEELKKLLPEMVRFEPTWEELELYKDGGVAIIDQWICAHARCLPTSLSAESGSGGFQRFFCPKYSVSEQMVACVHSGHFHTVCLLV

SEQ ID NO: 9966 - protein, 429 aa, Homo sapiens
MATLSFVFLLLGAVSWPPASASGQEFWPGQSAADILSGAASRRRYLLYDVNPPEGFNLRRDVYIRIASLLKTLLKTEEWVLVLPPWGRLYHWQSPDIHQVRIPWSEFFDLPSLNKNIPVIEYEQFIAESGGPFIDQVYVLQSYAEGWKEGTWEEKVDERPCIDQLLYSQDKHEYYRGWFWGYEETRGLNVSCLSVQGSASIVAPLLLRNTSARSVMLDRAENLLHDHYGGKEYWDTRRSMVFARHLREVGDEFRSRHLNSTDDADRIPFQEDWMKMKVKLGSALGGPYLGVHLRRKDFIWGHRQDVPSLEGAVRKIRSLMKTHRLDKVFVATDAVRKEYEELKKLLPEMVRFEPTWEELELYKDGGVAIIDQWICAHARFFIGTSVSTFSFRIHEEREILGLDPKTTYNRFCGDQEKACEQPTHWKITY

SEQ ID NO: 9967 - protein, 409 aa, Homo sapiens
MATLSFVFLLLGAVSWPPASASGQEFWPGQSAADILSGAASRRRYLLYDVNPPEGFNLRRDVYIRIASLLKTLLKTEEWVLVLPPWGRLYHWQSPDIHQVRIPWSEFFDLPSLNKNIPVIEYEQFIAESGGPFIDQVYVLQSYAEGWKEGTWEEKVDERPCIDQLLYSQDKHEYYRGWFWGYEETRGLNVSCLSVQGSASIVAPLLLRNTSARSVMLDRAENLLHDHYGGKEYWDTRRSMVFARHLREVGDEFRSRHLNSTDDADRIPFQEDWMKMKVKLGSALGGPYLGVHLRRKDFIWGHRQDVPSLEGAVRKIRSLMKTHRLDKVFVATDAVRKEYEELKKLLPEMVRFEPTWEELELYKDGGVAIIDQWICAHARETPGEGCPHQPIQRVCGGGLDLRDVYCASG

SEQ ID NO: 9968 - protein, 470 aa, Homo sapiens
MHAAANQTPGSRAWAHQRQCGVQGLLVLWSHPLMLVSTYPSVSPEVDSVGSWSDPAGCDPQDRMVLDSGSQAYDQAPTSPPTSLLSLRHRLKHSDRDGPPLYPWSQSLALPVALAVPPALQPQPEQQSFSQMHLGHGGHMRRSESTYSVNSTGRRGRGTLGQPPPGRRWNPGGRTLRPAASLPHITKTQSDAGHSASKSPCMLVALRPTNVDREGDKFFQSHYTYNPQFEYQEPMPMAVLKYCEASGQFIHQAVGIIEAVLEKFGTYEHFEAATGRQLLTKCQIWSIVGKYSRKEGCVEEVVVQLSEDLLSQAVMMVENSRPTLAVNLTRARQYWLEGMLWHEIGTHYLRGGNNARQPWHNAEGRLRRHAVRLSFRQLFQDLARYVRDADVYLNGILCILGHRQTIDFPLLTSLGKVSYEDVDHLRPHGVLDNTRMPHLMQDLARYRQQLKHIMATNRLDVAELGRLLPD

SEQ ID NO: 9969 - protein, 471 aa, Homo sapiens
MVLDSGAQAYDQAPPSPPTSPPSLRHRLKPSDRDGPPLYPWSQSLALPLALAVPPALQPQPEQQPFSQMLLGHRGHMRRSESTYSVNSTGRRGRGTLGRPPPGRGRNPGGGTLRPAASLPHIAKTQRDAGHIASKSPCMLVALRPTNMDRERDKFFQSHYTYNPQFEYQEPMPTAVLEKYCEASGQFIHQAVGIIEAVLEKFGTYEHFEAATGGQLLTKCQIWSIVRKYMQKEGCAGEVVVQLSEDLLSQAVMMVENSRPTLAINLTGARQYWLEGMLRHEIGTHYLRGVNNARQPWHNAEGRLRYGLRPANPTEEGLASLHSVLFRKQPFLWRAALLYYTIHRAARMSFRQLFQDLERYVQDADVRWEYCVRAKRGQTDTSLPGCFSKDQVYLDGIVRILRHRQTIDFPLLTSLGKVSYEDVDHLRPHGVLDNTRVPHFMQDLARYRQQLEHIMATNRLDEAELGRLLPD

SEQ ID NO: 9970 - protein, 1238 aa, Homo sapiens [sequence omitted]

SEQ ID NO: 9971 - protein, 1200 aa, Homo sapiens [sequence omitted]

SEQ ID NO: 9972 - protein, 172 aa, Homo sapiens [sequence omitted]

SEQ ID NO: 9973 - protein, 265 aa, Homo sapiens
MGSPSACPYRVCIPWQGLLLTASLLTFWNLPNSAQTNIDVVPFNVAEGKEVLLVVHNESQNLYGYNWYKGERVHANYRIIGYVKNISQENAPGPAHNGRETIYPNGTLLIQNVTHNDAGFYTLHVIKENLVNEEVTRQFYVFSEPPKPSITSNNFNPVENKDIVVLTCQPETQNTTYLWWVNNQSLLVSPRLLLSTDNRTLVLLSATKNDIGPYECEIQNPVGASRSDPVTLNVRYESVQASSPDLSAGTAVSIMIGVLAGMALI

SEQ ID NO: 9974 - protein, 235 aa, Homo sapiens
MGPPSACPHRECIPWQGLLLTASLLTFWNAPTTAWLFIASAPFEVAEGENVHLSVVYLPENLYSYGWYKGKTVEPNQLIAAYVIDTHVRTPGPAYSGRETISPSGDLHFQNVTLEDTGYYTLQVTYRNSQIEQASHHLRVYESVAQPSIQASSTTVTEKGSVVLTCHTNNTGTSFQWIFNNQRLQVTKRMKLSWFNHMLTIDPIRQEDAGEYQCEVSNPVSSNRSDPLKLTVKCE

SEQ ID NO: 9975 - protein, 349 aa, Homo sapiens
MNRKARRCLGHLFLSLGMVYLRIGGFSSVVALGASIICNKIPGLAPRQRAICQSRPDAIIVIGEGSQMGLDECQFQFRNGRWNCSALGERTVFGKELKVGSREAAFTYAIIAAGVAHAITAACTQGNLSDCGCDKEKQGQYHRDEGWKWGGCSADIRYGIGFAKVFVDAREIKQNARTLMNLHNNEAGRKILEENMKLECKCHGVSGSCTTKTCWTTLPQFRELGYVLKDKYNEAVHVEPVRASRNKRPTFLKIKKPLSYRKPMDTDLVYIEKSPNYCEEDPVTGSVGTQGRACNKTAPQASGCDLMCCGRGYNTHQYARVWQCNCKFHWCCYVKCNTCSERTEMYTCK

SEQ ID NO: 9976 - protein, 273 aa, Homo sapiens
MGSGWVPWVVALLVNLTRLDSSMTQGTDSPEDFVIQAKADCYFTNGTEKVQFVVRFIFNLEEYVRFDSDVGMFVALTKLGQPDAEQWNSRLDLLERSRQAVDGVCRHNYRLGAPFTVGRKVQPEVTVYPERTPLLHQHNLLHCSVTGFYPGDIKIKWFLNGQEERAGVMSTGPIRNGDWTFQTVVMLEMTPELGHVYTCLVDHSSLLSPVSVEWRAQSEYSWRKMLSGIAAFLLGLIFLLVGIVIQLRAQKGYVRTQMSGNEVSRAVLLPQSC

SEQ ID NO: 9977 - protein, 99 aa, Homo sapiens [sequence omitted]

SEQ ID NO: 9978 - protein, 1034 aa, Homo sapiens [sequence omitted]

SEQ ID NO: 9979 - protein, 646 aa, Homo sapiens
MGLPRLVCAFLLAACCCCPRVAGVPGEAEQPAPELVEVEVGSTALLKCGLSQSQGNLSHVDWFSVHKEKRTLIFRVRQGQGQSEPGEYEQRLSLQDRGATLALTQVTPQDERIFLCQGKRPRSQEYRIQLRVYKAPEEPNIQVNPLGIPVNSKEPEEVATCVGRNGYPIPQVIWYKNGRPLKEEKNRVHIQSSQTVESSGLYTLQSILKAQLVKEDKDAQFYCELNYRLPSGNHMKESREVTVPVFYPTEKVWLEVEPVGMLKEGDRVEIRCLADGNPPPHFSISKQNPSTREAEEETTNDNGVLVLEPARKEHSGRYECQAWNLDTMISLLSEPQELLVNYVSDVRVSPAAPERQEGSSLTLTCEAESSQDLEFQWLREETDQVLERGPVLQLHDLKREAGGGYRCVASVPSIPGLNRTQLVKLAIFGPPWMAFKERKVWVKENMVLNLSCEASGHPRPTISWNVNGTASEQDQDPQRVLSTLNVLVTPELLETGVECTASNDLGKNTSILFLELVNLTTLTPDSNTTTGLSTSTASPHTRANSTSTERKLPEPESRGVVIVAVIVCILVLAVLGAVLYFLYKKGKLPCRRSGKQEITLPPSRKTELVVEVKSDKLPEEMGLLQGSSGDKRAPGDQGEKYIDLRH

SEQ ID NO: 9980 - protein, 837 aa, Homo sapiens
MSLLLSFYLLGLLVSSGQALLQVTISLSKVELSVGESKFFTCTAIGEPRSIDWYNPQGEKIISTQRVVVQKGGVRSRLTIYNANIEDAGIYRCQATDAKGQTQEATVVLEIYQKLTFREVVSPQEFKQGEDAEVVCRVSSSPAPAVSWLYHNEEVTTISDNRLAMLANNNLQILNINKSDEGIYRCEGRVEARGEIDFRDIIVIVNVPPAISMPQKSFNATAERGEEMTFSCRASGSPEPAISWFRNGKLIEENEKYILKGSNTELTVRNIINSDGGPYVCRATNKAGEDEKQAFLQVFVQPHIIQLKNETTYENGQVTLVCDAEGEPIPEITWKRAVDGFTFTEGDKSPDGRIEVKGQHGSSSLHIKDVKLSGSGRYDCEAASRIGGHQKSMYLDIEYAPKFISNQTIYYSWEGNPINISCDVKSNPPASIHWRRDKLVLPAKNTTNLKTYSTGRKMILEIAPTSDNDFGRYNCTATNHIGTRFQEYILALADVPSSPYGVKIIELSQTTAKVSFNKPDSHGGVPIHHYQVDVKEVASEIWKIVRSHGVQTMVVLNNLEPNTTYEIRVAAVNGKGQGDYSKIEIFQTLPVREPSPPSIHGQPSSGKSFKLSITKQDDGGAPILEYIVKYRSKDKEDQWLEKKVQGNKDHIILEHLQWTMGMKFRLPAANRLGYSEPTVYEFSMPPKPNIIKDTLFNGLGLGAVIGLGVAALLLILVVTDVSCFFIRQCGLLMCITRRMCGKKSGSSGKSKELEEGKAAYLKDGSKEPIVEMRTEDERVTNHEDGSPVNEPNETTPLTEPEKLPLKEEDGKEALNPETIEIKVSNDIIQSKEDDSKA

SEQ ID NO: 9981 - protein, 837 aa, Homo sapiens
MSLLLSFYLLGLLVSSGQALLQVTISLSKVELSVGESKFFTCTAIGEPESIDWYNPQGEKIISTQRVVVQKEGVRSRLTIYNANIEDAGIYRCQATDAKGQTQEATVVLEIYQKLTFREVVSPQEFKQGEDAEVVCRVSSSPAPAVSWLYHNEEVTTISDNRFAMLANNNLQILNINKSDEGIYRCEGRVEARGEIDFRDIIVIVNVPPAISMPQKSFNATAERGEEMTFSCRASGSPEPAISWFRNGKLIEENEKYILKGSNTELTVRNIINSDGGPYVCRATNKAGEDEKQAFLQVFVQPHIIQLKNETTYENGQVTLVCDAEGEPIPEITWKRAVDGFTFTEGDKSLDGRIEVKGQHGSSSLHIKDVKLSDSGRYDCEAASRIGGHQKSMYLDIEYAPKFISNQTIYYSWEGNPINISCDVKSNPPASIHWRRDKLVLPAKNTTNLKTYSTGRKMILEIAPTSDNDFGRYNCTATNHIGTRFQEYILALADVPSSPYGVKIIELSQTTAKVSFNKPDSHGGVPIHHYQVDVKEVASEIWKIVRSHGVQTMVVLNNLEPNTTYEIRVAAVNGKGQGDYSKIEIFQTLPVREPSPPSIHGQPSSGKSFKLSITKQDDGGAPILEYIVKYRSKDKEDQWLEKKVQGNKDHIILEHLQWTMGYEVQITAANRLGYSEPTVYEFSMPPKPNIIKDTLFNGLGLGAVIGLGVAALLLILVVTDVSCFFIRQCGLLMCITRRMCGKKSGSSGKSKELEEGKAAYLKDGSKEPIVEMRTEDERVTNHEDGSPVNEPNETTPLTEPEKLPLKEEDGKEALNPETIEIKVSNDIIQSKEDDSKA

SEQ ID NO: 9982 - protein, 1471 aa, Homo sapiens
MAGGVRLLWVSLLVLLAQLGPQPGLGRLGERLRVRFTPVVCGLRCVHGPTGSRCTPTCAPRNATSVDSGAPGGAAPGGPGFRPVLCPLICHNGGVCVKPDRCLCPPDFAGKFCQLHSSGARPPAPAVPGLTRSVYTMPLANHRDDEHGVASMVSVHVEHPQEASVVVHQVERVSGPWEEADAEAVARAEAAARAEAAAPYTVLAQSAPREDGYSDASGFGYCFRELRGGECASPLPGLRTQEVCCRGAGLAWGVHDCQLCSERLGNSERVSAPDGPCPTGFERVNGSCEDVDECATGGRCQHGECANTRGGYTCVCPDGFLLDSSRSSCISQHVISEAKGPCFRVLRDGGCSLPILRNITKQICCCSRVGKAWGRGCQLCPPFGSEGFREICPAGPGYHYSASDLRYNTRPLGQEPPRVSLSQPRTLPATSRPSAGFLPTHRLEPRPEPRPDPRPGPELPLPSIPAWTGPEIPESGPSSGMCQRNPQVCGPGRCISRPSGYTCACDSGFRLSPQGTRCIDVDECRRVPPPCAPGRCENSPGSFRCVCGPGFRAGPRAAECLDVDECHRVPPPCDLGRCENTPGSFLCVCPAGYQAAPHGASCQDVDECTQSPGLCGRGACKNLPGSFRCVCPAGFRGSACEEDVDECAQEPPPCGPGRCDNTAGSFHCACPAGFRSRGPGAPCQDVDECARSPPPCTYGRCENTEGSFQCVCPMGFQPNTAGSECEDVDECENHLACPGQECVNSPGSFQCRTCPSGHHLHRGRCTDVDECSSGAPPCGPHGHCTNTEGSFRCSCAPGYRAPSGRPGPCADVNECLEGDFCFPHGECLNTDGSFACTCAPGYRPGPRGASCLDVDECSEEDLCQSGICTNTDGSFECICPPGHRAGPDLASCLDVDECRERGPALCGSQRCENSPGSYRCVRDCDPGYHAGPEGTCDDVNECETLQGVCGAALCENVEGSFLCVCPNSPEEFDPMTGRCVPPRTSAGTFPGSQPQAPASPVLPARPPPPPLPRRPSTPRQGPVGSGRRECYFDTAAPDACDNILARNVTWQECCCTVGEGWGSGCRIQQCPGTETAEYQSLCPHGRGYLAPSGDLSLRRDVDECQLFRDQVCKSGVCVNTAPGYSCYCSNGYYYHTQRLECIDNDECADEEPACEGGRCVNTVGSYHCTCEPPLVLDGSQRRCVSNESQSLDDNLGVCWQEVGADLVCSHPRLDRQATYTECCCLYGEAWGMDCALCPAQDSDDFEALCNVLRPPAYSPPRPGGFGLPYEYGPDLGPPYQGLPYGPELYPPPALPYDPYPPPPGPFARREAPYGAPRFDMPDFEDDGGPYGESEAPAPPGPGTRWPYRSRDTRRSFPEPEEPPEGGSYAGSLAEPYEELEAEECGILDGCTNGRCVRVPEGFTCRCFDGYRLDMTRMACVDINECDEAEAASPLCVNARCLNTDGSFRCICRPGFAPTHQPHHCAPARPRA

SEQ ID NO: 9983 - protein, 1587 aa, Homo sapiens
MGDVKALLFVVAARARRLGGAAASESLAVSEAFCRVRSCQPKKCAGPQRCLNPVPAVPSPSPSVRKRQVSLNWQPLTLQEARALLKRRRPRGPGGRGLLRRRPPQRAPAGKAPVLCPLICHNGGVCVKPDRCFCPPDFAGKFCQLHSSGARPPAPAVPGLTRSVYTMPLANHRDDEHGVASMVSVHVEHPQEASVVVHQVERVSGPWEEADAEAVARAEAAARAEAAAPYTVLAQSAPREDGYSDASGFGYCFRELRGGECASPLPGLRTQEVCCRGAGLAWGVHDCQLCSERLGNSERVSAPDGPCPTGFERVNGSCEDVDECATGGRCQHGECANTRGGYTCVCPDGFLLDSSRSSCISQHVISEAKGPCFRVLRDGGCSLPILRNITKQICCCSRVGKAWGRGCQLCPPFGSEGFREICPAGPGYHYSASDLRYNTRPLGQEPPRVSLSQPRTLPATSRPSAGFLPTHRLEPRPEPRPDPRPGPELPLPSIPAWTGPEIPESGPSSGMCQRNPQVCGPGRCISRPSGYTCACDSGFRLSPQGTRCIDVDECRRVPPPCAPGRCENSPGSFRCVCGPGFRAGPRAAECLDVDECHRVPPPCDLGRCENTPGSFLCVCPAGYQAAPHGASCQDVDECTQSPGLCGRGGCKNLPGSFRCVCPAGFRGSACEEDVDECAQEPPPCGPGRCDNTAGSFHCACPAGFRSRGPGAPCQDVDECARSPPPCTYGRCENTEGSFQCVCPMGFQPNTAGSECEDVDECENHLACPGQECVNSPGSFQCRTCPSGHHLHRGRCTDVDECSSGAPPCGPHGHCTNTEGSFRCSCAPGYRAPSGRPGPCADVNECLEGDFCFPHGECLNTDGSFACTCAPGYRPGPRGASCLDVDECSEEDLCQSGICTNTDGSFECICPPGHRAGPDLASCLDVDECRERGPALCGSQRCENSPGSYRCVRDCDPGYHAGPEGTCDDVDECQEYGPEICGAQRCENTPGSYRCTPACDPGYQPTPGGGCQDVDECRNRSFCGAHAVCQNLPGSFQCLCDQGYEGARDGRHCVDVNECETLQGVCGAALCENVEGSFLCVCPNSPEEFDPMTGRCVPPRTSVGMSPGSQPQAPVSPVLPARPPPPPLSRRPRKPRKGPVGSGCRECYFDTAAPDACDNILARNVTWQECCCTVGEGWGSGCRIQQCPGTETAEYQSLCPHGRGYLAPSGDLSLRRDVDECQLFRDQVCKSGVCVNTAPGYSCYCSNGYYYHTQRLECIDNDECADEEPACEGGRCVNTVGSYHCTCEPPLVLDGSQRRCVSNESQSLDDNLGVCWQEVGADLVCSHPRLDRQATYTECCCLYGEAWGMDCALCPAQDSDDFEALCNVLRPPAYSPPRPGGFGLPYEYGPDLGPPYQGLPYGPELYPPPALPYDPYPPPPGPFARREAPYGAPRFDMPDFEDDGGPYGESEAPAPPGPGTRWPYRSRDTRRSFPEPEEPPEGGSYAGSLAEPYEELEAEECGILDGCTNDRCVRVPEGFTCRCFDGYRLDMTRMACVDINECDEAEAASPLCVNARCLNTDGSFRCICRPGFAPTHQPHHCAPARPRA

SEQ ID NO: 9984 - protein, 738 aa, Homo sapiens
MQPRWAQGATMWLGVLLTLLLCSSLEGQENSFTINSVDMKSLPDWTVQNGKNLTLQCFADVSTTSHVKPQHQMLFYKDDVLFYNISSMKSTESYFIPEVRIYDSGTYKCTVIVNNKEKTTAEYQVLVEGVPSPRVTLDKKEAIQGGIVRVNCSVPEEKAPIHFTIEKLELNEKMVKLKREKNSRDQNFVILEFPVEEQDRVLSFRCQARIISGIHMQTSESTKSELVTVTESFSTPKFHISPTGMIMEGAQLHIKCTIQVTHLAQEFPEIIIQKDKAIVAHNRHGNKAVYSVMAMVEHSGNYTCKVESSRISKVSSIVVNITELFSKPELESSFTHLDQGERLNLSCSIPGAPPANFTIQKEDTIVSQTQDFTKIASKSDSGTYICTAGIDKVVKKSNTVQIVVCEMLSQPRISYDAQFEVIKGQTIEVRCESISGTLPISYQLLKTSKVLENSTKNSNDPAVFKDNPTEDVEYQCVADNCHSHAKMLSEVLRVKVIAPVDEVQISILSSKVVESGEDIVLQCAVNEGSGPITYKFYREKEGKPFYQMTSNATQAFWTKQKANKEQEGEYYCTAFNRANHASSVPRSKILTVRVILAPWKKGLIAVVIIGVIIALLIIAAKCYFLRKAKAKQMPVEMSRPAVPLLNSNNEKMSDPNMEANSHYGHNDDVGNHAMKPINDNKEPLNSDVQYTEVQVSSAESHKDLGKKDTETVYSEVRKAVPDAVESRYSRTEGSLDGT

SEQ ID NO: 9985 - protein, 738 aa, Homo sapiens
MQPRWAQGATMWLGVLLTLLLCSSLEGQENSFTINSVDMKSLPDWTVQNGKNLTLQCFADVSTTSHVKPQHQMLFYKDDVLFYNISSMKSTESYFIPEVRIYDSGTYKCTVIVNNKEKTTAEYQLLVEGVPSPRVTLDKKEAIQGGIVRVNCSVPEEKAPIHFTIEKLELNEKMVKLKREKNSRDQNFVILEFPVEEQDRVLSFRCQARIISGIHMQTSESTKSELVTVTESFSTPKFHISPTGMIMEGAQLHIKCTIQVTHLAQEFPEIIIQKDKAIVAHNRHGNKAVYSVMAMVEHSGNYTCKVESSRISKVSSIVVNITELFSKPELESSFTHLDQGERLNLSCSIPGAPPANFTIQKEDTIVSQTQDFTKIASKSDSGTYICTAGIDKVVKKSNTVQIVVCEMLSQPRISYDAQFEVIKGQTIEVRCESISGTLPISYQLLKTSKVLENSTKNSNDPAVFKDNPTEDVEYQCVADNCHSHAKMLSEVLRVKVIAPVDEVQISILSSKVVESGEDIVLQCAVNEGSGPITYKFYREKEGKPFYQMTSNATQAFWTKQKASKEQEGEYYCTAFNRANHASSVPRSKILTVRVILAPWKKGLIAVVIIGVIIALLIIAAKCYFLRKAKAKQMPVEMSRPAVPLLNSNNEKMSDPNMEANSHYGHNDDVRNHAMKPINDNKEPLNSDVQYTEVQVSSAESHKDLGKKDTETVYSEVRKAVPDAVESRYSRTEGSLDGT

SEQ ID NO: 9986 - protein, 354 aa, Homo sapiens
MDMMLLVQGACCSNQWLAAVLLSLCCLLPSCLPAGQSVDFPWAAVDNMMVRKGDTAVLRCYLEDGASKGAWLNRSSIIFAGGDKWSVDPRVSISTLNKRDYSLQIQNVDVTDDGPYTCSVQTQHTPRTMQVHLTVQVPPKIYDISNDMTVNEGTNVTLTCLATGKPEPFISWRHISPSAKPFENGQYLDIYGITRDQAGEYECSAENDVSFPDVRKVKVVVNFAPTIQEIKSGTVTPGRSGLIRCEGAGVPPPAFEWYKGEKKLFNGQQGIIIQNFSTRSILTVTNVTQEHFGNYTCVAANKLGTTNASLPLNPPSTAQYGITGSADVLFSCWYLVLTLSSFTSIFYLKNAILQ

SEQ ID NO: 9987 - protein, 736 aa, Homo sapiens
MLRLLRPLLLLLLLPPPGSPEPPGLTQLSPGAPPQAPDLLYADGLRAYAAGAWAPAVALLREALRSQAALGRVRLDCGASCAADPGAALPAVLLGAPEPDSGPGPTQGSWERQLLRAALRRADCLTQCAARRLGPGGAARLRVGSALRDAFRRREPYNYLQRAYYQLKKLDLAAAAAHTFFVANPMHLQMREDMAKYRRMSGVRPQSFRDLETPPHWAAYDTGLELLGRQEAGLALPRLEEALQGSLAQMESCRADCEGPEEQQGAEEEEDGAASQGGLYEAIAGHWIQVLQCRQRCVGETATRPGRSFPVPDFLPNQLRRLHEAHAQVGNLSQAIENVLSVLLFYPEDEAAKRALNQYQAQLGEPRPGLGPREDIQRFILRSLGEKRQLYYAMEHLGTSFKDPDPWTPAALIPEALREKLREDQEKRPWDHEPVKPKPLTYWKDVLLLEGVTLTQDSRQLNGSERAVLDGLLTPAECGVLLQLAKDAAGAGARSGYRGRRSPHTPHERFEGLTVLKAAQLARAGTVGSQGAKLLLEVSERVRTLTQAYFSPERPLHLSFTHLVCRSAIEGEQEQRMDLSHPVHADNCVLDPDTGECWREPPAYTYRDYSGLLYLNDDFQGGDLFFTEPNALTVTARVRPRCGRLVAFSSGVENPHGVWAVTRGRRCALALWHTWAPEHREQEWIEAKELLQESQEEEEEEEEEMPSKDPSPEPPSRRHQRVQDKTGRAPRVREEL

SEQ ID NO: 9988 - protein, 919 aa, Homo sapiens
MGPEALSSLLLLLLVASGDADMKGHFDPAKCRYALGMQDRTIPDSDISASSSWSDSTAARHSRLESSDGDGAWCPAGSVFPKEEEYLQVDLQRLHLVALVGTQGRHAGGLGKEFSRSYRLRYSRDGRRWMGWKDRWGQEVISGNEDPEGVVLKDLGPPMVARLVRFYPRADRVMSVCLRVELYGCLWRDGLLSYTAPVGQTMYLSEAVYLNDSTYDGHTVGGLQYGGLGQLADGVVGLDDFRKSQELRVWPGYDYVGWSNHSFSSGYVEMEFEFDRLRAFQAMQVHCNNMHTLGARLPGGVECRFRRGPAMAWEGEPMRHNLGGNLGDPRARAVSVPLGGRVARFLQCRFLFAGPWLLFSEISFISDVVNNSSPALGGTFPPAPWWPPGPPPTNFSSLELEPRGQQPVAKAEGSPTAILIGCLVAIILLLLLIIALMLWRLHWRRLLSKAERRVLEEELTVHLSVPGDTILINNRPGPREPPPYQEPRPRGNPPHSAPCVPNGSALLLSNPAYRLLLATYARPPRGPGPPTPAWAKPTNTQAYSGDYMEPEKPGAPLLPPPPQNSVPHYAEADIVTLQGVTGGNTYAVPALPPGAVGDGPPRVDFPRSRLRFKEKLGEGQFGEVHLCEVDSPQDLVSLDFPLNVRKGHPLLVAVKILRPDATKNASFSLFSRNDFLKEVKIMSRLKDPNIIRLLGVCVQDDPLCMITDYMENGDLNQFLSAHQLEDKAAEGAPGDGQAAQGPTISYPMLLHVAAQIASGMRYLATLNFVHRDLATRNCLVGENFTIKIADFGMSRNLYAGDYYRVQGRAVLPIRWMAWECILMGKFTTASDVWAFGVTLWEVLMLCRAQPFGSAHRRAGHRERGGVLPGPGPAVYLSRPPACPQGLYELMLRCWSRESEQRPPFSQLHRFLAEDALNTV

SEQ ID NO: 9989 - protein, 913 aa, Homo sapiens
MGPEALSSLLLLLLVASGDADMKGHFDPAKCRYALGMQDRTIPDSDISASSSWSDSTAARHSRLESSDGDGAWCPAGSVFPKEEEYLQVDLQRLHLVALVGTQGRHAGGLGKEFSRSYRLRYSRDGRRWMGWKDRWGQEVISGNEDPEGVVLKDLGPPMVARLVRFYPRADRVMSVCLRVELYGCLWRDGLLSYTAPVGQTMYLSEAVYLNDSTYDGHTVGGLQYGGLGQLADGVVGLDDFRKSQELRVWPGYDYVGWSNHSFSSGYVEMEFEFDRLRAFQAMQVHCNNMHTLGARLPGGVECRFRRGPAMAWEGEPMRHNLGGNLGDPRARAVSVPLGGRVARFLQCRFLFAGPWLLFSEISFISDVVNNSSPALGGTFPPAPWWPPGPPPTNFSSLELEPRGQQPVAKAEGSPTAILIGCLVAIILLLLLIIALMLWRLHWRRLLSKAERRVLEEELTVHLSVPGDTILINNRPGPREPPPYQEPRPRGNPPHSAPCVPNGSALLLSNPAYRLLLATYARPPRGPGPPTPAWAKPTNTQAYSGDYMEPEKPGAPLLPPPPQNSVPHYAEADIVTLQGVTGGNTYAVPALPPGAVGDGPPRVDFPRSRLRFKEKLGEGQFGEVHLCEVDSPQDLVSLDFPLNVRKGHPLLVAVKILRPDATKNARNDFLKEVKIMSRLKDPNIIRLLGVCVQDDPLCMITDYMENGDLNQFLSAHQLEDKAAEGAPGDGQAAQGPTISYPMLLHVAAQIASGMRYLATLNFVHRDLATRNCLVGENFTIKIADFGMSRNLYAGDYYRVQGRAVLPIRWMAWECILMGKFTTASDVWAFGVTLWEVLMLCRAQPFGSAHRRAGHRERGGVLPGPGPAVYLSRPPACPQGLYELMLRCWSRESEQRPPFSQLHRFLAEDALNTV

SEQ ID NO: 9990 - protein, 913 aa, Homo sapiens
MGPEALSSLLLLLLVASGDADMKGHFDPAKCRYALGMQDRTIPDSDISASSSWSDSTAARHSRLESSDGDGAWCPAGSVFPKEEEYLQVDLQRLHLVALVGTQGRHAGGLGKEFSRSYRLRYSRDGRRWMGWKDRWGQEVISGNEDPEGVVLKDLGPPMVARLVRFYPRADRVMSVCLRVELYGCLWRDGLLSYTAPVGQTMYLSEAVYLNDSTYDGHTVGGLQYGGLGQLADGVVGLDDFRKSQELRVWPGYDYVGWSNHSFSSGYVEMEFEFDRLRAFQAMQVHCNNMHTLGARLPGGVECRFRRGPAMAWEGEPMRHNLGGNLGDPRARAVSVPLGGRVARFLQCRFLFAGPWLLFSEISFISDVVNNSSPALGGTFPPAPWWPPGPPPTNFSSLELEPRGQQPVAKAEGSPTAILIGCLVAIILLLLLIIALMLWRLHWRRLLSKAERRVLEEELTVHLSVPGDTILINNRPGPREPPPYQEPRPRGNPPHSAPCVPNGSALLLSNPAYRLLLATYARPPRGPGPPTPAWAKPTNTQAYSGDYMEPEKPGAPLLPPPPQNSVPHYAEADIVTLQGVTGGNTYAVPALPPGAVGDGPPRVDFPRSRLRFKEKLGEGQFGEVHLCEVDSPQDLVSLDFPLNVRKGHPLLVAVKILRPDATKNARNDFLKEVKIMSRLKDPNIIRLLGVCVQDDPLCMITDYMENGDLNQFLSAHQLEDKAAEGAPGDGQAAQGPTISYPMLLHVAAQIASGMRYLATLNFVHRDLATRNCLVGENFTIKIADFGMSRNLYAGDYYRVQGRAVLPIRWMAWECILMGKFTTASDVWAFGVTLWEVLMLCRAQPFGQLTDEQVIENAGEFFRDQGRQVYLSRPPACPQGLYELMLRCWSRESEQRPPFSQLHRFLAEDALNTV

SEQ ID NO: 9991 - protein, 770 aa, Homo sapiens
MPALGWAVAAILMLQTAMAEPSPGTLPRKAGVFSDLSNQELKAVHSFLWSKKELRLQPSSTTTMAKNTVFLIEMLLPKKYHVLRFLDKGERHPVREARAVIFFGDQEHPNVTEFAVGPLPGPCYMRALSPRPGYQSSWASRPISTAEYALLYHTLQEATKPLHQFFLNTTGFSFQDCHDRCLAFTDVAPRGVASGQRRSWLIIQRYVEGYFLHPTGLELLVDHGSTDAGHWAVEQVWYNGKFYGSPEELARKYADGEVDVVVLEDPLPGGKGHDSTEEPPLFSSHKPRGDFPSPIHVSGPRLVQPHGPRFRLEGNAVLYGGWSFAFRLRSSSGLQVLNVHFGGERIAYEVSVQEAVALYGGHTPAGMQTKYLDVGWGLGSVTHELAPGIDCPETATFLDTFHYYDADDPVHYPRALCLFEMPTGVPLRRHFNSNFKGGFNFYAGLKGQVLVLRTTSTVYNYDYIWDFIFYPNGVMEAKMHATGYVHATFYTPEGLRHGTRLHTHLIGNIHTHLVHYRVDLDVAGTKNSFQTLQMKLENITNPWSPRHRVVQPTLEQTQYSWERQAAFRFKRKLPKYLLFTSPQENPWGHKRSYRLQIHSMADQVLPPGWQEEQAITWARTEGGQPRALSQARSPVPGRYPLAVTKYRESELCSSSIYHQNDPWHPPVVFEQFLHNNENIENEDLVAWVTVGFLHIPHSEDIPNTATPGNSVGFLLRPFNFFPEDPSLASRDTVIVWPRDNGPNYVQRWIPEDRDCSMPPPFSYNGTYRPV

SEQ ID NO: 9992 - protein, 751 aa, Homo sapiens
MPALGWAVAAILMLQTAMAEPSPGTLPRKAGVFSDLSNQELKAVHSFLWSKKELRLQPSSTTTMAKNTVFLIEMLLPKKYHVLRFLDKGERHPVREARAVIFFGDQEHPNVTEFAVGPLPGPCYMRALSPRPGYQSSWASRPISTAEYALLYHTLQEATKPLHQFFLNTTGFSFQDCHDRCLAFTDVAPRGVASGQRRSWLIIQRYVEGYFLHPTGLELLVDHGSTDAGHWAVEQVWYNGKFYGSPEELARKYADGEVDVVVLEDPLPGGKGHDSTEEPPLFSSHKPRGDFPSPIHVSGPRLVQPHGPRFRLEGNAVLYGGWSFAFRLRSSSGLQVLNVHFGGERIAYEVSVQEAVALYGGHTPAGMQTKYLDVGWGLGSVTHELAPGIDCPETATFLDTFHYYDADDPVHYPRALCLFEMPTGVPLRRHFNSNFKGGFNFYAGLKGQVLVLRTTSTVYNYDYIWDFIFYPNGVMEAKMHATGYVHATFYTPEGLRHGTRLHTHLIGNIHTHLVHYRVDLDVAGTKNSFQTLQMKLENITNPWSPRHRVVQPTLEQTQYSWERQAAFRFKRKLPKYLLFTSPQENPWGHKRSYRLQIHSMADQVLPPGWQEEQAITWARYPLAVTKYRESELCSSSIYHQNDPWHPPVVFEQFLHNNENIENEDLVAWVTVGFLHIPHSEDIPNTATPGNSVGFLLRPFNFFPEDPSLASRDTVIVWPRDNGPNYVQRWIPEDRDCSMPPPFSYNGTYRPV

SEQ ID NO: 9993 - protein, 449 aa, Homo sapiens
  VARIANT 74, 155, 213: Xaa = Any Amino Acid
MVASMFFRPLLVAATLRTTLRAAAQVLGSSGLFNNHGLQVQQQQQRNLSLHEYMSMELLQETGVSVPKGYVAKXPDEAYAIAKKLGSKDVVMKAQVLAGGRGKGTFESGLKGGVKMVFSPEEAKAVPSQMIRKQLFTKQMGEKGRICNQVLVCEXKYPKRECYFAITMERSFQGLVLIGSLHSGANIEDVAAETPEAIIKVPIDIVEGIKEEXALQLAQKMGFPSNIVASAAENMIKLYSLFLKYDATMIEINSMVEDSDGAALCKDAKINFDSNSAYRQKKMFDLQDWTQEDERNKDAAKADLNYTGLDGSIGCLVNGAGLAMATMDIIKLHGETPANFLVGGGATVHQVTEAFKPITSDKKVLAILVNICGGIMHCDITAKGIVMAVKSLEIKIPVVVQLQGTQVDDVKALKADSGLKILACDDLVEAARVLVKLSEIVKQSKRMWM

SEQ ID NO: 9994 - protein, 463 aa, Homo sapiens [sequence omitted]

SEQ ID NO: 9995 - protein, 1677 aa, Homo sapiens
MGRDQRAVAGPALCRWLLLGTVTVGFLAQSVLAGVKKFDVPCGGRDCSGGCQCYPEKGGRGQPGPVGPQGYNGPPGLQGFPGLQGRKGDKGERGAPGVTGPKGDVGARGVSGFPGADGIPGHPGQGGPRGRPGYDGCNGTQGDSGPQGPPGSEGFTGPPGPQGPKGQKGEPYALPKEERDRYRGEPGEPGLVGFQGPPGRPGHVGQMGPVGAPGRPVSTWTQVPTLGPSQLLLLNNMQGDVGQPGPNGIPSDTLHPIIAPTGVTFHPDQYKPDGPRSGFFFGNMCTVKNSKRLFSHPVFLFSFSGDPGPPGLPAYSPHPSLAKGARGDPGFPGAQGEPGSQGEPGDPGLPGPPGLSIGDGDQRRGLPGEMGPKGFIGDPGIPALYGGPPGPDGKRGPPGPPGLPGPPGPDGFLFGLKGAKGRAGFPGLPGSPGARGPKGWKGDAGECRCTEGDEAIKGLPGLPGPKGFAGINGEPGRKGDRGDPGQHGLPGFPGLKGVPGNIGAPGPKGAKGDSRTITTKGERGQPGVPGVPGMKGDDGSPGRDGLDGFPGLPGPPGDGIKGPPGDPGYPGIPGTKGTPGEMGPPGLGLPGLKGQRGFPGDAGLPGPPGFLGPPGPAGTPGQIDCDTDVKRAVGGDRQEAIQPGCIGGPKGLPGLPGPPGPTGAKGLRGIPGFAGADGGPGPRGLPGDAGREGFPGPPGFIGPRGSKGAVGLPGPDGSPGPIGLPGPDGPPGERGLPGEVLGAQPGPRGDAGVPGQPGLKGLPGDRGPPGFRGSQGMPGMPGLKGQPGLPGPSGQPGLYGPPGLHGFPGAPGQEGPLGLPGIPGREGLPGDRGDPGDTGAPGPVGMKGLSGDRGDAGFTGEQGHPGSPGFKGIDGMPGTPGLKGDRGSPGMDGFQGMPGLKGRPGFPGSKGEAGFFGIPGLKGLAGEPGFKGSRGDPGPPGPPPVILPGMKDIKGEKGDEGPMGLKGYLGAKGIQGMPGIPGLSGIPGLPGRPGHIKGVKGDIGVPGIPGLPGFPGVAGPPGITGFPGFIGSRGDKGAPGRAGLYGEIGATGDFGDIGDTINLPGRPGLKGERGTTGIPGLKGFFGEKGTEGDIGFPGITGVTGVQGPPGLKGQTGFPGLTGPPGSQGELGRIGLPGGKGDDGWPGAPGLPAVLSLRKVNCMVGNTDISCCYNSSTGSDIHGDPGFPGPPGERGDPGEANTLPGPVGVPGQKGDQGAPGERGPPGSPGLQGFPGITPPSNISGAPGDKGAPGIFGLKGYRGPPGPPGSAALPGSKGDTGNPGAPGTPGTKGWAGDSGPQGRPGVFGLPGEKGPRGEQGFMGNTGPTGAVGDRGPKGPKGDPGFPGAPGTVGAPGIAGIPQKIAVQPGTVGPQGRRGPPGAPGEMGPQGPPGEPGFRGAPGKAGPQGRGGVSAVPGFRGDEGPIGHQGPIGQEGAPGRPGSPGLPGMPGRSVSIGYLLVKHSQTDQEPMCPVGMNKLWSGYSLLYFEGQEKAHNQDLGLAGSCLARFSTMPFLYCNPGDVCYYASRNDKSYWLSTTAPLPMMPVAEDEIKPYISRCSVCEAPAIAIAVHSQDVSIPHCPAGWRSLWIGYSFLMHTAAGDEGGGQSLVSPGSCLEDFRATPFIECNGGRGTCHYYANKYSFWLTTIPEQSFQGSPSADTLKAGLIRTHISRCQVCMKNL

SEQ ID NO: 9996 - protein, 367 aa, Homo sapiens
MRWFLPWTLAAVTAAAASTVLATALSPAPTTMDFTPAPLEDTSSRPQFCKWPCECPPSPPRCPLGVSLITDGCECCKMCAQQLGDNCTEAAICDPHRGLYCDYSGDRPRYAIGVCAQVVGVGCVLDGVRYNNGQSFQPNCKYNCTCIDGAVGCTPLCLRVRPPRLWCPHPRRVSIPGHCCEQWVCEDDAKRPRKTAPRDTGAFDAVGEVEAWHRNCIAYTSPWSPCSTSCGLGVSTRISNVNAQCWPEQESRLCNLRPCDVDIHTLIKAGKKCLAVYQPEASMNFTLAGCISTRSYQPKYCGVCMDNRCCIPYKSKTIDVSFQCPDGLGFSRQVLWINACFCNLSCRNPNDIFADLESYPDFSEIAN

SEQ ID NO: 9997 - protein, 280 aa, Homo sapiens
MRWFLPWTLAAVTAAAASTVLATALSPAPTTMDFTPAPLEDTSSRPQFCKWPCECPPSPPRCPLGVSLITDGCECCKMCAQQLGDNCTEAAICDPHRGLYCDYSGDRPRYAIGVCAHAVGEVEAWHRNCIAYTSPWSPCSTSCGLGVSTRISNVNAQCWPEQESRLCNLRPCDVDIHTLIKAGKKCLAVYQPEASMNFTLAGCISTRSYQPKYCGVCMDNRCCIPYKSKTIDVSFQCPDGLGFSRQVLWINACFCNLSCRNPNDIFADLESYPDFSEIAN

SEQ ID NO: 9998 - protein, 1158 aa, Homo sapiens
MAAVRGAPLLSCLLALLALCPGGRPQTVLTDDEIEEFLEGFLSELEPEPREDDVEAPPPPEPTPRVRKAQAGGKPGKRPGTAAEVPPEKTKDKGKKGKKDKGPKVPKESLEGSPRPPKKGKEKPPKATKKPKEKPPKATKKPKEEPPKATKKPKEKPPKATKKPPSGKRPPILAPSETLEWPLPPPPSPGPEELPQEGGAPLSNNWQNPGEETHVEAQEHQPEPEEETEQPTLDYNDQIEREDYEDFEYIRRQKQPRPPPSRRRRPERVWPEPPEEKAPAPAPEERIEPPVKPLLPPLPPDYGDGYVIPNYDDMDYYFGPPPPQKPDAERQTDEEKEELKKPKKEDSSPKEETDKWAVEKGKDHKEPRKGEELEEEWTPTEKVKCPPIGMESHRIEDNQIRASSMLRHGLGAQRGRLNMQTGATEDDYYDGAWCAEDDARTQWIEVDTRRTTRFTGVITQGRDSSIHDDFVTTFFVGFSNDSQTWVMYTNGYEEMTFHGNVDKDTPVLSELPEPVVARFIRIYPLTWNGSLCMRLEVLGCSVAPVYSYYAQNEVVATDDLDFRHHSYKDMRQLMKVVNEECPTITRTYSLGKSSRGLKIYAMEISDNPGEHELGEPEFRYTAGIHGNEVLGRELLLLLMQYLCREYRDGNPRVRSLVQDTRIHLVPSLNPDGYEVAAQMGSEFGNWALGLWTEEGFDIFEDFPDLNSVLWGAEERKWVPYRVPNNNLPIPERYLSPDATVSTEVRAIIAWMEKNPFVLGANLNGGERLVSYPYDMARTPTQEQLLAAAMAAARGEDEDEVSEAQETPDHAIFRWLAISFASAHLTLTEPYRGGCQAQDYTGGMGIVNGAKWNPRTGTINDFSYLHTNCLELSFYLGCDKFPHESELPREWENNKEALLTFMEQVHRGIKGVVTDEQGIPIANATISVSGINHGVKTASGGDYWRILNPGEYRVTAHAEGYTPSAKTCNVDYDIGATQCNFILARSNWKRIREIMAMNGNRPIPHIDPSRPMTPQQRRLQQRRLQHRLRLRAQMRLRRLNATTTLGPHTVPPTLPPAPATTLSTTIEPWGLIPPTTAGWEESETETYTEVVTEFGTEVEPEFGTKVEPEFETQLEPEFETQLEPEFEEEEEEEKEEEIATGQAFPFTTVETYTVNFGDF

SEQ ID NO: 9999 - protein, 123 aa, Homo sapiens
MKAVLLALLMAGLALQPGTALLCYSCKAQVSNEDCLQVENCTQLGEQCWTARIRAVGLLTVISKGCSLNCVDDSQDYYVGKKNITCCDTDLCNASGAHALQPAAAILALLPALGLLLWGPGQL

SEQ ID NO: 10000 - protein, 1140 aa, Homo sapiens
MVISLNSCLSFICLLLCHWIGTASPLNLEDPNVCSHWESYSVTVQESYPHPFDQIYYTSCTDILNWFKCTRHRVSYRTAYRHGEKTMYRRKSQCCPGFYESGEMCVPHCADKCVHGRCIAPNTCQCEPGWGGTNCSSACDGDHWGPHCTSRCQCKNGALCNPITGACHCAAGFRGWRCEDRCEQGTYGNDCHQRCQCQNGATCDHVTGECRCPPGYTGAFCEDLCPPGKHGPQCEQRCPCQNGGVCHHVTGECSCPSGWMGTVCGQPCPEGRFGKNCSQECQCHNGGTCDAATGQCHCSPGYTGERCQDECPVGTYGVLCAETCQCVNGGKCYHVSGACLCEAGFAGERCEARLCPEGLYGIKCDKRCPCHLENTHSCHPMSGECACKPGWSGLYCNETCSPGFYGEACQQICSCQNGADCDSVTGKCTCAPGFKGIDCSTPCPLGTYGINCSSRCGCKNDAVCSPVDGSCTCKAGWHGVDCSIRCPSGTWGFGCNLTCQCLNGGACNTLDGTCTCAPGWRGEKCELPCQDGTYGLNCAERCDCSHADGCHPTTGHCRCLPGWSGVHCDSVCAEGRWGPNCSLPCYCKNGASCSPDDGICECAPGFRGTTCQRICSPGFYGHRCSQTCPQCVHSSGPCHHITGLCDCLPGFTGALCNEVCPSGRFGKNCAGICTCTNNGTCNPIDRSCQCYPGWIGSDCSQPCPPAHWGPNCIHTCNCHNGAFCSAYDGECKCTPGWTGLYCTQRCPLGFYGKDCALICQCQNGADCDHISGQCTCRTGFMGRHCEQKCPSGTYGYGCRQICDCLNNSTCDHITGTCYCSPGWKGARCDQAGVIIVGNLNSLSRTSTALPADSYQIGAIAGIIILVLVVLFLLALFIIYRHKQKGKESSMPAVTYTPAMRVVNADYTISGTLPHSNGGNANSHYFTNPSYHTLTQCATSPHVNNRDRMTVTKSKNNQLFVNLKNVNPGKRGPVGDCTGTLPADWKHGGYLNELGAFGLDRSYMGKSLKDLGKNSEYNSSNCSLSSSENPYATIKDPPVLIPKSSECGYVEMKSPARRDSPYAEINNSTSANRNVYEVEPTVSVVQGVFSNNGRLSQDPYDLPKNSHIPCHYDLLPVRDSSSSPKQEDSGGSSSNSSSSSE

SEQ ID NO: 10001 - protein, 619 aa, Homo sapiens
LEQILCLGWLWVKTGEKRLRCDSQDLWTWIIIANPLKKEKQADFREVVLQKKMVISLNSCLSFICLLLCHWIGTASPLNLEDPNVCSHWESYSVTVQESYPHPFDQIYYTSCTDILNWFKCTRHRVSYRTAYRHGEKTMYRRKSQCCPGFYESGEMCVPHCADKCVHGRCIAPNTCQCEPGWGGTNCSSACDGDHWGPHCTSRCQCKNGALCNPITGACHCAAGFRGWRCEDRCEQGTYGNDCHQRCQCQNGATCDHVTGECRCPPGYTGAFCEDLCPPGKHGPQCEQRCPCQNGGVCHHVTGECSCPSGWMGTVCGQPCPEGRFGKNCSQECQCHNGGTCDAATGQCHCSPGYTGERCQDECPVGTYGVLCAETCQCVNGGKCYHVSGACLCEAGFAGERCEARLCPEGLYGIKCDKRCPCHLENTHSCHPMSGECACKPGWSGLYCNETCSPGFYGEACQQICSCQNGADCDSVTGKCTCAPGFKGIDCSTPCPLGTYGINCSSRCGCKNDAVCSPVDGSCTCKAGWHGVDCSIRCPSGTWGFGCNLTCQCLNGGACNTLDGTCTCAPGWRGEKCELPCQDGTYGLNCAERCDCSHADGCHPTTGHCRCLPGWSGLF

SEQ ID NO: 10002 - protein, 2552 aa, Homo sapiens
MMLQHLVIFCLGLVVQNFCSPAETTGQARRCDRKSLLTIRTECRSCALNLGVKCPDGYTMITSGSVGVRDCRYTFEVRTYSLSLPGCRHICRKDYLQPRCCPGRWGPDCIECPGGAGSPCNGRGSCAEGMEGNGTCSCQEGFGGTACETCADDNLFGPSCSSVCNCVHGVCNSGLDGDGTCECYSAYTGPKCDKPIPECAALLCPENSRCSPSTEDENKLECKCLPNYRGDGKYCDPINPCLRKICHPHAHCTYLGPNRHSCTCQEGYRGDGQVCLPVDPCQINFGNCPTKSTVCKYDGPGQSHCECKEHYQNFVPGVGCSMTDICKSDNPCHRNANCTTVAPGRTECICQKGYVGDGLTCYGNIMERLRELNTEPRGKWQGRLTSFISLLDKAYAWPLSKLGPFTVLLPTDKGLKGFNVNELLVDNKAAQYFVKLHIIAGQMNIEYMNNTDMFYTLTGKSGEIFNSDKDNQIKLKLHGGKKKVKIIQGDIIASNGLLHILDRAMDKLEPTFESNNEQTIMTMLQPRYSKFRSLLEETNLGHALDEDGVGGPYTIFVPNNEALNNMKDGTLDYLLSPEGSRKLLELVRYHIVPFTQLEVATLISTPHIRSMANQLIQFNTTDNGQILANDVAMEEIEITAKNGRIYTLTGVLIPPSIVPILPHRCDETKREMKLGTCVSCSLVYWSRCPANSEPTALFTHRCVYSGRFGSLKSGCARYCNATVKIPKCCKGFYGPDCNQCPGGFSNPCSGNGQCADSLGGNGTCICEEGFQGSQCQFCSDPNKYGPRCNKKCLCVHGTCNNRIDSDGACLTGTCRDGSAGRLCDKQTSACGPYVQFCHIHATCEYSNGTASCICKAGYEGDGTLCSEMDPCTGLTPGGCSRNAECIKTGTGTHTCVCQQGWTGNGRDCSEINNCLLPSAGGCHDNASCLYVGPGQNECECKKGFRGNGIDCEPITSCLEQTGKCHPLASCQSTSSGVWSCVCQEGYEGDGFLCYGNAAVELSFLSEAAIFNRWINNASLQPTLSATSNLTVLVPSQQATEDMDQDEKSFWLSQSNIPALIKYHMLLGTYRVADLQTLSSSDMLATSLQGNFLHLAKVDGNITIEGASIVDGDNAATNGVIHIINKVLVPQRRLTGSLPNLLMRLEQMPDYSIFRGYIIATYNLANAIEAADAYTVFAPNNNAIENYIREKKVLSLEEDVLRYHVVLEEKLLKNDLHNGMHRETMLGFSYFLSFFLHNDQLYVNEAPINYTNVATDKGVIHGLGKVLEIQKNRCDNNDTTIIRGRCRTCSSELTCPFGTKSLGNEKRRCIYTSYFMGRRTLFIGCQPKCVRTVITRECCAGFFGPQCQPCPGNAQNVCFGNGICLDGVNGTGVCECGEGFSGTACETCTEGKYGIHCDQACSCVHGRCNQGPLGDGSCDCDVGWRGVHCDNATTEDNCNGTCHTSANCLTNSDGTASCKCAAGFQGNGTICTAINACEISNGGCSAKADCKRTTPGRRVCTCKAGYTGDGIVCLEINPCLENHGGCDKNAECTQTGPNQAACNCLPAYTGDGKVCTLINVCLTKNGGCSEFAICNHTGQVERTCTCKPNYIGDGFTCRGSIYQELPKNPKTSQYFFQLQEHFVKDLVGPGPFTVFAPLSAAFDEEARVKDWDKYGLMPQVLRYHVVACHQLLLENLKLISNATSLQGEPIVISVSQSTVYINNKAKIISSDIISTNGIVHIIDKLLSPKNLLITPKDNSGRILQNLTTLATNNGYIKFSNLIQDSGLLSVITDPIHTPVTLFWPTDQALHALPAEQQDFLFNQDNKDKLKEYLKFHVIRDAKVLAVDLPTSTAWKTLQGSELSVKCGAGRDIGDLFLNGQTCRIVQRELLFDLGVAYGIDCLLIDPTLGGRCDTFTTFDASGECGSCVNTPSCPRWSKPKGVKQKCLYNLPFKRNLEGCRERCSLVIQIPRCCKGYFGRDCQACPGGPDAPCNNRGVCLDQYSATGECKCNTGFNGTACEMCWPGRFGPDCLPCGCSDHGQCDDGITGSGQCLCETGWTGPSCDTQAVLPAVCTPPCSAHATCKENNTCECNLDYEGDGITCTVVDFCKQDNGGCAKVARCSQKGTKVSCSCQKGYKGDGHSCTEIDPCADGLNGGCHEHATCKMTGPGKHKCECKSHYVGDGLNCEPEQLPIDRCLQDNGQCHADAKCVDLHFQDTTVGVFHLRSPLGQYKLTFDKAREACANEAATMATYNQLSYAQKAKYHLCSAGWLETGRVAYPTAFASQNCGSGVVGIVDYGPRPNKSEMWDVFCYRMKDVNCTCKVGYVGDGFSCSGNLLQVLMSFPSLTNFLTEVLAYSNSSARGRAFLEHLTDLSIRGTLFVPQNSGLGENETLSGRDIEHHLANVSMFFYNDLVNGTTLQTRLGSKLLITASQDPLQPTETRFVDGRAILQWDIFASNGIIHVISRPLKAPPAPVTLTHTGLGAGIFFAIILVTGAVALAAYSYFRINRRTIGFQHFESEEDINVAALGKQQPENISNPLYESTTSAPPEPSYDPFTDSEERQLEGNDPLRTL

SEQ ID NO: 10003 - protein, 1069 aa, Homo sapiens
VGEAVGTASCKCAAGFQGNGTICTAINACEISNGGCSAKADCKRTTPGRRVCTCKAGYTGDGIVCLEINPCLENHGGCDKNAECTQTGPNQAACNCLPAYTGDGKVCTLINVCLTKNGGCSEFAICNHTGQVERTCTCKPNYIGDGFTCRGSIYQELPKNPKTSQYFFQLQEHFVKDLVGPGPFTVFAPLSAAFDEEARVKDWDKYGLMPQVLRYHVVACHQLLLENLKLISNATSLQGEPIVISVSQSTVYINNKAKIISSDIISTNGIVHIIDKLLSPKNLLITPKDNSGRILQNLTTLATNNGYIKFSNLIQDSGLLSVITDPIHTPVTLFWPTDQALHALPAEQQDFLFNQDNKDKLKEYLKFHVIRDAKVLAVDLPTSTAWKTLQGSELSVKCGAGRDIGDLFLNGQTCRIVQRELLFDLGVAYGIDCLLIDPTLGGRCDTFTTFDASGECGSCVNTPSCPRWSKPKGVKQKCLYNLPFKRNLEGCRERCSLVIQIPRCCKGYFGRDCQACPGGPDAPCNNRGVCLDQYSATGECKCNTGFNGTACEMCWPGRFGPDCLPCGCSDHGQCDDGITGSGQCLCETGWTGPSCDTQAVLPAVCTPPCSAHATCKENNTCECNLDYEGDGITCTVVDFCKQDNGGCAKVARCSQKGTKVSCSCQKGYKGDGHSCTEIDPCADGLNGGCHEHATCKMTGPGKHKCECKSHYVGDGLNCEPEQLPIDRCLQDNGQCHADAKCVDLHFQDTTVGVFHLRSPLGQYKLTFDKAREACANEAATMATYNQLSYAQKAKYHLCSAGWLETGRVAYPTAFASQNCGSGVVGIVDYGPRPNKSEMWDVFCYRMKGSAGLFQQLSSRPCISRTPDDLSIRGTLFVPQNSGLGENETLSGRDIEHHLANVSMFFYNDLVNGTTLQTRLGSKLLITASQDPLQPTETRFVDGRAILQWDIFASNGIIHVISRPLKAPPAPVTLTHTGLGAGIFFAIILVTGAVALAAYSYFRINRRTIGFQHFESEEDINVAALGKQQPENISNPLYESTTSAPPEPSYDPFTDSEERQLEGNDPLRTL

SEQ ID NO: 10004 - protein, 1080 aa, Homo sapiens
MPAKGRYFLNEGEEGPDQDALYEKYQLTSQHGPLLLTLLLVAATACVALIIIAFSQGDPSRHQAILGMAFLVLAVFAALSVLMYVECLLRRWLRALALLTWACLVALGYVLVFDAWTKAACAWEQVPFFLFIVFVVYTLLPFSMRGAVAVGAVSTASHLLVLGSLMGGFTTPSVRVGLQLLANAVIFLCGNLTGAFHKHQMQDASRDLFTYTVKCIQIRRKLRIEKRQQENLLLSVLPAHISMGMKLAIIERLKEHGDRRCMPDNNFHSLYVKRHQNVSILYADIVGFTQLASDCSPKELVVVLNELFGKFDQIAKANECMRIKILGDCYYCVSGLPVSLPTHARNCVKMGLDMCQAIKQVREATGVDINMRVGIHSGNVLCGVIGLRKWQYDVWSHDVSLANRMEAAGVPGRVHITEATLKHLDKAYEVEDGHGQQRDPYLKEMNIRTYLVIDPRSQQPPPPSQHLPRPKGDAALKMRASVRMTRYLESWGAARPFAHLNHRESVSSGETHVPNGRRPKSVPQRHRRTPDRSMSPKGRSEDDSYDDEMLSAIEGLSSTRPCCSKSDDFYTFGSIFLEKGFEREYRLAPIPRARHDFACASLIFVCILLVHVLLMPRTAALGVSFGLVACVLGLVLGLCFATKFSRCCPARGTLCTISERVETQPLLRLTLAVLTIGSLLTVAIINLPLMPFQVPELPVGNETGLLAASSKTRALCEPLPYYTCSCVLGFIACSVFLRMSLEPKVVLLTVALVAYLVLFNLSPCWQWDCCGQGLGNLTKPNGTTSGTPSCSWKDLKTMTNFYLVLFYITLLTLSRQIDYYCRLDCLWKKKFKKEHEEFETMENVNRLLLENVLPAHVAAHFIGDKLNEDWYHQSYDCVCVMFASVPDFKVFYTECDVNKEGLECLRLLNEIIADFDELLLKPKFSGVEKIKTIGSTYMAAAGLSVASGHENQELERQHAHIGVMVEFSIALMSKLDGINRHSFNSFRLRVGINHGPVIAGVIGARKPQYDIWGNTVNVASRMESTGELGKIQVTEETCTILQGLGYSCECRGLINVKGKGELRTYFVCTDTAKFQGLGLN

SEQ ID NO: 10005 - protein, 435 aa, Homo sapiens
MAQAVWSRLGRILWLACLLPWAPAGVAAGLYELNLTTDSPATTGAVVTISASLVAKDNGSLALPADAHLYRFHWIHTPLVLTGKMEKGLSSTIRVVGHVPGEFPVSVWVTAADCWMCQPVARGFVVLPITEFLVGDLVVTQNTSLPWPSSYLTKTVLKVSFLLHDPSNFLKTALFLYSWDFGDGTQMVTEDSVVYYNYSIIGTFTVKLKVVAEWEEVEPDATRAVKQKTGDFSASLKLQETLRGIQVLGPTLIQTFQKMTVTLNFLGSPPLTVCWRLKPECLPLEEGECHPVSVASTAYNLTHTFRDPGDYCFSIRAENIISKTHQYHKIQVWPSRIQPAVFAFPCATLITVMLAFIMYMTLRNATQQKDMVEVADFDFSPMSDKNPEPPSGVRCCCQMCCGPFLLETPSEYLEIVRENHGLLPPLYKSVKTYTV

SEQ ID NO: 10006 - protein, 423 aa, Homo sapiens
MAQAVWSRLGRILWLACLLPWAPAGVAAGLYELNLTTDSPATTGAVVTISASLVAKDNGSLALPADAHLYRFHWIHTPLVLTGKMEKGLSSTIRVVGHVPGEFPVSVWVTAADCWMCQPVARGFVVLPITEFLVGDLVVTQNTSLPWPSSYLTKTVLKVSFLLHDPSNFLKTALFLYSWDFGDGTQMVTEDSVVYYNYSIIGTFTVKLKVVAEWEEVEPDATRAVKQKTGDFSASLKLQETLRGIQVLGPTLIQTFQKMTVTLNFLGSPPLTVCWRLKPECLPLEEGECHPVSVASTAYNLTHTFRDPGDYCFSIRAENIISKTHQYHKIQVWPSRIQPAVFAFPCATLITVMLAFIMYMTLRNATQQKDMVENPEPPSGVRCCCQMCCGPFLLETPSEYLEIVRENHGLLPPLYKSVKTYTV

SEQ ID NO: 10007 - protein, 326 aa, Homo sapiens
MCPLTLHVTGLMNVSEPNSSFAFVNEFILQGFSCEWTIQIFLFSLFTTIYALTITGNGAIAFVLWCDRRLHTPMYMFLGNFSFLEIWYVSSTVPKMLVNFLSEKKNISFAGCFLQFYFFFSLGTSECLLLTVMAFDQYLAICRPLLYPNIMTGHLYAKLVILCWVCGFLWFLIPIVLISQKPFCGPNIIDHVVCDPGPLFALDCVSAPRIQLFCYTLSSLVIFGNFLFIIGSYTLVLKAVLGMPSSTGRHKAFSTCGSHLAVVSLCYSPLMVMYVSPGLGHSTGMQKIETLFYAMVTPLFNPLIYSLQNKEIKAALRKVLGSSNII

SEQ ID NO: 10008 - protein, 315 aa, Homo sapiens
MNVSEPNSSFAFVNEFILQGFSCEWTIQIFLFSLFTTTYALTITGNGAIAFVLWCDRRLHTPMYMFLGNFSFLEIWYVSSTVPKMLVNFLSEKKNISFAGCFLQFYFFFSLGTSECLLLTVMAFDQYLAICRPLLYPNIMTGHLYAKLVILCWVCGFLWFLIPIVLISQMPFCGPNIIDHVVCDPGPRFALDCVSAPRIQLFCYTLSSLVIFGNFLFIIGSYTLVLKAMLGMPSSTGRHKAFSTCGSHLAVVSLCYSSLMVMYVSPGLGHSTGMQKIETLFYAMVTPLFNPLIYSLQNKEIKAALRKVLGSSNII

SEQ ID NO: 10009 - protein, 472 aa, Homo sapiens
MKSILDGLADTTFRTITTDLLYVGSNDIQYEDIKGDMASKLGYFPQKFPLTSFRGSPFQEKMTAGDNPQLVPADQVNITEFYNKSLSSFKENEENIQCGENFMDIECFMVLNPSQQLAIAVLSLTLGTFTVLENLLVLCVILHSRSLRCRPSYHFIGSLAVADLLGSVIFVYSFIDFHVFHRKDSRNVFLFKLGGVTASFTASVGSLFLTAIDRYISIHRPLAYKRIVTRPKAVVAFCLMWTIAIVIAVLPLLGWNCEKLQSVCSDIFPHIDETYLMFWIGVTSVLLLFIVYAYMYILWKAHSHAVRMIQRGTQKSIIIHTSEDGKVQVTRPDQARMDIRLAKTLVLILVVLIICWGPLLAIMVYDVFGKMNKLIKTVFAFCSMLCLLNSTVNPIIYALRSKDLRHAFRSMFPSCEGTAQPLDNSMGDSDCLHKHANNAASVHRAAESCIKSTVKIAKVTMSVSTDTSAEAL

SEQ ID NO: 10010 - protein, 411 aa, Homo sapiens
MALQIPPSAPSPLTSCTWAQMTFSTKTSKENEENIQCGENFMDIECFMVLNPSQQLAIAVLSLTLGTFTVLENLLVLCVILHSRSLRCRPSYHFIGSLAVADLLGSVIFVYSFIDFHVFHRKDSRNVFLFKLGGVTASFTASVGSLFLTAIDRYISIHRPLAYKRIVTRPKAVVAFCLMWTIAIVIAVLPLLGWNCEKLQSVCSDIFPHIDETYLMFWIGVTSVLLLFIVYAYMYILWKAHSHAVRMIQRGTQKSIIIHTSEDGKVQVTRPDQARMDIRLAKTLVLILVVLIICWGPLLAIMVYDVFGKMNKLIKTVFAFCSMLCLLNSTVNPIIYALRSKDLRHAFRSMFPSCEGTAQPLDNSMGDSDCLHKHANNAASVHRAAESCIKSTVKIAKVTMSVSTDTSAEAL

SEQ ID NO: 10011 - protein, 2728 aa, Homo sapiens
MSDKMSSFLHIGDICSLYAEGSTNGFISTLGLVDDRCVVQPETGDLNNPPKKFRDCLFKLCPMNRYSAQKQFWKAAKPGANSTTDAVLLNKLHHAADLEKKQNETENRKLLGTVIQYGNVIQLLHLKSNKYLTVNKRLPALLEKNAMRVTLDEAGNEGSWFYIQPFYKLRSIGDSVVIGDKVVLNPVNAGQPLHASSHQLVDNPGCNEVNSVNCNTSWKIVLFMKWSDNKDDILKGGDVVRLFHAEQEKFLTCDEHRKKQHVFLRTTGRQSATSATSSKALWEVEVVQHDPCRGGAGYWNSLFRFKHLATGHYLAAEVDPDQDASRSRLRNAQEKMVYSLVSVPEGNDISSIFELDPTTLRGGDSLVPRNSYVRLRHLCTNTWVHSTNIPIDKEEEKPVMLKIGTSPVKEDKEAFAIVPVSPAEVRDLDFANDASKVLGSIAGKLEKGTITQNERRSVTKLLEDLVYFVTGGTNSGQDVLEVVFSKPNRERQKLMREQNILKQIFKLLQAPFTDCGDGPMLRLEELGDQRHAPFRHICRLCYRVLRHSQQDYRKNQEYIAKQFGFMQKQIGYDVLAEDTITALLHNNRKLLEKHITAAEIDTFVSLVRKNREPRFLDYLSDLCVSMNKSIPVTQELICKAVLNPTNADILIETKLVLSRFEFEGVSSTGENALEAGEDEEEVWLFWRDSNKEIRSKSVRELAQDAKEGQKEDRDVLSYYRYQLNLFARMCLDRQYLAINEISGQLDVDLILRCMSDENLPYDLRASFCRLMLHMHVDRDPQEQVTPVKYARLWSEIPSEIAIDDYDSSGASKDEIKERFAQTMEFVEEYLRDVVCQRFPFSDKEKNKLTFEVVNLARNLIYFGFYNFSDLLRLTKILLAILDCVHVTTIFPISKMAKGEENKGNNDVEKLKSSNVMRSIHGVGELMTQVVLRGGGFLPMTPMAAAPEGNVKQAEPEKEDIMVMDTKLKIIEILQFILNVRLDYRISCLLCIFKREFDESNSQTSETSSGNSSQEGPSNVPGALDFEHIEEQAEGIFGGSEENTPLDLDDHGGRTFLRVLLHLTMHDYPPLVSGALQLLFRHFSQRQEVLQAFKQVQLLVTSQDVDNYKQIKQDLDQLRSIVEKSELWVYKGQGPDETMDGASGENEHKKTEEGNNKPQKHESTSSYNYRVVKEILIRLSKLCVQESASVRKSRKQQQRLLRNMGAHAVVLELLQIPYEKAEDTKMQEIMRLAHEFLQNFCAGNQQNQALLHKHINLFLNPGILEAVTMQHIFMNNFQLCSEINERVVQHFVHCIETHGRNVQYIKFLQTIVKAEGKFIKKCQDMVMAELVNSGEDVLVFYNDRASFQTLIQMMRSERDRMDENSPLMYHIHLVELLAVCTEGKNVYTEIKCNSLLPLDDIVRVVTHEDCIPEVKIAYINFLNHCYVDTEVEMKEIYTSNHMWKLFENFLVDICRACNNTSDRKHADSILEKYVTEIVMSIVTTFFSSPFSDQSTTLQTRQPVFVQLLQGVFRVYHCNWLMPSQKASVESCIRVLSDVAKSRAIAIPVDLDSQVNNLFLKSHSIVQKTAMNWRLSARNAARRDSVLAASRDYRNIIERLQDIVSALEDRLRPLVQAELSVLVDVLHRPELLFPENTDARRKCESGGFICKLIKHTKQLLEENEEKLCIKVLQTLREMMTKDRGYGEKLISIDELDNAELPPAPDSENSTEEGEALRQVLVNRYYGNVRPSGRRESLTSFGNGPLSAGGPGKPGGGGGGSGSSSMSRGEMSLAEVQCHLDKEGASNLVIDLIMNASSDRVFHESILLAIALLEGGNTTIQHSFFCRLTEDKKSEKFFKVFYDRMKVAQQEIKATVTVNTSDLGNKKKDDEVDRDAPSRKKAKEPTTQITEEVRDQLLEASAATRKAFTTFRREADPDDHYQPGEGTQATADKAKDDLEMSAVITIMQPILRFLQLLCENHNRDLQNFLRCQNNKTNYNLVCETLQFLDCICGSTTGGLGLLGLYINEKNVALINQTLESLTEYCQGPCHENQNCIATHESNGIDIITALILNDINPLGKKRMDLVLELKNNASKLLLAIMESRHDSENAERILYNMRPKELVEVIKKAYMQGEVEFEDGENGEDGAASPRNVGHNIYILAHQLARHNKELQSMLKPGGQVDGDEALEFYAKHTAQIEIVRLDRTMEQIVFPVPSICEFLTKESKLRIYYTTERDEQGSKINDFFLRSEDLFNEMNWQKKLRAQPVLYWCARNMSFWSSISFNLAVLMNLLVAFFYPFKGVRGGTLEPHWSGLLWTAMLISLAIVIALPKPHGIRALIASTILRLIFSVGLQPTLFLLGAFNVCNKIIFLMSFVGNCGTFTRGYRAMVLDVEFLYHLLYLVICAMGLFVHEFFYSLLLFDLVYREETLLNVIKSVTRNGRSIILTAVLALILVYLFSIVGYLFFKDDFILEVDRLPNETAVPETGESLASEFLFSDVCRVESGENCSSPAPREELVPAEETEQDKEHTCETLLMCIVTVLSHGLRSGGGVGDVLRKPSKEEPLFAARVIYDLLFFFMVIIIVLNLIFGVIIDTFADLRSEKQKKEEILKTTCFICGLERDKFDNKTVTFEEHIKEEHNMWHYLCFIVLVKVKDSTEYTGPESYVAEMIKERNLDWFPRMRAMSLVSSDSEGEQNELRNLQEKLESTMKLVTNLSGQLSELKDQMTEQRKQKQRIGLLGHPPHMNVNPQQPA

SEQ ID NO: 10012 - protein, 2695 aa, Homo sapiens
MSDKMSSFLHIGDICSLYAEGSTNGFISTLGLVDDRCVVQPETGDLNNPPKKFRDCLFKLCPMNRYSAQKQFWKAAKPGANSTTDAVLLNKLHHAADLEKKQNETENRKLLGTVIQYGNVIQLLHLKSNKYLTVNKRLPALLEKNAMRVTLDEAGNEGSWFYIQPFYKLRSIGDSVVIGDKVVLNPVNAGQPLHASSHQLVDNPGCNEVNSVNCNTSWKIVLFMKWSDNKDDILKGGDVVRLFHAEQEKFLTCDEHRKKQHVFLRTTGRQSATSATSSKALWEVEVVQHDPCRGGAGYWNSLFRFKHLATGHYLAAEVDPDQDASRSRLRNAQEKMVYSLVSVPEGNDISSIFELDPTTLRGGDSLVPRNSYVRLRHLCTNTWVHSTNIPIDKEEEKPVMLKIGTSPVKEDKEAFAIVPVSPAEVRDLDFANDASKVLGSIAGKLEKGTITQNERRSVTKLLEDLVYFVTGGTNSGQDVLEVVFSKPNRERQKLMREQNILKQIFKLLQAPFTDCGDGPMLRLEELGDQRHAPFRHICRLCYRVLRHSQQDYRKNQEYIAKQFGFMQKQIGYDVLAEDTITALLHNNRKLLEKHITAAEIDTFVSLVRKNREPRFLDYLSDLCVSMNKSIPVTQELICKAVLNPTNADILIETKLVLSRFEFEGVSSTGENALEAGEDEEEVWLFWRDSNKEIRSKSVRELAQDAKEGQKEDRDVLSYYRYQLNLFARMCLDRQYLAINEISGQLDVDLILRCMSDENLPYDLRASFCRLMLHMHVDRDPQEQVTPVKYARLWSEIPSEIAIDDYDSSGASKDEIKERFAQTMEFVEEYLRDVVCQRFPFSDKEKNKLTFEVVNLARNLIYFGFYNFSDLLRLTKILLAILDCVHVTTIFPISKMAKGEENKGSNVMRSIHGVGELMTQVVLRGGGFLPMTPMAAAPEGNVKQAEPEKEDIMVMDTKLKIIEILQFILNVRLDYRISCLLCIFKREFDESNSQTSETSSGNSSQEGPSNVPGALDFEHIEEQAEGIFGGSEENTPLDLDDHGGRTFLRVLLHLTMHDYPPLVSGALQLLFRHFSQRQEVLQAFKQVQLLVTSQDVDNYKQIKQDLDQLRSIVEKSELWVYKGQGPDETMDGASGENEHKKTEEGNNKPQKHESTSSYNYRVVKEILIRLSKLCVQESASVRKSRKQQQRLLRNMGAHAVVLELLQIPYEKAEDTKMQEIMRLAHEFLQNFCAGNQQNQALLHKHINLFLNPGILEAVTMQHIFMNNFQLCSEINERVVQHFVHCIETHGRNVQYIKFLQTIVKAEGKFIKKCQDMVMAELVNSGEDVLVFYNDRASFQTLIQMMRSERDRMDENSPLMYHIHLVELLAVCTEGKNVYTEIKCNSLLPLDDIVRVVTHEDCIPEVKIAYINFLNHCYVDTEVEMKEIYTSNHMWKLFENFLVDICRACNNTSDRKHADSILEKYVTEIVMSIVTTFFSSPFSDQSTTLQTRQPVFVQLLQGVFRVYHCNWLMPSQKASVESCIRVLSDVAKSRAIAIPVDLDSQVNNLFLKSHSIVQKTAMNWRLSARNAARRDSVLAASRDYRNIIERLQDIVSALEDRLRPLVQAELSVLVDVLHRPELLFPENTDARRKCESGGFICKLIKHTKQLLEENEEKLCIKVLQTLREMMTKDRGYGEKGEALRQVLVNRYYGNVRPSGRRESLTSFGNGPLSAGGPGKPGGGGGGSGSSSMSRGEMSLAEVQCHLDKEGASNLVIDLIMNASSDRVFHESILLAIALLEGGNTTIQHSFFCRLTEDKKSEKFFKVFYDRMKVAQQEIKATVTVNTSDLGNKKKDDEVDRDAPSRKKAKEPTTQITEEVRDQLLEASAATRKAFTTFRREADPDDHYQPGEGTQATADKAKDDLEMSAVITIMQPILRFLQLLCENHNRDLQNFLRCQNNKTNYNLVCETLQFLDCICGSTTGGLGLLGLYINEKNVALINQTLESLTEYCQGPCHENQNCIATHESNGIDIITALILNDINPLGKKRMDLVLELKNNASKLLLAIMESRHDSENAERILYNMRPKELVEVIKKAYMQGEVEFEDGENGEDGAASPRNVGHNIYILAHQLARHNKELQSMLKPGGQVDGDEALEFYAKHTAQIEIVRLDRTMEQIVFPVPSICEFLTKESKLRIYYTTERDEQGSKINDFFLRSEDLFNEMNWQKKLRAQPVLYWCARNMSFWSSISFNLAVLMNLLVAFFYPFKGVRGGTLEPHWSGLLWTAMLISLAIVIALPKPHGIRALIASTILRLIFSVGLQPTLFLLGAFNVCNKIIFLMSFVGNCGTFTRGYRAMVLDVEFLYHLLYLVICAMGLFVHEFFYSLLLFDLVYREETLLNVIKSVTRNGRSIILTAVLALILVYLFSIVGYLFFKDDFILEVDRLPNETAVPETGESLASEFLFSDVCRVESGENCSSPAPREELVPAEETEQDKEHTCETLLMCIVTVLSHGLRSGGGVGDVLRKPSKEEPLFAARVIYDLLFFFMVIIIVLNLIFGVIIDTFADLRSEKQKKEEILKTTCFICGLERDKFDNKTVTFEEHIKEEHNMWHYLCFIVLVKVKDSTEYTGPESYVAEMIKERNLDWFPRMRAMSLVSSDSEGEQNELRNLQEKLESTMKLVTNLSGQLSELKDQMTEQRKQKQRIGLLGHPPHMNVNPQQPA

SEQ ID NO: 10013 - protein, 2734 aa, Homo sapiens
MSDKMSSFLHIGDICSLYAEGSTNGFISTLGLVDDRCVVQPETGDLNNPPKKFRDCLFKLCPMNRYSAQKQFWKAAKPGANSTTDAVLLNKLHHAADLEKKQNETENRKLLGTVIQYGNVIQLLHLKSNKYLTVNKRLPALLEKNAMRVTLDEAGNEGSWFYIQPFYKLRSIGDSVVIGDKVVLNPVNAGQPLHASSHQLVDNPGCNEVNSVNCNTSWKIVLFMKWSDNKDDILKGGDVVRLFHAEQEKFLTCDEHRKKQHVFLRTTGRQSATSATSSKALWEVEVVQHDPCRGGAGYWNSLFRFKHLATGHYLAAEVDPDQDASRSRLRNAQEKMVYSLVSVPEGNDISSIFELDPTTLRGGDSLVPRNSYVRLRHLCTNTWVHSTNIPIDKEEEKPVMLKIGTSPVKEDKEAFAIVPVSPAEVRDLDFANDASKVLGSIAGKLEKGTITQNERRSVTKLLEDLVYFVTGGTNSGQDVLEVVFSKPNRERQKLMREQNILKQIFKLLQAPFTDCGDGPMLRLEELGDQRHAPFRHICRLCYRVLRHSQQDYRKNQEYIAKQFGFMQKQIGYDVLAEDTITALLHNNRKLLEKHITAAEIDTFVSLVRKNREPRFLDYLSDLCVSMNKSIPVTQELICKAVLNPTNADILIETKLVLSRFEFEGVSSTGENALEAGEDEEEVWLFWRDSNKEIRSKSVRELAQDAKEGQKEDRDVLSYYRYQLNLFARMCLDRQYLAINEISGQLDVDLILRCMSDENLPYDLRASFCRLMLHMHVDRDPQEQVTPVKYARLWSEIPSEIAIDDYDSSGASKDEIKERFAQTMEFVEEYLRDVVCQRFPFSDKEKNKLTFEVVNLARNLIYFGFYNFSDLLRLTKILLAILDCVHVTTIFPISKMAKGEENKGSNVMRSIHGVGELMTQVVLRGGGFLPMTPMAAAPEGNVKQAEPEKEDIMVMDTKLKIIEILQFILNVRLDYRISCLLCIFKREFDESNSQTSETSSGNSSQEGPSNVPGALDFEHIEEQAEGIFGGSEENTPLDLDDHGGRTFLRVLLHLTMHDYPPLVSGALQLLFRHFSQRQEVLQAFKQVQLLVTSQDVDNYKQIKQDLDQLRSIVEKSELWVYKGQGPDETMDGASGENEHKKTEEGNNKPQKHESTSSYNYRVVKEILIRLSKLCVQESASVRKSRKQQQRLLRNMGAHAVVLELLQIPYEKAEDTKMQEIMRLAHEFLQNFCAGNQQNQALLHKHINLFLNPGILEAVTMQHIFMNNFQLCSEINERVVQHFVHCIETHGRNVQYIKFLQTIVKAEGKFIKKCQDMVMAELVNSGEDVLVFYNDRASFQTLIQMMRSERDRMDENSPLMYHIHLVELLAVCTEGKNVYTEIKCNSLLPLDDIVRVVTHEDCIPEVKIAYINFLNHCYVDTEVEMKEIYTSNHMWKLFENFLVDICRACNNTSDRKHADSILEKYVTEIVMSIVTTFFSSPFSDQSTTLQTRQPVFVQLLQGVFRVYHCNWLMPSQKASVESCIRVLSDVAKSRAIAIPVDLDSQVNNLFLKSHSIVQKTAMNWRLSARNAARRDSVLAASRDYRNIIERLQDIVSALEDRLRPLVQAELSVLVDVLHRPELLFPENTDARRKCESGGFICKLIKHTKQLLEENEEKLCIKVLQTLREMMTKDRGYGEKLISIDELDNAELPPAPDSENSTEELEPSPPLRQLEDHKRGEALRQVLVNRYYGNVRPSGRRESLTSFGNGPLSAGGPGKPGGGGGGSGSSSMSRGEMSLAEVQCHLDKEGASNLVIDLIMNASSDRVFHESILLAIALLEGGNTTIQHSFFCRLTEDKKSEKFFKVFYDRMKVAQQEIKATVTVNTSDLGNKKKDDEVDRDAPSRKKAKEPTTQITEEVRDQLLEASAATRKAFTTFRREADPDDHYQPGEGTQATADKAKDDLEMSAVITIMQPILRFLQLLCENHNRDLQNFLRCQNNKTNYNLVCETLQFLDCICGSTTGGLGLLGLYINEKNVALINQTLESLTEYCQGPCHENQNCIATHESNGIDIITALILNDINPLGKKRMDLVLELKNNASKLLLAIMESRHDSENAERILYNMRPKELVEVIKKAYMQGEVEFEDGENGEDGAASPRNVGHNIYILAHQLARHNKELQSMLKPGGQVDGDEALEFYAKHTAQIEIVRLDRTMEQIVFPVPSICEFLTKESKLRIYYTTERDEQGSKINDFFLRSEDLFNEMNWQKKLRAQPVLYWCARNMSFWSSISFNLAVLMNLLVAFFYPFKGVRGGTLEPHWSGLLWTAMLISLAIVIALPKPHGIRALIASTILRLIFSVGLQPTLFLLGAFNVCNKIIFLMSFVGNCGTFTRGYRAMVLDVEFLYHLLYLVICAMGLFVHEFFYSLLLFDLVYREETLLNVIKSVTRNGRSIILTAVLALILVYLFSIVGYLFFKDDFILEVDRLPNETAVPETGESLASEFLFSDVCRVESGENCSSPAPREELVPAEETEQDKEHTCETLLMCIVTVLSHGLRSGGGVGDVLRKPSKEEPLFAARVIYDLLFFFMVIIIVLNLIFGVIIDTFADLRSEKQKKEEILKTTCFICGLERDKFDNKTVTFEEHIKEEHNMWHYLCFIVLVKVKDSTEYTGPESYVAEMIKERNLDWFPRMRAMSLVSSDSEGEQNELRNLQEKLESTMKLVTNLSGQLSELKDQMTEQRKQKQRIGLLGHPPHMNVNPQQPA

SEQ ID NO: 10014 - protein, 2743 aa, Homo sapiens
MSDKMSSFLHIGDICSLYAEGSTNGFISTLGLVDDRCVVQPETGDLNNPPKKFRDCLFKLCPMNRYSAQKQFWKAAKPGANSTTDAVLLNKLHHAADLEKKQNETENRKLLGTVIQYGNVIQLLHLKSNKYLTVNKRLPALLEKNAMRVTLDEAGNEGSWFYIQPFYKLRSIGDSVVIGDKVVLNPVNAGQPLHASSHQLVDNPGCNEVNSVNCNTSWKIVLFMKWSDNKDDILKGGDVVRLFHAEQEKFLTCDEHRKKQHVFLRTTGRQSATSATSSKALWEVEVVQHDPCRGGAGYWNSLFRFKHLATGHYLAAEVDPDFEEECLEFQPSVDPDQDASRSRLRNAQEKMVYSLVSVPEGNDISSIFELDPTTLRGGDSLVPRNSYVRLRHLCTNTWVHSTNIPIDKEEEKPVMLKIGTSPVKEDKEAFAIVPVSPAEVRDLDFANDASKVLGSIAGKLEKGTITQNERRSVTKLLEDLVYFVTGGTNSGQDVLEVVFSKPNRERQKLMREQNILKQIFKLLQAPFTDCGDGPMLRLEELGDQRHAPFRHICRLCYRVLRHSQQDYRKNQEYIAKQFGFMQKQIGYDVLAEDTITALLHNNRKLLEKHITAAEIDTFVSLVRKNREPRFLDYLSDLCVSMNKSIPVTQELICKAVLNPTNADILIETKLVLSRFEFEGVSSTGENALEAGEDEEEVWLFWRDSNKEIRSKSVRELAQDAKEGQKEDRDVLSYYRYQLNLFARMCLDRQYLAINEISGQLDVDLILRCMSDENLPYDLRASFCRLMLHMHVDRDPQEQVTPVKYARLWSEIPSEIAIDDYDSSGASKDEIKERFAQTMEFVEEYLRDVVCQRFPFSDKEKNKLTFEVVNLARNLIYFGFYNFSDLLRLTKILLAILDCVHVTTIFPISKMAKGEENKGNNDVEKLKSSNVMRSIHGVGELMTQVVLRGGGFLPMTPMAAAPEGNVKQAEPEKEDIMVMDTKLKIIEILQFILNVRLDYRISCLLCIFKREFDESNSQTSETSSGNSSQEGPSNVPGALDFEHIEEQAEGIFGGSEENTPLDLDDHGGRTFLRVLLHLTMHDYPPLVSGALQLLFRHFSQRQEVLQAFKQVQLLVTSQDVDNYKQIKQDLDQLRSIVEKSELWVYKGQGPDETMDGASGENEHKKTEEGNNKPQKHESTSSYNYRVVKEILIRLSKLCVQESASVRKSRKQQQRLLRNMGAHAVVLELLQIPYEKAEDTKMQEIMRLAHEFLQNFCAGNQQNQALLHKHINLFLNPGILEAVTMQHIFMNNFQLCSEINERVVQHFVHCIETHGRNVQYIKFLQTIVKAEGKFIKKCQDMVMAELVNSGEDVLVFYNDRASFQTLIQMMRSERDRMDENSPLMYHIHLVELLAVCTEGKNVYTEIKCNSLLPLDDIVRVVTHEDCIPEVKIAYINFLNHCYVDTEVEMKEIYTSNHMWKLFENFLVDICRACNNTSDRKHADSILEKYVTEIVMSIVTTFFSSPFSDQSTTLQTRQPVFVQLLQGVFRVYHCNWLMPSQKASVESCIRVLSDVAKSRAIAIPVDLDSQVNNLFLKSHSIVQKTAMNWRLSARNAARRDSVLAASRDYRNIIERLQDIVSALEDRLRPLVQAELSVLVDVLHRPELLFPENTDARRKCESGGFICKLIKHTKQLLEENEEKLCIKVLQTLREMMTKDRGYGEKLISIDELDNAELPPAPDSENSTEEGEALRQVLVNRYYGNVRPSGRRESLTSFGNGPLSAGGPGKPGGGGGGSGSSSMSRGEMSLAEVQCHLDKEGASNLVIDLIMNASSDRVFHESILLAIALLEGGNTTIQHSFFCRLTEDKKSEKFFKVFYDRMKVAQQEIKATVTVNTSDLGNKKKDDEVDRDAPSRKKAKEPTTQITEEVRDQLLEASAATRKAFTTFRREADPDDHYQPGEGTQATADKAKDDLEMSAVITIMQPILRFLQLLCENHNRDLQNFLRCQNNKTNYNLVCETLQFLDCICGSTTGGLGLLGLYINEKNVALINQTLESLTEYCQGPCHENQNCIATHESNGIDIITALILNDINPLGKKRMDLVLELKNNASKLLLAIMESRHDSENAERILYNMRPKELVEVIKKAYMQGEVEFEDGENGEDGAASPRNVGHNIYILAHQLARHNKELQSMLKPGGQVDGDEALEFYAKHTAQIEIVRLDRTMEQIVFPVPSICEFLTKESKLRIYYTTERDEQGSKINDFFLRSEDLFNEMNWQKKLRAQPVLYWCARNMSFWSSISFNLAVLMNLLVAFFYPFKGVRGGTLEPHWSGLLWTAMLISLAIVIALPKPHGIRALIASTILRLIFSVGLQPTLFLLGAFNVCNKIIFLMSFVGNCGTFTRGYRAMVLDVEFLYHLLYLVICAMGLFVHEFFYSLLLFDLVYREETLLNVIKSVTRNGRSIILTAVLALILVYLFSIVGYLFFKDDFILEVDRLPNETAVPETGESLASEFLFSDVCRVESGENCSSPAPREELVPAEETEQDKEHTCETLLMCIVTVLSHGLRSGGGVGDVLRKPSKEEPLFAARVIYDLLFFFMVIIIVLNLIFGVIIDTFADLRSEKQKKEEILKTTCFICGLERDKFDNKTVTFEEHIKEEHNMWHYLCFIVLVKVKDSTEYTGPESYVAEMIKERNLDWFPRMRAMSLVSSDSEGEQNELRNLQEKLESTMKLVTNLSGQLSELKDQMTEQRKQKQRIGLLGHPPHMNVNPQQPA

SEQ ID NO: 10015 - protein, 2743 aa, Homo sapiens
MSDKMSSFLHIGDICSLYAEGSTNGFISTLGLVDDRCVVQPETGDLNNPPKKFRDCLFKLCPMNRYSAQKQFWKAAKPGANSTTDAVLLNKLHHAADLEKKQNETENRKLLGTVIQYGNVIQLLHLKSNKYLTVNKRLPALLEKNAMRVTLDEAGNEGSWFYIQPFYKLRSIGDSVVIGDKVVLNPVNAGQPLHASSHQLVDNPGCNEVNSVNCNTSWKIVLFMKWSDNKDDILKGGDVVRLFHAEQEKFLTCDEHRKKQHVFLRTTGRQSATSATSSKALWEVEVVQHDPCRGGAGYWNSLFRFKHLATGHYLAAEVDPDQDASRSRLRNAQEKMVYSLVSVPEGNDISSIFELDPTTLRGGDSLVPRNSYVRLRHLCTNTWVHSTNIPIDKEEEKPVMLKIGTSPVKEDKEAFAIVPVSPAEVRDLDFANDASKVLGSIAGKLEKGTITQNERRSVTKLLEDLVYFVTGGTNSGQDVLEVVFSKPNRERQKLMREQNILKQIFKLLQAPFTDCGDGPMLRLEELGDQRHAPFRHICRLCYRVLRHSQQDYRKNQEYIAKQFGFMQKQIGYDVLAEDTITALLHNNRKLLEKHITAAEIDTFVSLVRKNREPRFLDYLSDLCVSMNKSIPVTQELICKAVLNPTNADILIETKLVLSRFEFEGVSSTGENALEAGEDEEEVWLFWRDSNKEIRSKSVRELAQDAKEGQKEDRDVLSYYRYQLNLFARMCLDRQYLAINEISGQLDVDLILRCMSDENLPYDLRASFCRLMLHMHVDRDPQEQVTPVKYARLWSEIPSEIAIDDYDSSGASKDEIKERFAQTMEFVEEYLRDVVCQRFPFSDKEKNKLTFEVVNLARNLIYFGFYNFSDLLRLTKILLAILDCVHVTTIFPISKMAKGEENKGNNDVEKLKSSNVMRSIHGVGELMTQVVLRGGGFLPMTPMAAAPEGNVKQAEPEKEDIMVMDTKLKIIEILQFILNVRLDYRISCLLCIFKREFDESNSQTSETSSGNSSQEGPSNVPGALDFEHIEEQAEGIFGGSEENTPLDLDDHGGRTFLRVLLHLTMHDYPPLVSGALQLLFRHFSQRQEVLQAFKQVQLLVTSQDVDNYKQIKQDLDQLRSIVEKSELWVYKGQGPDETMDGASGENEHKKTEEGNNKPQKHESTSSYNYRVVKEILIRLSKLCVQESASVRKSRKQQQRLLRNMGAHAVVLELLQIPYEKAEDTKMQEIMRLAHEFLQNFCAGNQQNQALLHKHINLFLNPGILEAVTMQHIFMNNFQLCSEINERVVQHFVHCIETHGRNVQYIKFLQTIVKAEGKFIKKCQDMVMAELVNSGEDVLVFYNDRASFQTLIQMMRSERDRMDENSPLMYHIHLVELLAVCTEGKNVYTEIKCNSLLPLDDIVRVVTHEDCIPEVKIAYINFLNHCYVDTEVEMKEIYTSNHMWKLFENFLVDICRACNNTSDRKHADSILEKYVTEIVMSIVTTFFSSPFSDQSTTLQTRQPVFVQLLQGVFRVYHCNWLMPSQKASVESCIRVLSDVAKSRAIAIPVDLDSQVNNLFLKSHSIVQKTAMNWRLSARNAARRDSVLAASRDYRNIIERLQDIVSALEDRLRPLVQAELSVLVDVLHRPELLFPENTDARRKCESGGFICKLIKHTKQLLEENEEKLCIKVLQTLREMMTKDRGYGEKLISIDELDNAELPPAPDSENSTEELEPSPPLRQLEDHKRGEALRQVLVNRYYGNVRPSGRRESLTSFGNGPLSAGGPGKPGGGGGGSGSSSMSRGEMSLAEVQCHLDKEGASNLVIDLIMNASSDRVFHESILLAIALLEGGNTTIQHSFFCRLTEDKKSEKFFKVFYDRMKVAQQEIKATVTVNTSDLGNKKKDDEVDRDAPSRKKAKEPTTQITEEVRDQLLEASAATRKAFTTFRREADPDDHYQPGEGTQATADKAKDDLEMSAVITIMQPILRFLQLLCENHNRDLQNFLRCQNNKTNYNLVCETLQFLDCICGSTTGGLGLLGLYINEKNVALINQTLESLTEYCQGPCHENQNCIATHESNGIDIITALILNDINPLGKKRMDLVLELKNNASKLLLAIMESRHDSENAERILYNMRPKELVEVIKKAYMQGEVEFEDGENGEDGAASPRNVGHNIYILAHQLARHNKELQSMLKPGGQVDGDEALEFYAKHTAQIEIVRLDRTMEQIVFPVPSICEFLTKESKLRIYYTTERDEQGSKINDFFLRSEDLFNEMNWQKKLRAQPVLYWCARNMSFWSSISFNLAVLMNLLVAFFYPFKGVRGGTLEPHWSGLLWTAMLISLAIVIALPKPHGIRALIASTILRLIFSVGLQPTLFLLGAFNVCNKIIFLMSFVGNCGTFTRGYRAMVLDVEFLYHLLYLVICAMGLFVHEFFYSLLLFDLVYREETLLNVIKSVTRNGRSIILTAVLALILVYLFSIVGYLFFKDDFILEVDRLPNETAVPETGESLASEFLFSDVCRVESGENCSSPAPREELVPAEETEQDKEHTCETLLMCIVTVLSHGLRSGGGVGDVLRKPSKEEPLFAARVIYDLLFFFMVIIIVLNLIFGVIIDTFADLRSEKQKKEEILKTTCFICGLERDKFDNKTVTFEEHIKEEHNMWHYLCFIVLVKVKDSTEYTGPESYVAEMIKERNLDWFPRMRAMSLVSSDSEGEQNELRNLQEKLESTMKLVTNLSGQLSELKDQMTEQRKQKQRIGLLGHPPHMNVNPQQPA

SEQ ID NO: 10016 - protein, 2719 aa, Homo sapiens
MSDKMSSFLHIGDICSLYAEGSTNGFISTLGLVDDRCVVQPETGDLNNPPKKFRDCLFKLCPMNRYSAQKQFWKAAKPGANSTTDAVLLNKLHHAADLEKKQNETENRKLLGTVIQYGNVIQLLHLKSNKYLTVNKRLPALLEKNAMRVTLDEAGNEGSWFYIQPFYKLRSIGDSVVIGDKVVLNPVNAGQPLHASSHQLVDNPGCNEVNSVNCNTSWKIVLFMKWSDNKDDILKGGDVVRLFHAEQEKFLTCDEHRKKQHVFLRTTGRQSATSATSSKALWEVEVVQHDPCRGGAGYWNSLFRFKHLATGHYLAAEVDPDQDASRSRLRNAQEKMVYSLVSVPEGNDISSIFELDPTTLRGGDSLVPRNSYVRLRHLCTNTWVHSTNIPIDKEEEKPVMLKIGTSPVKEDKEAFAIVPVSPAEVRDLDFANDASKVLGSIAGKLEKGTITQNERRSVTKLLEDLVYFVTGGTNSGQDVLEVVFSKPNRERQKLMREQNILKQIFKLLQAPFTDCGDGPMLRLEELGDQRHAPFRHICRLCYRVLRHSQQDYRKNQEYIAKQFGFMQKQIGYDVLAEDTITALLHNNRKLLEKHITAAEIDTFVSLVRKNREPRFLDYLSDLCVSMNKSIPVTQELICKAVLNPTNADILIETKLVLSRFEFEGVSSTGENALEAGEDEEEVWLFWRDSNKEIRSKSVRELAQDAKEGQKEDRDVLSYYRYQLNLFARMCLDRQYLAINEISGQLDVDLILRCMSDENLPYDLRASFCRLMLHMHVDRDPQEQVTPVKYARLWSEIPSEIAIDDYDSSGASKDEIKERFAQTMEFVEEYLRDVVCQRFPFSDKEKNKLTFEVVNLARNLIYFGFYNFSDLLRLTKILLAILDCVHVTTIFPISKMAKGEENKGSNVMRSIHGVGELMTQVVLRGGGFLPMTPMAAAPEGNVKQAEPEKEDIMVMDTKLKIIEILQFILNVRLDYRISCLLCIFKREFDESNSQTSETSSGNSSQEGPSNVPGALDFEHIEEQAEGIFGGSEENTPLDLDDHGGRTFLRVLLHLTMHDYPPLVSGALQLLFRHFSQRQEVLQAFKQVQLLVTSQDVDNYKQIKQDLDQLRSIVEKSELWVYKGQGPDETMDGASGENEHKKTEEGNNKPQKHESTSSYNYRVVKEILIRLSKLCVQESASVRKSRKQQQRLLRNMGAHAVVLELLQIPYEKAEDTKMQEIMRLAHEFLQNFCAGNQQNQALLHKHINLFLNPGILEAVTMQHIFMNNFQLCSEINERVVQHFVHCIETHGRNVQYIKFLQTIVKAEGKFIKKCQDMVMAELVNSGEDVLVFYNDRASFQTLIQMMRSERDRMDENSPLMYHIHLVELLAVCTEGKNVYTEIKCNSLLPLDDIVRVVTHEDCIPEVKIAYINFLNHCYVDTEVEMKEIYTSNHMWKLFENFLVDICRACNNTSDRKHADSILEKYVTEIVMSIVTTFFSSPFSDQSTTLQTRQPVFVQLLQGVFRVYHCNWLMPSQKASVESCIRVLSDVAKSRAIAIPVDLDSQVNNLFLKSHSIVQKTAMNWRLSARNAARRDSVLAASRDYRNIIERLQDIVSALEDRLRPLVQAELSVLVDVLHRPELLFPENTDARRKCESGGFICKLIKHTKQLLEENEEKLCIKVLQTLREMMTKDRGYGEKLISIDELDNAELPPAPDSENSTEEGEALRQVLVNRYYGNVRPSGRRESLTSFGNGPLSAGGPGKPGGGGGGSGSSSMSRGEMSLAEVQCHLDKEGASNLVIDLIMNASSDRVFHESILLAIALLEGGNTTIQHSFFCRLTEDKKSEKFFKVFYDRMKVAQQEIKATVTVNTSDLGNKKKDDEVDRDAPSRKKAKEPTTQITEEVRDQLLEASAATRKAFTTFRREADPDDHYQPGEGTQATADKAKDDLEMSAVITIMQPILRFLQLLCENHNRDLQNFLRCQNNKTNYNLVCETLQFLDCICGSTTGGLGLLGLYINEKNVALINQTLESLTEYCQGPCHENQNCIATHESNGIDIITALILNDINPLGKKRMDLVLELKNNASKLLLAIMESRHDSENAERILYNMRPKELVEVIKKAYMQGEVEFEDGENGEDGAASPRNVGHNIYILAHQLARHNKELQSMLKPGGQVDGDEALEFYAKHTAQIEIVRLDRTMEQIVFPVPSICEFLTKESKLRIYYTTERDEQGSKINDFFLRSEDLFNEMNWQKKLRAQPVLYWCARNMSFWSSISFNLAVLMNLLVAFFYPFKGVRGGTLEPHWSGLLWTAMLISLAIVIALPKPHGIRALIASTILRLIFSVGLQPTLFLLGAFNVCNKIIFLMSFVGNCGTFTRGYRAMVLDVEFLYHLLYLVICAMGLFVHEFFYSLLLFDLVYREETLLNVIKSVTRNGRSIILTAVLALILVYLFSIVGYLFFKDDFILEVDRLPNETAVPETGESLASEFLFSDVCRVESGENCSSPAPREELVPAEETEQDKEHTCETLLMCIVTVLSHGLRSGGGVGDVLRKPSKEEPLFAARVIYDLLFFFMVIIIVLNLIFGVIIDTFADLRSEKQKKEEILKTTCFICGLERDKFDNKTVTFEEHIKEEHNMWHYLCFIVLVKVKDSTEYTGPESYVAEMIKERNLDWFPRMRAMSLVSSDSEGEQNELRNLQEKLESTMKLVTNLSGQLSELKDQMTEQRKQKQRIGLLGHPPHMNVNPQQPA

SEQ ID NO: 10017 - protein, 2710 aa, Homo sapiens
MSDKMSSFLHIGDICSLYAEGSTNGFISTLGLVDDRCVVQPETGDLNNPPKKFRDCLFKLCPMNRYSAQKQFWKAAKPGANSTTDAVLLNKLHHAADLEKKQNETENRKLLGTVIQYGNVIQLLHLKSNKYLTVNKRLPALLEKNAMRVTLDEAGNEGSWFYIQPFYKLRSIGDSVVIGDKVVLNPVNAGQPLHASSHQLVDNPGCNEVNSVNCNTSWKIVLFMKWSDNKDDILKGGDVVRLFHAEQEKFLTCDEHRKKQHVFLRTTGRQSATSATSSKALWEVEVVQHDPCRGGAGYWNSLFRFKHLATGHYLAAEVDPDFEEECLEFQPSVDPDQDASRSRLRNAQEKMVYSLVSVPEGNDISSIFELDPTTLRGGDSLVPRNSYVRLRHLCTNTWVHSTNIPIDKEEEKPVMLKIGTSPVKEDKEAFAIVPVSPAEVRDLDFANDASKVLGSIAGKLEKGTITQNERRSVTKLLEDLVYFVTGGTNSGQDVLEVVFSKPNRERQKLMREQNILKQIFKLLQAPFTDCGDGPMLRLEELGDQRHAPFRHICRLCYRVLRHSQQDYRKNQEYIAKQFGFMQKQIGYDVLAEDTITALLHNNRKLLEKHITAAEIDTFVSLVRKNREPRFLDYLSDLCVSMNKSIPVTQELICKAVLNPTNADILIETKLVLSRFEFEGVSSTGENALEAGEDEEEVWLFWRDSNKEIRSKSVRELAQDAKEGQKEDRDVLSYYRYQLNLFARMCLDRQYLAINEISGQLDVDLILRCMSDENLPYDLRASFCRLMLHMHVDRDPQEQVTPVKYARLWSEIPSEIAIDDYDSSGASKDEIKERFAQTMEFVEEYLRDVVCQRFPFSDKEKNKLTFEVVNLARNLIYFGFYNFSDLLRLTKILLAILDCVHVTTIFPISKMAKGEENKGSNVMRSIHGVGELMTQVVLRGGGFLPMTPMAAAPEGNVKQAEPEKEDIMVMDTKLKIIEILQFILNVRLDYRISCLLCIFKREFDESNSQTSETSSGNSSQEGPSNVPGALDFEHIEEQAEGIFGGSEENTPLDLDDHGGRTFLRVLLHLTMHDYPPLVSGALQLLFRHFSQRQEVLQAFKQVQLLVTSQDVDNYKQIKQDLDQLRSIVEKSELWVYKGQGPDETMDGASGENEHKKTEEGNNKPQKHESTSSYNYRVVKEILIRLSKLCVQESASVRKSRKQQQRLLRNMGAHAVVLELLQIPYEKAEDTKMQEIMRLAHEFLQNFCAGNQQNQALLHKHINLFLNPGILEAVTMQHIFMNNFQLCSEINERVVQHFVHCIETHGRNVQYIKFLQTIVKAEGKFIKKCQDMVMAELVNSGEDVLVFYNDRASFQTLIQMMRSERDRMDENSPLMYHIHLVELLAVCTEGKNVYTEIKCNSLLPLDDIVRVVTHEDCIPEVKIAYINFLNHCYVDTEVEMKEIYTSNHMWKLFENFLVDICRACNNTSDRKHADSILEKYVTEIVMSIVTTFFSSPFSDQSTTLQTRQPVFVQLLQGVFRVYHCNWLMPSQKASVESCIRVLSDVAKSRAIAIPVDLDSQVNNLFLKSHSIVQKTAMNWRLSARNAARRDSVLAASRDYRNIIERLQDIVSALEDRLRPLVQAELSVLVDVLHRPELLFPENTDARRKCESGGFICKLIKHTKQLLEENEEKLCIKVLQTLREMMTKDRGYGEKGEALRQVLVNRYYGNVRPSGRRESLTSFGNGPLSAGGPGKPGGGGGGSGSSSMSRGEMSLAEVQCHLDKEGASNLVIDLIMNASSDRVFHESILLAIALLEGGNTTIQHSFFCRLTEDKKSEKFFKVFYDRMKVAQQEIKATVTVNTSDLGNKKKDDEVDRDAPSRKKAKEPTTQITEEVRDQLLEASAATRKAFTTFRREADPDDHYQPGEGTQATADKAKDDLEMSAVITIMQPILRFLQLLCENHNRDLQNFLRCQNNKTNYNLVCETLQFLDCICGSTTGGLGLLGLYINEKNVALINQTLESLTEYCQGPCHENQNCIATHESNGIDIITALILNDINPLGKKRMDLVLELKNNASKLLLAIMESRHDSENAERILYNMRPKELVEVIKKAYMQGEVEFEDGENGEDGAASPRNVGHNIYILAHQLARHNKELQSMLKPGGQVDGDEALEFYAKHTAQIEIVRLDRTMEQIVFPVPSICEFLTKESKLRIYYTTERDEQGSKINDFFLRSEDLFNEMNWQKKLRAQPVLYWCARNMSFWSSISFNLAVLMNLLVAFFYPFKGVRGGTLEPHWSGLLWTAMLISLAIVIALPKPHGIRALIASTILRLIFSVGLQPTLFLLGAFNVCNKIIFLMSFVGNCGTFTRGYRAMVLDVEFLYHLLYLVICAMGLFVHEFFYSLLLFDLVYREETLLNVIKSVTRNGRSIILTAVLALILVYLFSIVGYLFFKDDFILEVDRLPNETAVPETGESLASEFLFSDVCRVESGENCSSPAPREELVPAEETEQDKEHTCETLLMCIVTVLSHGLRSGGGVGDVLRKPSKEEPLFAARVIYDLLFFFMVIIIVLNLIFGVIIDTFADLRSEKQKKEEILKTTCFICGLERDKFDNKTVTFEEHIKEEHNMWHYLCFIVLVKVKDSTEYTGPESYVAEMIKERNLDWFPRMRAMSLVSSDSEGEQNELRNLQEKLESTMKLVTNLSGQLSELKDQMTEQRKQKQRIGLLGHPPHMNVNPQQPA

SEQ ID NO: 10018 - protein, 1104 aa, Homo sapiens
MERSPGEGPSPSPMDQPSAPSDPTDQPPAAHAKPDPGSGGQPAGPGAAGEALAVLTSFGRRLLVLIPVYLAGAVGLSVGFVLFGLALYLGWRRVRDEKERSLRAARQLLDDEEQLTAKTLYMSHRELPAWVSFPDVEKAEWLNKIVAQVWPFLGQYMEKLLAETVAPAVRGSNPHLQTFTFTRVELGEKPLRIIGVKVHPGQRKEQILLDLNISYVGDVQIDVEVKKYFCKAGVKGMQLHGVLRVILEPLIGDLPFVGAVSMFFIRRPTLDINWTGMTNLLDIPGLSSLSDTMIMDSIAAFLVLPNRLLVPLVPDLQDVAQLRSPLPRGIIRIHLLAARGLSSKDKYVKGLIEGKSDPYALVRLGTQTFCSRVIDEELNPQWGETYEVMVHEVPGQEIEVEVFDKDPDKDDFLGRMKLDVGKVLQASVLDDWFPLQGGQGQVHLRLEWLSLLSDAEKLEQVLQWNWGVSSRPDPPSAAILVVYLDRAQDLPLKKGNKEPNPMVQLSIQDVTQESKAVYSTNCPVWEEAFRFFLQDPQSQELDVQVKDDSRALTLGALTLPLARLLTAPELILDQWFQLSSSGPNSRLYMKLVMRILYLDSSEICFPTVPGCPGAWDVDSENPQRGSSVDAPPRPCHTTPDSQFGTEHVLRIHVLEAQDLIAKDRFLGGLVKGKSDPYVKLKLAGRSFRSHVVREDLNPRWNEVFEVIVTSVPGQELEVEVFDKDLDKDDFLGRCKVRLTTVLNSGFLDEWLTLEDVPSGRLHLRLERLTPRPTAAELEEVLQVNSLIQTQKSAELAAALLSIYMERAEDLPLRKGTKHLSPYATLTVGDSSHKTKTISQTSAPVWDESASFLIRKPHTESLELQVRGEGTGVLGSLSLPLSELLVADQLCLDRWFTLSSGQGQVLLRAQLGILVSQHSGVEAHSHSYSHSSSSLSEEPELSGGPPHITSSAPELRQRLTHVDSPLEAPAGPLGQVKLTLWYYSEERKLVSIVHGCRSLRQNGRDPPDPYVSLLLLPDKNRGTKRRTSQKKRTLSPEFNERFEWELPLDEAQRRKLDVSVKSNSSFMSRERELLGKVQLDLAETDLSQGVARWYDLMDNKDKGSS

SEQ ID NO: 10019 - protein, 600 aa, Homo sapiens [sequence omitted]

SEQ ID NO: 10020 - protein, 646 aa, Homo sapiens
MFKEQQLQIFNLMKFDSYTRFLKSPLYQECILAEVEGRALPDSQQVPSSPASKHSLGSDHSSVSTPKKLSGKSKSGRSLNEELGDEDSEKKRKGAFFSWSRTRSTGRSQKKREHGDHADDALHANGGLCRRESQGSVSSAGSLDLSEACRTLAPEKDKATKHCCIHLPDGTSCVVAVKAGFSIKDILSGLCERHGINGAAADLFLVGGDKPLVLHQDSSILESRDLRLEKRTLFRLDLVPINRSVGLKAKPTKPVTEVLRPVVARYGLDLSGLLVRLSGEKEPLDLGAPISSLDGQRVVLEEKDPSRGKASADKQKGVPVKQNTAVNSSSRNHSATGEERTLGKSNSIKIKGENGKNARDPRLSKREESIAKIGKKKYQKINLDEAEEFFELISKAQSNRADDQRGLLRKEDLVLPEFLRLPPGSTELTLPTPAAVAKGFSKRSATGNGRESASQPGEQWEPVQESSDSPSTSPGSASSPPGPPGTTPPGQKSPSGPFCTPQSPVSLAQEGTAQIWKRQSQEVEAGGIQTVEDEHVAELTLMGEGDISSPNSTLLPPPSTPQEVPGPSRPGSGTHGSRDLPVNRIIDVDLVTGSAPGRDGGIAGAQAGPGRSQASGGPPTSDLPGLGPVPGEPAKPKTSAHHATFV

SEQ ID NO: 10021 - protein, 555 aa, Homo sapiens
MKKHDFAENLPSSLLIIILVIFTLSGSKFGRGTGLTQPSQRTSARRSFGRSKRFSITRSLDDLESATVSDGELTGADLKDCVSNNSLSSNASLPSVQSCRRLRERRVASWAVSFERLLQDPVGVRYFSDFLRKEFSEENILFWQACEYFNHVPAHDKKELSYRAREIFSKFLCSKATTPVNIDSQAQLADDVLRAPHPDMFKEQQLQIFNLMKFDSYTRFLKSPLYQECILAEVEGRALPDSQQVPSSPASKHSLGSDHSSVSTPKKLSGKSKSGRSLNEELGDEDSEKKRKGAFFSWSRTRSTGRSQKKREHGDHADDALHANGGLCRRESQGSVSSAGSLDLSEACRTLAPEKDKATKHCCIHLPDGTSCVVAVKAGFSIKDILSGLCERHGINGAAADLFLVGGDKPLVLHQDSSILESRDLRLEKRTLFRLDLVPINRSVGLKAKPTKPVTEVLRPVVARYGLDLSGLLVRLSGEKEPLDLGAPISSLDGQRVVLEEKDPSRGKASADKQKGVPVKQNTAVNSSSRNHSATSFLSLFPKLRATEQMTNVGC

SEQ ID NO: 10022 - protein, 791 aa, Homo sapiens
MAGAEGRGAGAVCAGPAELTGADLKDCVSNNSLSSNASLPSVQSCRRLRERRVASWAVSFERLLQDPVGVRYFSDFLRKEFSEENILFWQACEYFNHVPAHDKKELSYRAREIFSKFLCSKATTPVNIDSQAQLADDVLRAPHPDMFKEQQLQIFNLMKFDSYTRFLKSPLYQECILAEVEGRALPDSQQVPSSPASKHSLGSDHSSVSTPKKLSGKSKSGRSLNEELGDEDSEKKRKGAFFSWSRTRSTGRSQKKREHGDHADDALHANGGLCRRESQGSVSSAGSLDLSEACRTLAPEKDKATKHCCIHLPDGTSCVVAVKAGFSIKDILSGLCERHGINGAAADLFLVGGDKPLVLHQDSSILESRDLRLEKRTLFRLDLVPINRSVGLKAKPTKPVTEVLRPVVARYGLDLSGLLVRLSGEKEPLDLGAPISSLDGQRVVLEEKDPSRGKASADKQKGVPVKQNTAVNSSSRNHSATGEERTLGKSNSIKIKGENGKNARDPRLSKREESIAKIGKKKYQKINLDEAEEFFELISKAQSNRADDQRGLLRKEDLVLPEFLRLPPGSTELTLPTPAAVAKGFSKRSATGNGRESASQPGEQWEPVQESSDSPSTSPGSASSPPGPPGTTPPGQKSPSGPFCTPQSPVSLAQEGTAQIWKRQSQEVEAGGIQTVEDEHVAELTLMGEGDISSPNSTLLPPPSTPQEVPGPSRPGSGTHGSRDLPVNRIIDVDLVTGSAPGRDGGIAGAQAGPGRSQASGGPPTSDLPGLGPVPGEPAKPKTSAHHATFV

SEQ ID NO: 10023 - protein, 799 aa, Homo sapiens
MNLGKELSNETHVSNDQQSATVSDGELTGADLKDCVSNNSLSSNASLPSVQSCRRLRERRVASWAVSFERLLQDPVGVRYFSDFLRKEFSEENILFWQACEYFNHVPAHDKKELSYRAREIFSKFLCSKATTPVNIDSQAQLADDVLRAPHPDMFKEQQLQIFNLMKFDSYTRFLKSPLYQECILAEVEGRALPDSQQVPSSPASKHSLGSDHSSVSTPKKLSGKSKSGRSLNEELGDEDSEKKRKGAFFSWSRTRSTGRSQKKREHGDHADDALHANGGLCRRESQGSVSSAGSLDLSEACRTLAPEKDKATKHCCIHLPDGTSCVVAVKAGFSIKDILSGLCERHGINGAAADLFLVGGDKPLVLHQDSSILESRDLRLEKRTLFRLDLVPINRSVGLKAKPTKPVTEVLRPVVARYGLDLSGLLVRLSGEKEPLDLGAPISSLDGQRVVLEEKDPSRGKASADKQKGVPVKQNTAVNSSSRNHSATGEERTLGKSNSIKIKGENGKNARDPRLSKREESIAKIGKKKYQKINLDEAEEFFELISKAQSNRADDQRGLLRKEDLVLPEFLRLPPGSTELTLPTPAAVAKGFSKRSATGNGRESASQPGEQWEPVQESSDSPSTSPGSASSPPGPPGTTPPGQKSPSGPFCTPQSPVSLAQEGTAQIWKRQSQEVEAGGIQTVEDEHVAELTLMGEGDISSPNSTLLPPPSTPQEVPGPSRPGSGTHGSRDLPVNRIIDVDLVTGSAPGRDGGIAGAQAGPGRSQASGGPPTSDLPGLGPVPGEPAKPKTSAHHATFV

SEQ ID NO: 10024 - protein, 789 aa, Homo sapiens
MSLSLFFQSATVSDGELTGADLKDCVSNNSLSSNASLPSVQSCRRLRERRVASWAVSFERLLQDPVGVRYFSDFLRKEFSEENILFWQACEYFNHVPAHDKKELSYRAREIFSKFLCSKATTPVNIDSQAQLADDVLRAPHPDMFKEQQLQIFNLMKFDSYTRFLKSPLYQECILAEVEGRALPDSQQVPSSPASKHSLGSDHSSVSTPKKLSGKSKSGRSLNEELGDEDSEKKRKGAFFSWSRTRSTGRSQKKREHGDHADDALHANGGLCRRESQGSVSSAGSLDLSEACRTLAPEKDKATKHCCIHLPDGTSCVVAVKAGFSIKDILSGLCERHGINGAAADLFLVGGDKPLVLHQDSSILESRDLRLEKRTLFRLDLVPINRSVGLKAKPTKPVTEVLRPVVARYGLDLSGLLVRLSGEKEPLDLGAPISSLDGQRVVLEEKDPSRGKASADKQKGVPVKQNTAVNSSSRNHSATGEERTLGKSNSIKIKGENGKNARDPRLSKREESIAKIGKKKYQKINLDEAEEFFELISKAQSNRADDQRGLLRKEDLVLPEFLRLPPGSTELTLPTPAAVAKGFSKRSATGNGRESASQPGEQWEPVQESSDSPSTSPGSASSPPGPPGTTPPGQKSPSGPFCTPQSPVSLAQEGTAQIWKRQSQEVEAGGIQTVEDEHVAELTLMGEGDISSPNSTLLPPPSTPQEVPGPSRPGSGTHGSRDLPVNRIIDVDLVTGSAPGRDGGIAGAQAGPGRSQASGGPPTSDLPGLGPVPGEPAKPKTSAHHATFV

SEQ ID NO: 10025 - protein, 729 aa, Homo sapiens
MTEITAEGNASTTTTVIDSKNGSVPKSPGKVLKRTVTEDIVTTFSSPAAWLLVIALIITWSAVAIVMFDLVDYKNFSASSIAKIGSDPLKLVRDAMEETTDWIYGFFSLLSDIISSEDEEDDDGDEDTDKGEIDEPPLRKKEIHKDKTEKQEKPERKIQTKVTHKEKEKGKEKVREKEKPEKKATHKEKIEKKEKPETKTVAKEQKKAKTAEKSEEKTKKEVKGGKQEKVKQTAAKVKEVQKTPSKPKEKEDKEKAAVSKHEQKDQYAFCRYMIDIFVHGDLKPGQSPAIPPPLPTEQASRPTPASPALEEKEGEKKKAEKKVTSETKKKEKEDIKKKSEKETAIDVEKKEPGKASETKQGTVKIAAQAAAKKDEKKEDSKKTKKPAEVEQPKGKKQEKKEKHVEPAKSPKKEHSVPSDKQVKAKTERAKEEIGAVSSKKAVPGKKEEKTTKTVEQEIRKEKSGKTSSILKDKEPIKGKEEKVPASLKEKEPETKKDEKMSKAGKEVKPKPPQLQGKKEEKPEPQIKKEAKPAISEKVQIHKQDIVKPEKTVSHGKPEEKVLKQVKAVTIEKTAKPKPTKKAEHREREPPSIKTDKPKPTPKGTSEVTESGKKKTEISEKESKEKADMKHLREEKVSTRKESLQLHNVTKAEKPARVSKDVEDVPASKKAKEGTEDVSPTKQKSPISFFQCVYLDGYNGYGFQFPFTPADRPGESSGQANSPGQKQQGQ

SEQ ID NO: 10026 - protein, 360 aa, Homo sapiens
MSQGRGKYDFYIGLGLAMSSSIFIGGSFILKKKGLLRLARKGSMRAGQGGHAYLKEWLWWAGLLSMGAGEVANFAAYAFAPATLVTPLGALSVLVSAILSSYFLNERLNLHGKIGCLLSILGSTVMVIHAPKEEEIETLNEMSHKLGDPGFVVFATLVVIVALILIFVVGPRHGQTNILVYITICSVIGAFSVSCVKGLGIAIKELFAGKPVLRHPLAWILLLSLIVCVSTQINYLNRALDIFNTSIVTPIYYVFFTTSVLTCSAILFKEWQDMPVDDVIGTLSGFFTIIVGIFLLHAFKDVSFSLASLPVSFRKDEKAMNGNLSNMYEVLNNNEESLTCGIEQHTGENVSRRNGNLTAF

SEQ ID NO: 10027 - protein, 532 aa, Homo sapiens
MEKSNETNGYLDSAQAGPAAGPGAPGTAAGRARRCAGFLRRQALVLLTVSGVLAGAGLGAALRGLSLSRTQVTYLAFPGEMLLRMLRMIILPLVVCSLVSGAASLDASCLGRLGGIAVAYFGLTTLSASALAVALAFIIKPGSGAQTLQSSDLGLEDSGPPPVPKETVDSFLDLARNLFPSNLVVAAFRTYATDYKVVTQNSSSGNVTHEKIPIGTEIEGMNILGLVLFALVLGVALKKLGSEGEDLIRFFNSLNEATMVLVSWIMWYVPVGIMFLVGSKIVEMKDIIVLVTSLGKYIFASILGHVIHGGIVLPLIYFVFTRKNPFRFLLGLLAPFATAFATCSSSATLPSMMKCIEENNGVDKRISRFILPIGATVNMDGAAIFQCVAAVFIAQLNNVELNAGQIFTILVTATASSVGAAGVPAGGVLTIAIILEAIGLPTHDLPLILAVDWIVDRTTTVVNVEGDALGAGILHHLNQKATKKGEQELAEVKVEAIPNCKSEEETSPLVTHQNPAGPVASAPELESKESVL

SEQ ID NO: 10028 - protein, 1382 aa, Homo sapiens
MTRKRTYWVPNSSGGLVNRGIDIGDDMVSGLIYKTYTLQDGPWSQQERNPEAPGRAAVPPWGKYDAALRTMIPFRPKPRFPAPQPLDNAGLFSYLTVSWLTPLMIQSLRSRLDENTIPPLSVHDASDKNVQRLHRLWEEEVSRRGIEKASVLLVMLRFQRTRLIFDALLGICFCIASVLGPILIIPKILEYSEEQLGNVVHGVGLCFALFLSECVKSLSFSSSWIINQRTAIRFRAAVSSFAFEKLIQFKSVIHITSGEAISFFTGDVNYLFEGVCYGPLVLITCASLVICSISSYFIIGYTAFIAILCYLLVFPLAVFMTRMAVKAQHHTSEVSDQRIRVTSEVLTCIKLIKMYTWEKPFAKIIEDLRRKERKLLEKCGLVQSLTSITLFIIPTVATAVWVLIHTSLKLKLTASMAFSMLASLNLLRLSVFFVPIAVKGLTNSKSAVMRFKKFFLQESPVFYVQTLQDPSKALVFEEATLSWQQTCPGIVNGALELERNGHASEGMTRPRDALGPEEEGNSLGPELHKINLVVSKGMMLGVCGNTGSGKSSLLSAILEEMHLLEGSVGVQGSLAYVPQQAWIVSGNIRENILMGGAYDKARYLQVLHCCSLNRDLELLPFGDMTEIGERGLNLSGGQKQRISLARAVYSDRQIYLLDDPLSAVDAHVGKHIFEECIKKTLRGKTVVLVTHQLQYLEFCGQIILLENGKICENGTHSELMQKKGKYAQLIQKMHKEATSDMLQDTAKIAEKPKVESQALATSLEESLNGNAVPEHQLTQEEEMEEGSLSWRVYHHYIQAAGGYMVSCIIFFFVVLIVFLTIFSFWWLSYWLEQGSGTNSSRESNGTMADLGNIADNPQLSFYQLVYGLNALLLICVGVCSSGIFTKVTRKASTALHNKLFNKVFRCPMSFFDTIPIGRLLNCFAGDLEQLDQLLPIFSEQFLVLSLMVIAVLLIVSVLSPYILLMGAIIMVICFIYYMMFKKAIGVFKRLENYSRSPLFSHILNSLQGLSSIHVYGKTEDFISQFKRLTDAQNNYLLLFLSSTRWMALRLEIMTNLVTLAVALFVAFGISSTPYSFKVMAVNIVLQLASSFQATARIGLETEAQFTAVERILQYMKMCVSEAPLHMEGTSCPQGWPQHGEIIFQDYHMKYRDNTPTVLHGINLTIRGHEVVGIVGRTGSGKSSLGMALFRLVEPMAGRILIDGVDICSIGLEDLRSKLSVIPQDPVLLSGTIRFNLDPFDRHTDQQIWDALERTFLTKAISKFPKKLHTDVVENGGNFSVGERQLLCIARAVLRNSKIILIDEATASIDMETDTLIQRTIREAFQGCTVLVIAHRVTTVLNCDHILVMGNGKVVEFDRPEVLRKKPGSLFAALMATATSSLR

SEQ ID NO: 10029 - protein, 1344 aa, Homo sapiens [sequence omitted]

SEQ ID NO: 10030 - protein, 328 aa, Homo sapiens
MDNASFSEPWPANASGPDPALSCSNASTLAPLPAPLAVAVPVVYAVICAVGLAGNSAVLYVLLRAPRMKTVTNLFILNLAIADELFTLVLPINIADFLLRQWPFGELMCKLIVAIDQYNTFSSLYFLTVMSADRYLVVLATAESRRVAGRTYSAARAVSLAVWGIVTLVVLPFAVFARLDDEQGRRQCVLVFPQPEAFWWRASRLYTLVLGFAIPVSTICVLYTTLLCRLHAMRLDSHAKALERAKKRVTFLVVAILAVCLLCWTPYHLSTVVALTTDLPQTPLVIAISYFITSLTYANSCLNPFLYAFLDASFRRNLRQLITCRAAA

SEQ ID NO: 10031 - protein, 348 aa, Homo sapiens
MDLGNSGNDSVVTKFVLLGLTETAALQPILFVIFLLAYVTTIGGTLSILAAILMETKLHSPMYFFLGNLSLPDVGCVSVTVPAMLSHFISNDRSIPYKACLSELFFFHLLAGADCFLLTIMAYDRYLAICQSLTYSSRMSWGIQQALVGMSCVFSFTNALTQTVALSPLNFCGPNVINHFYCDLPQPFQLSCASVHLNGQLLFVAAAFMGVAPLVLITVSYAHVAAAVLRIRSAEGKKKAFSTCSSHLTVVGIFYGTGVFSYTRLGSVESSDKDKGIGILNTVISPMLNPLIYWTSLLDVGCISHCSSDAGVSPGPPVQSSLCCLQFTALLSPPPGWGGLSPLNSHGL

SEQ ID NO: 10032 - protein, 582 aa, Homo sapiens
MFPAGPPSHSLLRLPLLQLLLLVVQAVGRGLGRASPAGGPLEDVVIERYHIPRACPREVQMGDFVRYHYNGTFEDGKKFDSSYDRNTLVAIVVGVGRLITGMDRGLMGMCVNERRRLIVPPHLGYGSIGLAGLIPPDATLYFDVVLLDVWNKEDTVQVSTLLRPPHCPRMVQDGDFVRYHYNGTLLDGTSFDTSYSKGGTYDTYVGSGWLIKGMDQGLLGMCPGERRKIIIPPFLAYGEKGYGTVIPPQASLVFHVLLIDVHNPKDAVQLETLELPPGCVRRAGAGDFMRYHYNGSLMDGTLFDSSYSRNHTYNTYIGQGYIIPGMDQGLQGACMGERRRITIPPHLAYGENGTGDKIPGSAVLIFNVHVIDFHNPADVVEIRTLSRPSETCNETTKLGDFVRYHYNCSLLDGTQLFTSHDYGAPQEATLGANKVIEGLDTGLQGMCVGERRQLIVPPHLAHGESGARGVPGSAVLLFEVELVSREDGLPTGYLFVWHKDPPANLFEDMDLNKDGEVPPEEFSTFIKAQVSEGKGRLMPGQDPEKTIGDMFQNQDRNQDGKITVDELKLKSDEDEERVHEEL

SEQ ID NO: 10033 - protein, 205 aa, Homo sapiens
MKQSDASPQERVDSDDQWGEYSCVFLPEPMGTANIQLHGPPRVKAVKSSEHINEGETAMLVCKSESVPPVTDWAWYKITDSEDKALMNGSESRFFVSSSQGRSELHIENLNMEADPGQYRCNGTSSKGSDQAIITLRVRSHLAALWPFLGIVAEVLVLVTIIFIYEKRRKPEDVLDDDDAGSAPLKSSGQHQNDKGKNVRQRNSS

SEQ ID NO: 10034 - protein, 176 aa, Homo sapiens
MGTANIQLHGPPRVKAVKSSEHINEGETAMLVCKSESVPPVTDWAWYKITDSEDKALMNGSESRFFVSSSQGRSELHIENLNMEADPGQYRCNGTSSKGSDQAIITLRVRSHLAALWPFLGIVAEVLVLVTIIFIYEKRRKPEDVLDDDDAGSAPLKSSGQHQNDKGKNVRQRNSS

SEQ ID NO: 10035 - protein, 1048 aa, Homo sapiens
MAFPPRRRLRLGPRGLPLLLSGLLLPLCRAFNLDVDSPAEYSGPEGSYFGFAVDFFVPSASSRMFLLVGAPKANTTQPGIVEGGQVLKCDWSSTRRCQPIEFDATGNRDYAKDDPLEFKSHQWFGASVRSKQDKILACAPLYHWRTEMKQEREPVGTCFLQDGTKTVEYAPCRSQDIDADGQGFCQGGFSIDFTKADRVLLGGPGSFYWQGQLISDQVAEIVSKYDPNVYSIKYNNQLATRTAQAIFDDSYLGYSVAVGDFNGDGIDDFVSGVPRAARTLGMVYIYDGKNMSSLYNFTGEQMAAYFGFSVAATDINGDDYADVFIGAPLFMDRGSDGKLQEVGQVSVSLQRASGDFQTTKLNGFEVFARFGSAIAPLGDLDQDGFNDIAIAAPYGGEDKKGIVYIFNGRSTGLNAVPSQILEGQWAARSMPPSFGYSMKGATDIDKNGYPDLIVGAFGVDRAILYRARPVITVNAGLEVYPSILNQDNKTCSLPGTALKVSCFNVRFCLKADGKGVLPRKLNFQVELLLDKLKQKGAIRRALFLYSRSPSHSKNMTISRGGLMQCEELIAYLRDESEFRDKLTPITIFMEYRLDYRTAADTTGLQPILNQFTPANISRQAHILLDCGEDNVCKPKLEVSVDSDQKKIYIGDDNPLTLIVKAQNQGEGAYEAELIVSIPLQADFIGVVRNNEALARLSCAFKTENQTRQVVCDLGNPMKAGTQLLAGLRFSVHQQSEMDTSVKFDLQIQSSNLFDKVSPVVSHKVDLAVLAAVEIRGVSSPDHIFLPIPNWEHKENPETEEDVGPVVQHIYELRNNGPSSFSKAMLHLQWPYKYNNNTLLYILHYDIDGPMNCTSDMEINPLRIKISSLQTTEKNDTVAGQGERDHLITKRDLALSEGDIHTLGCGVAQCLKIVCQVGRLDRGKSAILYVKSLLWTETFMNKENQNHSYSLKSSASFNVIEFPYKNLPIEDITNSTLVTTNVTWGIQPAPMPVPVWVIILAVLAGLLLLAVLVFVMYRMGFFKRVRPPQEEQEREQLQPHENGEGNSET

SEQ ID NO: 10036 - protein, 235 aa, Homo sapiens
MAVELGVLLVRPRPGTGLGRVMRTLLLVLWLATRGSALYFHIGETEKKCFIEEIPDETMVIGNYRTQLYDKQREEYQPATPGLGMFVEVKDPEDKVILARQYGSEGRFTFTSHTPGEHQICLHSNSTKFSLFAGGMLRVHLDIQVGEHANDYAEIAAKDKLSELQLRVRQLVEQVEQIQKEQNYQRWREERFRQTSESTNQRVLWWSILQTLILVAIGVWQMRHLKSFFEAKKLV

SEQ ID NO: 10037 - protein, 183 aa, Homo sapiens
MRLLSFVVLALFAVTQAEEGARLLASKSLLNRYAVEGRDLTLQYNIYNVGSSAALDVELSDDSFPPEDFGIVSGMLNVKWDRIAPASNVSHTVVLRPLKAGYFNFTSATITYLAQEDGPVVIGSTSAPGQGGILAQREFDRRFSPHFLDWAAFGVMTLPSIGIPLLLWYSSKRKYDTPKTKKN

SEQ ID NO: 10038 - protein, 563 aa, Homo sapiens [sequence omitted]

SEQ ID NO: 10039 - protein, 689 aa, Homo sapiens
MDFNLILESLCRGNSVERKIYIPLNKTAPCVRLLNATHQIGCQSSISGDTGVIHVVEKEEDLQWVLTDGPNPPYMVLLESKHFTRDLMEKLKGRTSRIAGLAVSLTKPSPASGFSPSVQCPNDGFGVYSNSYGPEFAHCREIQWNSLGNGLAYEDFSFPIFLLEDENETKVIKQCYQDHNLSQNGSAPTFPLCAMQLFSHMHAVISTATCMRRSSIQSTFSINPEIVCDPLSDYNVWSMLKPINTTGTLKPDDRVVVAATRLDSRSFFWNVAPGAESAVASFVTQLAAAEALQKAPDVTTLPRNVMFVFFQGETFDYIGSSRMVYDMEKGKFPVQLENVDSFVELGQVALRTSLELWMHTDPVSQKNESVRNQVEDLLATLEKSGAGVPAVILRRPNQSQPLPPSSLQRFLRARNISGVVLADHSGAFHNKYYQSIYDTAENINVSYPEWLSPEEDLNFVTDTAKALADVATVLGRALYELAGGTNFSDTVQADPQTVTRLLYGFLIKANNSWFQSILRQDLRSYLGDGPLQHYIAVSSPTNTTYVVQYALANLTGTVVNLTREQCQDPSKVPSENKDLYEYSWVQGPLHSNETDRLPRCVRSTARLARALSPAFELSQWSSTEYSTWTESRWKDIRARIFLIASKELELITLTVGFGILIFSLIVTYCINAKADVLFIAPREPGAVSY

SEQ ID NO: 10040 - protein, 709 aa, Homo sapiens
MATAGGGSGADPGSRGLLRLLSFCVLLAGLCRGNSVERKIYIPLNKTAPCVRLLNATHQIGCQSSISGDTGVIHVVEKEEDLQWVLTDGPNPPYMVLLESKHFTRDLMEKLKGRTSRIAGLAVSLTKPSPASGFSPSVQCPNDGFGVYSNSYGPEFAHCREIQWNSLGNGLAYEDFSFPIFLLEDENETKVIKQCYQDHNLSQNGSAPTFPLCAMQLFSHMHAVISTATCMRRSSIQSTFSINPEIVCDPLSDYNVWSMLKPINTTGTLKPDDRVVVAATRLDSRSFFWNVAPGAESAVASFVTQLAAAEALQKAPDVTTLPRNVMFVFFQGETFDYIGSSRMVYDMEKGKFPVQLENVDSFVELGQVALRTSLELWMHTDPVSQKNESVRNQVEDLLATLEKSGAGVPAVILRRPNQSQPLPPSSLQRFLRARNISGVVLADHSGAFHNKYYQSIYDTAENINVSYPEWLSPEEDLNFVTDTAKALADVATVLGRALYELAGGTNFSDTVQADPQTVTRLLYGFLIKANNSWFQSILRQDLRSYLGDGPLQHYIAVSSPTNTTYVVQYALANLTGTVVNLTREQCQDPSKVPSENKDLYEYSWVQGPLHSNETDRLPRCVRSTARLARALSPAFELSQWSSTEYSTWTESRWKDIRARIFLIASKELELITLTVGFGILIFSLIVTYCINAKADVLFIAPREPGAVSY

SEQ ID NO: 10041 - protein, 254 aa, Homo sapiens [sequence omitted]

SEQ ID NO: 10042 - protein, 259 aa, Homo sapiens [sequence omitted]

SEQ ID NO: 10043 - protein, 299 aa, Homo sapiens
MGTKAQVERKLLCLFILAILLCSLALGSVTVHSSEPEVRIPENNPVKLSCAYSGFSSPRVEWKFDQGDTTRLVCYNNKITASYEDRVTFLPTGITFKSVTREDTGTYTCMVSEEGGNSYGEVKVKLIVLVPPSKPTVNIPSSATIGNRAVLTCSEQDGSPPSEYTWFKDGIVMPTNPKSTRAFSNSSYVLNPTTGELVFDPLSASDTGEYSCEARNGYGTPMTSNAVRMEAVERNVGVIVAAVLVTLILLGILVFGIWFAYSRGHFDRTKKGTSSKKVIYSQPSARSEGEFKQTSSFLV

SEQ ID NO: 10044 - protein, 1380 aa, Homo sapiens
MASGRDERPPWRLGRLLLLMCLLLLGSSARAAHIKKAEATTTTTSAGAEAAEGQFDRYYHEEELESALREAAAAGLPGLARLFSIGRSVEGRPLWVLRLTAGLGSLIPEGDAGPDAAGPDAAGPLLPGRPQVKLVGNMHGDETVSRQVLIYLARELAAGYRRGDPRLVRLLNTTDVYLLPSLNPDGFERAREGDCGFGDGGPSGASGRDNSRGRDLNRSFPDQFSTGEPPALDEVPEVRALIEWIRRNKFVLSGNLHGGSVVASYPFDDSPEHKATGIYSKTSDDEVFKYLAKAYASNHPIMKTGEPHCPGDEDETFKDGITNGAHWYDVEGGMQDYNYVWANCFEITLELSCCKYPPASQLRQEWENNRESLITLIEKVHIGVKGFVKDSITGSGLENATISVAGINHNITTGRFGDFYRLLVPGTYNLTVVLTGYMPLTVTNVVVKEGPATEVDFSLRPTVTSVIPDTTEAVSTASTVAIPNILSGTSSSYQPIQPKDFHHHHFPDMEIFLRRFANEYPNITRLYSLGKSVESRELYVMEISDNPGVHEPGEPEFKYIGNMHGNEVVGRELLLNLIEYLCKNFGTDPEVTDLVHNTRIHLMPSMNPDGYEKSQEGDSISVIGRNNSNNFDLNRNFPDQFVQITDPTQPETIAVMSWMKSYPFVLSANLHGGSLVVNYPFDDDEQGLATYSKSPDDAVFQQIALSYSKENSQMFQGRPCKNMYPNEYFPHGITNGASWYNVPGGMQDWNYLQTNCFEVTIELGCVKYPLEKELPNFWEQNRRSLIQFMKQVHQGVRGFVLDATDGRGILNATISVAEINHPVTTYKTGDYWRLLVPGTYKITASARGYNPVTKNVTVKSEGAIQVNFTLVRSSTDSNNESKKGKGASSSTNDASDPTTKEFETLIKDLSAENGLESLMLRSSSNLALALYRYHSYKDLSEFLRGLVMNYPHITNLTNLGQSTEYRHIWSLEISNKPNVSEPEEPKIRFVAGIHGNAPVGTELLLALAEFLCLNYKKNPAVTQLVDRTRIVIVPSLNPDGRERAQEKDCTSKIGQTNARGKDLDTDFTNNASQPETKAIIENLIQKQDFSLSVALDGGSMLVTYPYDKPVQTVENKETLKHLASLYANNHPSMHMGQPSCPNKSDENIPGGVMRGAEWHSHLGSMKDYSVTYGHCPEITVYTSCCYFPSAARLPSLWADNKRSLLSMLVEVHKGVHGFVKDKTGKPISKAVIVLNEGIKVQTKEGGYFHVLLAPGVHNIIAIADGYQQQHSQVFVHHDAASSVVIVFDTDNRIFGLPRELVVTVSGATMSALILTACIIWCICSIKSNRHKDGFHRLRQHHDEYEDEIRMMSTGSKKSLLSHEFQDETDTEEETLYSSKH

SEQ ID NO: 10045 - protein, 1380 aa, Homo sapiens [sequence omitted]

SEQ ID NO: 10046 - protein, 277 aa, Homo sapiens
MFPFYSCWRTGLLLLLLAVAVRESWQTEEKTCDLVGEKGKESEKELALVKRLKPLFNKSFESTVGQGSDTYIYIFRVCREAGNHTSGAGLVQINKSNGKETVVGRLNETHIFNGSNWIMLIYKGGDEYDNHCGKEQRRAVVMISCNRHTLADNFNPVSEERGKVQDCFYLFEMDSSLACSPEISHLSVGSILLVTFASLVAVYVVGGFLYQRLVVGAKGMEQFPHLAFWQDLGNLVADGCDFVCRSKPRNVPAAYRGVGDDQLGEESEERDDHLLPM

SEQ ID NO: 10047 - protein, 570 aa, Homo sapiens
MAFRGWRPPPPPLLLLLLWVTGQAAPVAGLGSDAELQIERRFVPDECPRTVRSGDFVRYHYVGTFPDGQKFDSSYDRDSTFNVFVGKGQLITGMDQALVGMCVNERRFVKIPPKLAYGNEGVSGVIPPNSVLHFDVLLMDIWNSEDQVQIHTYFKPPSCPRTIQVSDFVRYHYNGTFLDGTLFDSSHNRMKTYDTYVGIGWLIPGMDKGLLGMCVGEKRIITIPPFLAYGEDGDGKDIPGQASLVFDVALLDLHNPKDSISIENKVVPENCERISQSGDFLRYHYNGTLLDGTLFDSSYSRNRTFDTYIGQGYVIPGMDEGLLGVCIGEKRRIVVPPHLGYGEEGRGNIPGSAVLVFDIHVIDFHNPSDSISITSHYKPPDCSVLSKKGDYLKYHYNASLLDGTLLDSTWNLGKTYNIVLGSGQVVLGMDMGLREMCVGEKRTVIIPPHLGYGEAGVDGEVPGSAVLVFDIELLELVAGLPEGYMFIWNGEVSPNLFEEIDKDGNGEVLLEEFSEYIHAQVASGKGKLAPGFDAELIVKNMFTNQDRNGDGKVTAEEFKLKDQEAKHDEL

SEQ ID NO: 10048 - protein, 570 aa, Homo sapiens [sequence omitted]

SEQ ID NO: 10049 - protein, 359 aa, Homo sapiens
MAPMGIRLSPLGVAVFCLLGLGVLYHLYSGFLAGRFSLFGLGGEPGGGAAGPAAAADGGTVDLREMLAVSVLAAVRGGDEVRRVRESNVLHEKSKGKTREGAEDKMTSGDVLSNRKMFYLLKTAFPSVQINTEEHVDAADQEVILWDHKIPEDILKEVTTPKEVPAESVTVWIDPLDATQEYTEDLRKYVTTMVCVAVNGKPMLGVIHKPFSEYTAWAMVDGGSNVKARSSYNEKTPRIVVSRSHSGMVKQVALQTFGNQTTIIPAGGAGYKVLALLDVPDKSQEKADLYIHVTYIKKWDICAGNAILKALGGHMTTLSGEEISYTGSDGIEGGLLASIRMNHQALVRKLPDLEKTGHK

SEQ ID NO: 10050 - protein, 470 aa, Homo sapiens
MFPAGPPSHSLLRLPLLQLLLLVVQAVGRGLGRASPAGGPLEDVVIERYHIPRACPREVQMGDFVRYHYNGTFEDGKKFDSSYDRNTLVAIVVGVGRLITGMDRGLMGMCVNERRRLIVPPHLGYGSIGLAGLIPPDATLYFDVVLLDVWNKEDTVQVSTLLRPPHCPRMVQDGDFMRYHYNGSLMDGTLFDSSYSRNHTYNTYIGQGYIIPGMDQGLQGACMGERRRITIPPHLAYGENGTGDKIPGSAVLIFNVHVIDFHNPADVVEIRTLSRPSETCNETTKLGDFVRYHYNCSLLDGTQLFTSHDYGAPQEATLGANKVIEGLDTGLQGMCVGERRQLIVPPHLAHGESGARGVPGSAVLLFEVELVSREDGLPTGYLFVWHKDPPANLFEDMDLNKDGEVPPEEFSTFIKAQVSEGKGRLMPGQDPEKTIGDMFQNQDRNQDGKITVDELKLKSDEDEERVHEEL

SEQ ID NO: 10051 - protein, 355 aa, Homo sapiens
MRYHYNGSLMDGTLFDSSYSRNHTYNTYIGQGYIIPGMDQGLQGACMGERRRITIPPHLAYGENGTDSIGFLQGSAPLRPFRSGEGQPSLGREGGYGKTEPAYPQDPAVLGASVSSPVKWASHADPQGDKIPGSAVLIFNVHVIDFHNPADVVEIRTLSRPSETCNETTKLGDFVRYHYNCSLLDGTQLFTSHDYGAPQEATLGANKVIEGLDTGLQGMCVGERRQLIVPPHLAHGESGARGVPGSAVLLFEVELVSREDGLPTGYLFVWHKDPPANLFEDMDLNKDGEVPPEEFSTFIKAQVSEGKGRLMPGQDPEKTIGDMFQNQDRNQDGKITVDELKLKSDEDEERVHEEL

SEQ ID NO: 10052 - protein, 306 aa, Homo sapiens
MASPGCLWLLAVALLPWTCASRALQHLDPPAPLPLVIWHGMGDSCCNPLSMGAIKKMVEKKIPGIYVLSLEIGKTLMEDVENSFFLNVNSQVTTVCQALAKDPKLQQGYNAMGFSQGGQFLRAVAQRCPSPPMINLISVGGQHQGVFGLPRCPGESSHICDFIRKTLNAGAYSKVVQERLVQAEYWHDPIKEDVYRNHSIFLADINQERGINESYKKNLMALKKFVMVKFLNDSIVDPVDSEWFGFYRSGQAKETIPLQETSLYTQDRLGLKEMDNAGQLVFLATEGDHLQLSEEWFYAHIIPFLG

SEQ ID NO: 10053 - protein, 600 aa, Homo sapiens
MARGSAVAWAALGPLLWGCALGLQGGMLYPQESPSRECKELDGLWSFRADFSDNRRRGFEEQWYRRPLWESGPTVDMPVPSSFNDISQDWRLRHFVGWVWYEREVILPERWTQDLRTRVVLRIGSAHSYAIVWVNGVDTLEHEGGYLPFEADISNLVQVGPLPSRLRITIAINNTLTPTTLPPGTIQYLTDTSKYPKGYFVQNTYFDFFNYAGLQRSVLLYTTPTTYIDDITVTTSVEQDSGLVNYQISVKGSNLFKLEVRLLDAENKVVANGTGTQGQLKVPGVSLWWPYLMHERPAYLYSLEIRGKGFDWPLLVKDFNLLRWLGANAFRTSHYPYAEEVMQMCDRYGIVVIDECPGVGLALPQFFNNVSLHHHMQVMEEVVRRDKNHPAVVMWSVANEPASHLESAGYYLKMVIAHTKSLDPSRPVTFVSNSNYAADKGAPYVDVICLNSYYSWYHDYGHLELIQLQLATQFENWYKKYQKPIIQSEYGAETIAGFHQDPPLMFTEEYQKSLLEQYHLGLDQKRRKYVVGELIWNFADFMTEQSPTRVLGNKKGIFTRQRQPKSAAFLLRERYWKIANETRYPHSVAKSQCLENSPFT

SEQ ID NO: 10054 - protein, 651 aa, Homo sapiens
MARGSAVAWAALGPLLWGCALGLQGGMLYPQESPSRECKELDGLWSFRADFSDNRRRGFEEQWYRRPLWESGPTVDMPVPSSFNDISQDWRLRHFVGWVWYEREVILPERWTQDLRTRVVLRIGSAHSYAIVWVNGVDTLEHEGGYLPFEADISNLVQVGPLPSRLRITIAINNTLTPTTLPPGTIQYLTDTSKYPKGYFVQNTYFDFFNYAGLQRSVLLYTTPTTYIDDITVTTSVEQDSGLVNYQISVKGSNLFKLEVRLLDAENKVVANGTGTQGQLKVPGVSLWWPYLMHERPAYLYSLEVQLTAQTSLGPVSDFYTLPVGIRTVAVTKSQFLINGKPFYFHGVNKHEDADIRGKGFDWPLLVKDFNLLRWLGANAFRTSHYPYAEEVMQMCDRYGIVVIDECPGVGLALPQFFNNVSLHHHMQVMEEVVRRDKNHPAVVMWSVANEPASHLESAGYYLKMVIAHTKSLDPSRPVTFVSNSNYAADKGAPYVDVICLNSYYSWYHDYGHLELIQLQLATQFENWYKKYQKPIIQSEYGAETIAGFHQDPPLMFTEEYQKSLLEQYHLGLDQKRRKYVVGELIWNFADFMTEQSPTRVLGNKKGIFTRQRQPKSAAFLLRERYWKIANETRYPHSVAKSQCLENSPFT

SEQ ID NO: 10055 - protein, 360 aa, Homo sapiens
MVPAAGRRPPRVMRLLGWWQVLLWVLGLPVRGVEVAEESGRLWSEEQPAHPLQVGAVYLGEEELLHDPMGQDRAAEEANAVLGLGTQGDHMVMLSVIPGEAEDKVSSEPSGVTCGAGGAEDSRCNVRESLFSLDGAGAHFPDREEEYYTEPEVAESDAAPTEDSNNTESLKSPKVNCEERNITGLENFTLKILNMSQDLMDFLNPNGSDCTLVLFYTPWCRFSASLAPHFNSLPRAFPALHFLALDASQHSSLSTRFGTVAVPNILLFQGAKPMARFNHTDRTLETLKIFIFNQTGIEAKKNVVVTQADQIGPLPSTLIKSVDWLLVFSLFFLISFIMYATIRTESIRWLIPGQEQEHVE

SEQ ID NO: 10056 - protein, 355 aa, Homo sapiens
GRAPIASRPGQWSRLPVDDRPASCGSSAGVAEESGRLWSEEQPAHPLQVGAVYLGEEELLHDPMGQDRAAEEANAVLGLDTQGDHMVMLSVIPGEAEDKVSSEPSGVTCGAGGAEDSRCNVRESLFSLDGAGAHFPDREEEYYTEPEVAESDAAPTEDSNNTESLKSPKVNCEERNITGLENFTLKILNMSQDLMDFLNPNGSDCTLVLFYTPWCRFSASLAPHFNSLPRAFPALHFLALDASQHSSLSTRFGTVAVPNILLFQGAKPMARFNHTDRTLETLKIFIFNQTGIEAKKNVVVTQADQIGPLPSTLIKSVDWLLVFSLFFLISFIMYATIRTESIRWLIPGQEQEHVE

SEQ ID NO: 10057 - protein, 604 aa, Homo sapiens
MMRAVWEALAALAAVACLVGAVRGGPGLSMFAGQAAQPDPCSDENGHPRRCIPDFVNAAFGKDVRVSSTCGRPPARYCVVSERGEERLRSCHLCNASDPKKAHPPAFLTDLNNPHNLTCWQSENYLQFPHNVTLTLSLGKKFEVTYVSLQFCSPRPESMAIYKSMDYGRTWVPFQFYSTQCRKMYNRPHRAPITKQNEQEAVCTDSHTDMRPLSGGLIAFSTLDGRPSAHDFDNSPVLQDWVTATDIRVAFSRLHTFGDENEDDSELARDSYFYAVSDLQVGGRCKCNGHAARCVRDRTDSLVCDCRHNTAGPECDRCKPFHYDRPWQRATAREANECVACNCNLHARRCRFNMELYKLSGRKSGGVCLNCRHNTAGRHCHYCKEGYYRDMGKPITHRKACKACDCHPVGAAGKTCNQTTGQCPCKDGVTGITCNRCAKGYQQSRSPIAPCIKIPVAPPTTAASSVEEPEDCDSYCKASKGKLKINMKKYCKKDYAVQIHILKADKAGDWWKFTVNIISVYKQGTSRIRRGDQSLWIRSRDIACKCPKIKPLKKYLLLGNAEDSPDQSGIVADKSSLVIQWRDTWARRLRKFQQREKKGKCKKA

SEQ ID NO: 10058 - protein, 580 aa, Homo sapiens
MPGWPWGLLLTAGTLFAALSPGPPAPADPCHDEGGAPRGCVPGLVNAALGREVLASSTCGRPATRACDASDPRRAHSPALLTSPGGTASPLCWRSESLPRAPLNVTLTVPLGKAFELVFVSLRFCSAPPASVALLKSQDHGRSWAPLGFFSSHCDLDYGRLPAPANGPAGPGPEALCFPAPLAQPDGSGLLAFSMQDSSPPGLDLDSSPVLQDWVTATDVRVVLTRPSTAGDPRDMEAVVPYSYAATDLQVGGRCKCNGHASRCLLDTQGHLICDCRHGTEGPDCGRCKPFYCDRPWQRATARESHACLACSCNGHARRCRFNMELYRLSGRRSGGVCLNCRHNTAGRHCHYCREGFYRDPGRALSDRRACRACDCHPVGAAGKTCNQTTGQCPCKDGVTGLTCNRCAPGFQQSRSPVAPCVKTPIPGPTEDSSPVQPQDCDSHCKPARGSYRISLKKFCKKDYAVQVAVGARGEARGAWTRFPVAVLAVFRSGEERARRGSSALWVPAGDAACGCPRLLPGRRYLLLGGGPGAAAGGAGGRGPGLIAARGSLVLPWRDAWTRRLRRLQRRERRGRCSAA

SEQ ID NO: 10059 - protein, 354 aa, Homo sapiens
MGRLVAVGLLGIALALLGERLLALRNRLKASREVESVDLPHCHLIKGIEAGSEDIDILPNGLAFFSVGLKFPGLHSFAPDKPGGILMMDLKEEKPRARELRISRGFDLASFNPHGISTFIDNDDTVYLFVVNHPEFKNTVEIFKFEEAENSLLHLKTVKHELLPSVNDITAVGPAHFYATNDHYFSDPFLKYLETYLNLHWANVVYYSPNEVKVVAEGFDSANGINISPDDKYIYVADILAHEIHVLEKHTNMNLTQLKVLELDTLVDNLSIDPSSGDIWVGCHPNGQKLFVYDPNNPPSSEVLRIQNILSEKPTVTTVYANNGSVLQGSSVASVYDGKLLIGTLYHRALYCEL

SEQ ID NO: 10060 - protein, 354 aa, Homo sapiens
MGRLVAVGLLGIALALLGERLLALRNRLKASREVESVDLPHCHLIKGIEAGSEDIDILPNGLAFFSVGLKFPGLHSFAPDKPGGILMMDLKEEKPRARELRISRGFDLASFNPHGISTFIDNDDTVYLFVVNHPEFKNTVEIFKFEEAENSLLHLKTVKHELLPSVNDITAVGPAHFYATNDHYFSDPFLKYLETYLNLHWANVVYYSPNEVKVVAEGFDSANGINISPDDKYIYVADILAHEIHVLEKHTNMNLTQLKVLELDTLVDNLSIDPSSGDIWVGCHPNGQKLFVYDPNNPPSSEVLRIQNILCEKPTVTTVYANNGSVLQGSSVASVYDGKLLIGTLYHRALYCEL

SEQ ID NO: 10061 - protein, 354 aa, Homo sapiens
MGAWVGCGLAGDRAGFLGERLLALRNRLKASREVESVDLPHCHLIKGIEAGSEDIDILPNGLAFFSVGLKFPGLHSFAPDKPGGILMMDLKEEKPRARELRISRGFDLASFNPHGISTFIDNDDTVYLFVVNHPEFKNTVEIFKFEEAENSLLHLKTVKHELLPSVNDITAVGPAHFYATNDHYFSDPFLKYLETYLNLHWANVVYYSPNEVKVVAEGFDSANGINISPDDKYIYVADILAHEIHVLEKHTNMNLTQLKVLELDTLVDNLSIDPSSGDIWVGCHPNGQKLFVYDPNNPPSSEVLRIQNILCEKPTVTTVYANNGSVLQGSSVASVYDGKLLIGTLYHRALYCEL

SEQ ID NO: 10062 - protein, 481 aa, Homo sapiens
MADNDTDRNQTEKLLKRVRELEQEVQRLKKEQAKNKEDSNIRENSSGAGKTKRAFDFSAHGRRHVALRIAYMGWGYQGFASQENTNNTIEEKLFEALTKTRLVESRQTSNYHRCGRTDKGVSAFGQVISLDLRSQFPRGRDSEDFNVKEEANAAAEEIRYTHILNRVLPPDIRILAWAPVEPSFSARFSCLERTYRYFFPRADLDIVTMDYAAQKYVGTHDFRNLCKMDVANGVINFQRTILSAQVQLVGQSPGEGRWQEPFQLCQFEVTGQAFLYHQVRCMMAILFLIGQGMEKPEIIDELLNIEKNPQKPQYSMAVEFPLVLYDCKFENVKWIYDQEAQEFNITHLQQLWANHAVKTHMLYSMLQGLDTVPVPCGIGPKMDGMTEWGNVKPSVIKQTSAFVEGVKMRTYKPLMDRPKCQGLESRIQHFVRRGRIEHPHLFHEEETKAKRDCNDTLEEDNTNLETPTKRVCVDTEIKSII

SEQ ID NO: 10063 - protein, 189 aa, Homo sapiens
MTLAAYKEKMKELPLVSLFCSCFLADPLNKSSYKYEADTVDLNWCVISDMEVIELNKCTSGQSFEVILKPPSFDGVPEFNASLPRRRDPSLEEIQKKLEAAEERRKYQEAELLKHLAEKREHEREVIQKAIEENNNFIKMAKEKLAQKMESNKENREAHLAAMLERLQEKDKHAEEVRKNKELKEEASR

SEQ ID NO: 10064 - protein, 216 aa, Homo sapiens
MTLAAYKEKMKELPLVSLFCSCFLADPLNKSSYKYEGWCGRQCRRKDESQRKDSADWRERRAQADTVDLNWCVISDMEVIELNKCTSGQSFEVILKPPSFDGVPEFNASLPRRRDPSLEEIQKKLEAAEERRKYQEAELLKHLAEKREHEREVIQKAIEENNNFIKMAKEKLAQKMESNKENREAHLAAMLERLQEKDKHAEEVRKNKELKEEASR

SEQ ID NO: 10065 - protein, 477 aa, Homo sapiens
MTSKFLLVSFILAALSLSTTFSLQPDQQKVLLVSFDGFRWDYLYKVPTPHFHYIMKYGVHVKQVTNVFITKTYPNHYTLVTGLFAENHGIVANDMFDPIRNKSFSLDHMNIYDSKFWEEATPIWITNQRAGHTSGAAMWPGTDVKIHKRFPTHYMPYNESVSFEDRVAKIIEWFTSKEPINLGLLYWEDPDDMGHHLGPDSPLMGPVISDIDKKLGYLIQMLKKAKLWNTLNLIITSDHGMTQCSEERLIELDQYLDKDHYTLIDQSPVAAILPKEGKFDEVYEALTHAHPNLTVYKKEDVPERWHYKYNSRIQPIIAVADEGWHILQNKSDDFLLGNHGYDNALADMHPIFLAHGPAFRKNFSKEAMNSTDLYPLLCHLLNITAMPHNGSFWNVQDLLNSAMPRVVPYTQSTILLPGSVKPAEYDQEGSYPYFIGVSLGSIIVIVFFVIFIKHLIHSQIPALQDMHAEIAQPLLQA

SEQ ID NO: 10066 - protein, 362 aa, Homo sapiens
MLVMAPRTVLLLLSAALALTETWAGSHSMRYFDTAMSRPGRGEPRFISVGYVDDTQFVRFDSDAASPREEPRAPWIEQEGPEYWDRNTQIFKTNTQTDRESLRNLRGYYNQSEAGSHTLQSMYGCDVGPDGRLLRGHNQYAYDGKDYIALNEDLRSWTAADTAAQITQRKWEAARVAEQDRAYLEGTCVEWLRRYLENGKDTLERADPPKTHVTHHPISDHEATLRCWALGFYPAEITLTWQRDGEDQTQDTELVETRPAGDRTFQKWAAVVVPSGEEQRYTCHVQHEGLPKPLTLRWEPSSQSTVPIVGIVAGLAVLAVVVIGAVVAAVMCRRKSSGGKGGSYSQAACSDSAQGSDVSLTA

SEQ ID NO: 10067 - protein, 362 aa, Homo sapiens
MLVMAPRTVLLLLSAALALTETWAGSHSMRYFYTSVSRPGRGEPRFISVGYVDDTQFVRFDSDAASPREEPRAPWIEQEGPEYWDRNTQIYKAQAQTDRESLRNLRGYYNQSEAGSHTLQSMYGCDVGPDGRLLRGHDQYAYDGKDYIALNEDLRSWTAADTAAQITQRKWEAAREAEQRRAYLEGECVEWLRRYLENGKDKLERADPPKTHVTHHPISDHEATLRCWALGFYPAEITLTWQRDGEDQTQDTELVETRPAGDRTFQKWAAVVVPSGEEQRYTCHVQHEGLPKPLTLRWEPSSQSTVPIVGIVAGLAVLAVVVIGAVVAAVMCRRKSSGGKGGSYSQAACSDSAQGSDVSLTA

SEQ ID NO: 10068 - protein, 365 aa, Homo sapiens
MAVMAPRTLLLLLSGALALTQTWAGSHSMRYFFTSVSRPGRGEPRFIAVGYVDDTQFVRFDSDAASQRMEPRAPWIEQEGPEYWDQETRNVKAQSQTDRVDLGTLRGYYNQSEAGSHTIQIMYGCDVGSDGRFLRGYRQDAYDGKDYIALNEDLRSWTAADMAAQITKRKWEAAHEAEQLRAYLDGTCVEWLRRYLENGKETLQRTDPPKTHMTHHPISDHEATLRCWALGFYPAEITLTWQRDGEDQTQDTELVETRPAGDGTFQKWAAVVVPSGEEQRYTCHVQHEGLPKPLTLRWELSSQPTIPIVGIIAGLVLLGAVITGAVVAAVMWRRKSSDRKGGSYTQAASSDSAQGSDVSLTACKV

SEQ ID NO: 10069 - protein, 364 aa, Homo sapiens
MAVMAPRTLLLLLSGALALTQTWAGSHSMRYFFTSVSRPGRGEPRFIAVGYVDDTQFVRFDSDAASQRMEPRAPWIEQEGPEYWDQETRNVKAQSQTDRVDLGTLRGYYNQSEAGSHTIQIMYGCDVGSDGRFLRGYRQDAYDGKDYIALNEDLRSWTAADMAAQITKRKWEAAHEAEQLRAYLDGTCVEWLRRYLENGKETLQRTDPPKTHMTHHPISDHEATLRCWALGFYPAEITLTWQRDGEDQTQDTELVETRPAGDGTFQKWAAVVVPSGEEQRYTCHVQHEGLPKPLTLRWEPSPQPTIPIVGIIAGLVLLGAVVTGAVVTAVMWRKKSSDRKGGSYSQAASSQSAQGSDVSLTACK

SEQ ID NO: 10070 - protein, 319 aa, Homo sapiens
MAVMAPRTLLLLLSGALALTQTWAGSHSMRYFFTSVSRPGRGEPRFIAVGYVDDTQFVRFDSDAASQRMEPRAPWIEQEGPEYWDQETRNVKAQSQTDRVDLGTLRGYYNQSEAGSHTIQIMYGCDVGSDGRFLRGYRQDAYDGKDYIALNEDLRSWTAADMAAQITKRKWEAAHEAEQLRAYLDGTCVEWLRRYLENGKETLQRTDPPKTHMTHHPISDHEATLRCWALGFYPAEITLTWQRDGEDQTQDTELVETRPAGDGTFQKWAAVVVPSGEEQRYTCHVQHEGLPKPLTLRWDKEGDGGVMSLRESRSLSGDL

SEQ ID NO: 10071 - protein, 492 aa, Homo sapiens
MEPSSKKLTGRLMLAVGGAVLGSLQFGYNTGVINAPQKVIEEFYNQTWVHRYGESILPTTLTTLWSLSVAIFSVGGMIGSFSVGLFVNRFGRRNSMLMMNLLAFVSAVLMGFSKLGKSFEMLILGRFIIGVYCGLTTGFVPMYVGEVSPTAFRGALGTLHQLGIVVGILIAQVFGLDSIMGNKDLWPLLLSIIFIPALLQCIVLPFCPESPRFLLINRNEENRAKSVLKKLRGTADVTHDLQEMKEESRQMMREKKVTILELFRSPAYRQPILIAVVLQLSQQLSGINAVFYYSTSIFEKAGVQQPVYATIGSGIVNTAFTVVSLFVVERAGRRTLHLIGLAGMAGCAILMTIALALLEQLPWMSYLSIVAIFGFVAFFEVGPGPIPWFIVAELFSQGPRPAAIAVAGFSNWTSNFIVGMCFQYVEQLCGPYVFIIFTVLLVLFFIFTYFKVPETKGRTFDEIASGFRQGGASQSDKTPEELFHPLGADSQV

SEQ ID NO: 10072 - protein, 378 aa, Homo sapiens [sequence omitted]

SEQ ID NO: 10073 - protein, 769 aa, Homo sapiens
MLGLRPPLLALVGLLSLGCVLSQECTKFKVSSCRECIESGPGCTWCQKLNFTGPGDPDSIRCDTRPQLLMRGCAADDIMDPTSLAETQEDHNGGQKQLSPQKVTLYLRPGQAAAFNVTFRRAKGYPIDLYYLMDLSYSMLDDLRNVKKLGGDLLRALNEITESGRIGFGSFVDKTVLPFVNTHPDKLRNPCPNKEKECQPPFAFRHVLKLTNNSNQFQTEVGKQLISGNLDAPEGGLDAMMQVAACPEEIGWRNVTRLLVFATDDGFHFAGDGKLGAILTPNDGRCHLEDNLYKRSNEFDYPSVGQLAHKLAENNIQPIFAVTSRMVKTYEKLTEIIPKSAVGELSEDSSNVVHLIKNAYNKLSSRVFLDHNALPDTLKVTYDSFCSNGVTHRNQPRGDCDGVQINVPITFQVKVTATECIQEQSFVIRALGFTDIVTVQVLPQCECRCRDQSRDRSLCHGKGFLECGICRCDTGYIGKNCECQTQGRSSQELEGSCRKDNNSIICSGLGDCVCGQCLCHTSDVPGKLIYGQYCECDTINCERYNGQVCGGPGRGLCFCGKCRCHPGFEGSACQCERTTEGCLNPRRVECSGRGRCRCNVCECHSGYQLPLCQECPGCPSPCGKYISCAECLKFEKGPFGKNCSAACPGLQLSNNPVKGRTCKERDSEGCWVAYTLEQQDGMDRYLIYVDESRECVAGPNIAAIVGGTVAGIVLIGILLLVIWKALIHLSDLREYRRFEKEKLKSQWNNDNPLFKSATTTVMNPKFAES

SEQ ID NO: 10074 - protein, 323 aa, Homo sapiens
MWPLVAALLLGSACCGSAQLLFNKTKSVEFTFCNDTVVIPCFVTNMEAQNTTEVYVKWKFKGRDIYTFDGALNKSTVPTDFSSAKIEVSQLLKGDASLKMDKSDAVSHTGNYTCEVTELTREGETIIELKYRVVSWFSPNENILIVIFPIFAILLFWGQFGIKTLKYRSGGMDEKTIALLVAGLVITVIVIVGAILFVPGEYSLKNATGLGLIVTSTGILILLHYYVFSTAIGLTSFVIAILVIQVIAYILAVVGLSLCIAACIPMHGPLLISGLSILALAQLLGLVYMKFVASNQKTIQPPRKAVEEPLNAFKESKGMMNDE

SEQ ID NO: 10075 - protein, 311 aa, Homo sapiens
MWPLVAALLLGSACCGSAQLLFNKTKSVEFTFCNDTVVIPCFVTNMEAQNTTEVYVKWKFKGRDIYTFDGALNKSTVPTDFSSAKIEVSQLLKGDASLKMDKSDAVSHTGNYTCEVTELTREGETIIELKYRVVSWFSPNENILIVIFPIFAILLFWGQFGIKTLKYRSGGMDEKTIALLVAGLVITVIVIVGAILFVPGEYSLKNATGLGLIVTSTGILILLHYYVFSTAIGLTSFVIAILVIQVIAYILAVVGLSLCIAACIPMHGPLLISGLSILALAQLLGLVYMKFVASNQKTIQPPRKAVEEPLN

SEQ ID NO: 10076 - protein, 292 aa, Homo sapiens
MWPLVAALLLGSACCGSAQLLFNKTKSVEFTFCNDTVVIPCFVTNMEAQNTTEVYVKWKFKGRDIYTFDGALNKSTVPTDFSSAKIEVSQLLKGDASLKMDKSDAVSHTGNYTCEVTELTREGETIIELKYRVVSWFSPNENILIVIFPIFAILLFWGQFGIKTLKYRSGGMDEKTIALLVAGLVITVIVIVGAILFVPGEYSLKNATGLGLIVTSTGILILLHYYVFSTAIGLTSFVIAILVIQVIAYILAVVGLSLCIAACIPMHGPLLISGLSILALAQLLGLVYMKFV

SEQ ID NO: 10077 - protein, 305 aa, Homo sapiens
MWPLVAALLLGSACCGSAQLLFNKTKSVEFTFCNDTVVIPCFVTNMEAQNTTEVYVKWKFKGRDIYTFDGALNKSTVPTDFSSAKIEVSQLLKGDASLKMDKSDAVSHTGNYTCEVTELTREGETIIELKYRVVSWFSPNENILIVIFPIFAILLFWGQFGIKTLKYRSGGMDEKTIALLVAGLVITVIVIVGAILFVPGEYSLKNATGLGLIVTSTGILILLHYYVFSTAIGLTSFVIAILVIQVIAYILAVVGLSLCIAACIPMHGPLLISGLSILALAQLLGLVYMKFVASNQKTIQPPRNN

SEQ ID NO: 10078 - protein, 452 aa, Homo sapiens
MELALRRSPVPRWLLLLPLLLGLNAGAVIDWPTEEGKEVWDYVTVRKDAYMFWWLYYATNSCKNFSELPLVMWLQGGPGGSSTGFGNFEEIGPLDSDLKPRKTTWLQAASLLFVDNPVGTGFSYVNGSGAYAKDLAMVASDMMVLLKTFFSCHKEFQTVPFYIFSESYGGKMAAGIGLELYKAIQRGTIKCNFAGVALGDSWISPVDSVLSWGPYLYSMSLLEDKGLAEVSKVAEQVLNAVNKGLYREATELWGKAEMIIEQNTDGVNFYNILTKSTPTSTMESSLEFTQSHLVCLCQRHVRHLQRDALSQLMNGPIRKKLKIIPEDQSWGGQATNVFVNMEEDFMKPVISIVDELLEAGINVTVYNGQLDLIVDTMGQEAWVRKLKWPELPKFSQLKWKALYSDPKSLETSAFVKSYKNLAFYWILKAGHMVPSDQGDMALKMMRLVTQQE

SEQ ID NO: 10079 - protein, 296 aa, Homo sapiens
MELALRRSPVPRWLLLLPLLLGLNAGAVIDWPTEEGKEVWDYVTVRKDAYMFWWLYYATNSCKNFSELPLVMWLQGGPGGSSTGFGNFEEIGPLDSDLKPRKTTWLQAASLLFVDNPVGTGFSYVNGSGAYAKDLAMVASDMMVLLKTFFSCHKEFQTVPFYIFSESYGGKMAAGIGLELYKAIQRGTIKCNFAGVALGDSWISPVDSVLSWGPYLYSMSLLEDKGLAEVSKVAEQVLNAVNKGLYREATELWGKAEMIIEQNTDGVNFYNILTKSTPTSTMESSLEFTQSHLVWF

SEQ ID NO: 10080 - protein, 180 aa, Homo sapiens
MASTSYDYCRVPMEDGDKRCKLLLGIGILVLLIIVILGVPLIIFTIKANSEACRDGLRAVMECRNVTHLLQQELTEAQKGFQDVEAQAATCNHTVMALMASLDAEKAQGQKKVEELEGEITTLNHKLQDASAEVERLRRENQVLSVRIADKKYYPSSQDSSSAAAPQLLIVLLGLSALLQ

SEQ ID NO: 10081 - protein, 387 aa, Homo sapiens
MPRPRLLAALCGALLCAPSLLVALDICSKNPCHNGGLCEEISQEVRGDVFPSYTCTCLKGYAGNHCETKCVEPLGMENGNIANSQIAASSVRVTFLGLQHWVPELARLNRAGMVNAWTPSSNDDNPWIQVNLLRRMWVTGVVTQGASRLASHEYLKAFKVAYSLNGHEFDFIHDVNKKHKEFVGNWNKNAVHVNLFETPVEAQYVRLYPTSCHTACTLRFELLGCELNGCANPLGLKNNSIPDKQITASSSYKTWGLHLFSWNPSYARLDKQGNFNAWVAGSYGNDQWLQVDLGSSKEVTGIITQGARNFGSVQFVASYKVAYSNDSANWTEYQDPRTGSSKIFPGNWDNHSHKKNLFETPILARYVRILPVAWHNRIALRLELLGC

SEQ ID NO: 10082 - protein, 491 aa, Homo sapiens
MAGQGLPLHVATLLTGLLECLGFAGVLFGWPSLVFVFKNEDYFKDLCGPDAGPIGNATGQADCKAQDERFSLIFTLGSFMNNFMTFPTGYIFDRFKTTVARLIAIFFYTTATLIIAFTSAGSAVLLFLAMPMLTIGGILFLITNLQIGNLFGQHRSTIITLYNGAFDSSSAVFLIIKLLYEKGISLRASFIFISVCSTWHVARTFLLMPRGHIPYPLPPNYSYGLCPGNGTTKEEKETAEHENRELQSKEFLSAKEETPGAGQKQELRSFWSYAFSRRFAWHLVWLSVIQLWHYLFIGTLNSLLTNMAGGDMARVSTYTNAFAFTQFGVLCAPWNGLLMDRLKQKYQKEARKTGSSTLAVALCSTVPSLALTSLLCLGFALCASVPILPLQYLTFILQVISRSFLYGSNAAFLTLAFPSEHFGKLFGLVMALSAVVSLLQFPIFTLIKGSLQNDPFYVNVMFMLAILLTFFHPFLVYRECRTWKESPSAIA

SEQ ID NO: 10083 - protein, 491 aa, Homo sapiens [sequence omitted]

SEQ ID NO: 10084 - protein, 534 aa, Homo sapiens
MIWYILIIGILLPQSLAHPGFFTSIGQMTDLIHTEKDLVTSLKDYIKAEEDKLEQIKKWAEKLDRLTSTATKDPEGFVGHPVNAFKLMKRLNTEWSELENLVLKDMSDGFISNLTIQRQYFPNDEDQVGAAKALLRLQDTYNLDTDTISKGNLPGVKHKSFLTAEDCFELGKVAYTEADYYHTELWMEQALRQLDEGEISTIDKVSVLDYLSYAVYQQGDLDKALLLTKKLLELDPEHQRANGNLKYFEYIMAKEKDVNKSASDDQSDQKTTPKKKGVAVDYLPERQKYEMLCRGEGIKMTPRRQKKLFCRYHDGNRNPKFILAPAKQEDEWDKPRIIRFHDIISDAEIEIVKDLAKPRLRRATISNPITGDLETVHYRISKSAWLSGYENPVVSRINMRIQDLTGLDVSTAEELQVANYGVGGQYEPHFDFARKDEPDAFKELGTGNRIATWLFYMSDVSAGGATVFPEVGASVWPKKGTAVFWYNLFASGEGDYSTRHAACPVLVGNKWVSNKWLHERGQEFRRPCTLSELE

SEQ ID NO: 10085 - protein, 534 aa, Homo sapiens
MIWYILIIGILLPQSLAHPGFFTSIGQMTDLIHTEKDLVTSLKDYIKAEEDKLEQIKKWAEKLDRLTSTATKDPEGFVGHPVNAFKLMKRLNTEWSELENLVLKDMSDGFISNLTIQRQYFPNDEDQVGAAKALLRLQDTYNLDTDTISKGNLPGVKHKSFLTAEDCFELGKVAYTEADYYHTELWMEQALRQLDEGEISTIDKVSVLDYLSYAVYQQGDLDKALLLTKKLLELDPEHQRANGNLKYFEYIMAKEKDVNKSASDDQSDQKTTPKKKGVAVDYLPERQKYEMLCRGEGIKMTPRRQKKLFCRYHDGNRNPKFILAPAKQEDEWDKPRIIRFHDIISDAEIEIVKDLAKPRLSRATVHDPETGKLTTAQYRVSKSAWLSGYENPVVSRINMRIQDLTGLDVSTAEELQVANYGVGGQYEPHFDFARKDEPDAFKELGTGNRIATWLFYMSDVSAGGATVFPEVGASVWPKKGTAVFWYNLFASGEGDYSTRHAACPVLVGNKWVSNKWLHERGQEFRRPCTLSELE

SEQ ID NO: 10086 - protein, 359 aa, Homo sapiens
MCLQPLQEQKQWALDGAEYRTIQANCTGTGIGYNIIWVPMASCDFSIRTYTYADTPDDFQLHNFSLPEEDTKLKIPLIHRALQLAQRPVSLLASPWTSPTRLKTKGAGNGKGPLKGQPRDIYHQTWARYIVKFLDAYAEHKLQFWAVTAENEPSAGLLSGYPFQCLGFTPEHQRDFIARDLGPTLANGTHHNVRLLMLDDQRLLLPHWAKVVLTDPEAAKGLCGFQVLGAECAARLLGSRDAVQPQHHHKPPVPCGRLDRLEPIIVDITKHTFYKQPMFYHLGHFSKFIPEGSQRVGLVASQKNDPDAVALMHPDGSPVVVVLNRSSKDVPLTIKDPAVGFLETISPGYSIHTYLWRRQ

SEQ ID NO: 10087 - protein, 570 aa, Homo sapiens
MGNWAVNEGLSIFVILVWLGLNVFLFVWYYRVYDIPPKFFYTRKLLGSALALARAPAACLNFNCMLILLPVCRNLLSFLRGSSACCSTRVRRQLDRNLTFHKMVAWMIALHSAIHTIAHLFNVEWCVNARVNNSDPYSVALSELGDRQNESYLNFARKRIKNPEGGLYLAVTLLAGITGVVITLCLILIITSSTKTIRRSYFEVFWYTHHLFVIFFIGLAIHGAERIVRGQTAESLAVHNITVCEQKISEWGKIKECPIPQFAGNPPMTWKWIVGPMFLYLCERLVRFWRSQQKVVITKVVTHPFKTIELQMKKKGFKMEVGQYIFVKCPKVSKLEWHPFTLTSAPEEDFFSIHIRIVGDWTEGLFNACGCDKQEFQDAWKLPKIAVDGPFGTASEDVFSYEVVMLVGAGIGVTPFASILKSVWYKYCNNATNLKLKKIYFYWLCRDTHAFEWFADLLQLLESQMQERNNAGFLSYNIYLTGWDESQANHFAVHHDEEKDVITGLKQKTLYGRPNWDNEFKTIASQHPNTRIGVFLCGPEALAETLSKQSISNSESGPRGVHFIFNKENF

SEQ ID NO: 10088 - protein, 257 aa, Homo sapiens
MAQRMTTQLLLLLVWVAVVGEAQTRIAWARTELLNVCMNAKHHKEKPGPEDKLHEQCRPWRKNACCSTNTSQEAHKDVSYLYRFNWNHCGEMAPACKRHFIQDTCLYECSPNLGPWIQQVDQSWRKERVLNVPLCKEDCEQWWEDCRTSYTCKSNWHKGWNWTSGFNKCAVGAACQPFHFYFPTPTVLCNEIWTHSYKVSNYSRGSGRCIQMWFDPAQGNPNEEVARFYAAAMSGAGPWAAWPFLLSLALMLLWLLS

SEQ ID NO: 10089 - protein, 758 aa, Homo sapiens
MPLQGLGLQRNPFLQGKRGPGLTSSPPLLPPSLQVNFHSPRSGQRCWAARTQVEKRLVVLVVLLAAGLVACLAALGIQYQTRSPSVCLSEACVSVTSSILSSMDPTVDPCHDFFSYACGGWIKANPVPDGHSRWGTFSNLWEHNQAIIKHLLENSTASVSEAERKAQVYYRACMNETRIEELRAKPLMELIERLGGWNITGPWAKDNFQDTLQVVTAHYRTSPFFSVYVSADSKNSNSNVIQVDQSGLGLPSRDYYLNKTENEKVLTGYLNYMVQLGKLLGGGDEEAIRPQMQQILDFETALANITIPQEKRRDEELIYHKVTAAELQTLAPAINWLPFLNTIFYPVEINESEPIVVYDKEYLEQISTLINTTDRCLLNNYMIWNLVRKTSSFLDQRFQDADEKFMEVMYGTKKTCLPRWKFCVSDTENNLGFALGPMFVKATFAEDSKSIATEIILEIKKAFEESLSTLKWMDEETRKSAKEKADAIYNMIGYPNFIMDPKELDKVFNDYTAVPDLYFENAMRFFNFSWRVTADQLRKAPNRDQWSMTPPMVNAYYSPTKNEIVFPAGILQAPFYTRSSPKALNFGGIGVVVGHELTHAFDDQGREYDKDGNLRPWWKNSSVEAFKRQTECMVEQYSNYSVNGEPVNGRHTLGENIADNGGLKAAYRAYQNWVKKNGAEHSLPTLGLTNNQLFFLGFAQVWCSVRTPESSHEGLITDPHSPSRFRVIGSLSNSKEFSEHFRCPPGSPMNPPHKCEVW

SEQ ID NO: 10090 - protein, 754 aa, Homo sapiens
MMSTYKRATLDEEDLVDSLSEGDAYPNGLQVNFHSPRSGQRCWAARTQVEKRLVVLVVLLAAGLVACLAALGIQYQTRSPSVCLSEACVSVTSSILSSMDPTVDPCHDFFSYACGGWIKANPVPDGHSRWGTFSNLWEHNQAIIKHLLENSTASVSEAERKAQVYYRACMNETRIEELRAKPLMELIERLGGWNITGPWAKDNFQDTLQVVTAHYRTSPFFSVYVSADSKNSNSNVIQVDQSGLGLPSRDYYLNKTENEKVLTGYLNYMVQLGKLLGGGDEEAIRPQMQQILDFETALANITIPQEKRRDEELIYHKVTAAELQTLAPAINWLPFLNTIFYPVEINESEPIVVYDKEYLEQISTLINTTDRCLLNNYMIWNLVRKTSSFLDQRFQDADEKFMEVMYGTKKTCLPRWKFCVSDTENNLGFALGPMFVKATFAEDSKSIATEIILEIKKAFEESLSTLKWMDEETRKSAKEKADAIYNMIGYPNFIMDPKELDKVFNDYTAVPDLYFENAMRFFNFSWRVTADQLRKAPNRDQWSMTPPMVNAYYSPTKNEIVFPAGILQAPFYTRSSPKALNFGGIGVVVGHELTHAFDDQGREYDKDGNLRPWWKNSSVEAFKRQTECMVEQYSNYSVNGEPVNGRHTLGENIADNGGLKAAYRAYQNWVKKNGAEHSLPTLGLTNNQLFFLGFAQVWCSVRTPESSHEGLITDPHSPSRFRVIGSLSNSKEFSEHFRCPPGSPMNPPHKCEVW

SEQ ID NO: 10091 - protein, 767 aa, Homo sapiens
MEALRESVLHLALQMSTYKRATLDEEDLVDSLSEGDAYPNGLQVNFHSPRSGQRCWAARTQVEKRLVVLVVLLAAGLVACLAALGIQYQTRSPSVCLSEACVSVTSSILSSMDPTVDPCHDFFSYACGGWIKANPVPDGHSRWGTFSNLWEHNQAIIKHLLENSTASVSEAERKAQVYYRACMNETRIEELRAKPLMELIERLGGWNITGPWAKDNFQDTLQVVTAHYRTSPFFSVYVSADSKNSNSNVIQVDQSGLGLPSRDYYLNKTENEKVLTGYLNYMVQLGKLLGGGDEEAIRPQMQQILDFETALANITIPQEKRRDEELIYHKVTAAELQTLAPAINWLPFLNTIFYPVEINESEPIVVYDKEYLEQISTLINTTDRCLLNNYMIWNLVRKTSSFLDQRFQDADEKFMEVMYGTKKTCLPRWKFCVSDTENNLGFALGPMFVKATFAEDSKSIATEIILEIKKAFEESLSTLKWMDEETRKSAKEKADAIYNMIGYPNFIMDPKELDKVFNDYTAVPDLYFENAMRFFNFSWRVTADQLRKAPNRDQWSMTPPMVNAYYSPTKNEIVFPAGILQAPFYTRSSPKALNFGGIGVVVGHELTHAFDDQGREYDKDGNLRPWWKNSSVEAFKRQTECMVEQYSNYSVNGEPVNGRHTLGENIADNGGLKAAYRAYQNWVKKNGAEHSLPTLGLTNNQLFFLGFAQVWCSVRTPESSHEGLITDPHSPSRFRVIGSLSNSKEFSEHFRCPPGSPMNPPHKCEVW

SEQ ID NO: 10092 - protein, 770 aa, Homo sapiens
MRGVWPPPVSALLSALGMSTYKRATLDEEDLVDSLSEGDAYPNGLQVNFHSPRSGQRCWAARTQVEKRLVVLVVLLAAGLVACLAALGIQYQTRSPSVCLSEACVSVTSSILSSMDPTVDPCHDFFSYACGGWIKANPVPDGHSRWGTFSNLWEHNQAIIKHLLENSTASVSEAERKAQVYYRACMNETRIEELRAKPLMELIERLGGWNITGPWAKDNFQDTLQVVTAHYRTSPFFSVYVSADSKNSNSNVIQVDQSGLGLPSRDYYLNKTENEKVLTGYLNYMVQLGKLLGGGDEEAIRPQMQQILDFETALANITIPQEKRRDEELIYHKVTAAELQTLAPAINWLPFLNTIFYPVEINESEPIVVYDKEYLEQISTLINTTDRCLLNNYMIWNLVRKTSSFLDQRFQDADEKFMEVMYGTKKTCLPRWKFCVSDTENNLGFALGPMFVKATFAEDSKSIATEIILEIKKAFEESLSTLKWMDEETRKSAKEKADAIYNMIGYPNFIMDPKELDKVFNDYTAVPDLYFENAMRFFNFSWRVTADQLRKAPNRDQWSMTPPMVNAYYSPTKNEIVFPAGILQAPFYTRSSPKALNFGGIGVVVGHELTHAFDDQGREYDKDGNLRPWWKNSSVEAFKRQTECMVEQYSNYSVNGEPVNGRHTLGENIADNGGLKAAYRAYQNWVKKNGAEHSLPTLGLTNNQLFFLGFAQVWCSVRTPESSHEGLITDPHSPSRFRVIGSLSNSKEFSEHFRCPPGSPMNPPHKCEVW

SEQ ID NO: 10093 - protein, 209 aa, Homo sapiens
MSPHPTALLGLVLCLAQTIHTQEEDLPRPSISAEPGTVIPLGSHVTFVCRGPVGVQTFRLERESRSTYNDTEDVSQASPSESEARFRIDSVSEGNAGPYRCIYYKPPKWSEQSDYLELLVKETSGGPDSPDTEPGSSAGPTQRPSDNSHNEHAPASQGLKAEHLYILIGVSVVFLFCLLLLVLFCLHRQNQIKQGPPRSKDEEQKPQQR

SEQ ID NO: 10094 - protein, 287 aa, Homo sapiens
MSPHPTALLGLVLCLAQTIHTQEEDLPRPSISAEPGTVIPLGSHVTFVCRGPVGVQTFRLERESRSTYNDTEDVSQASPSESEARFRIDSVSEGNAGPYRCIYYKPPKWSEQSDYLELLVKETSGGPDSPDTEPGSSAGPTQRPSDNSHNEHAPASQGLKAEHLYILIGVSVVFLFCLLLLVLFCLHRQNQIKQGPPRSKDEEQKPQQRPDLAVDVLERTADKATVNGLPEKDRETDTSALAAGSSQEVTYAQLDHWALTQRTARAVSPQSTKPMAESITYAAVARH

SEQ ID NO: 10095 - protein, 270 aa, Homo sapiens
MSPHPTALLGLVLCLAQTIHTQEEDLPRPSISAEPGTVIPLGSHVTFVCRGPVGVQTFRLERESRSTYNDTEDVSQASPSESEARFRIDSVSEGNAGPYRCIYYKPPKWSEQSDYLELLVKGPTQRPSDNSHNEHAPASQGLKAEHLYILIGVSVVFLFCLLLLVLFCLHRQNQIKQGPPRSKDEEQKPQQRPDLAVDVLERTADKATVNGLPEKDRETDTSALAAGSSQEVTYAQLDHWALTQRTARAVSPQSTKPMAESITYAAVARH

SEQ ID NO: 10096 - protein, 589 aa, Homo sapiens
MRPLPGALGVAAAAALWLLLLLLPRTRADEHEHTYQDKEEVVLWMNTVGPYHNRQETYKYFSLPFCVGSKKSISHYHETLGEALQGVELEFSGLDIKFKDDVMPATYCEIDLDKEKRDAFVYAIKNHYWYQMYIDDLPIWGIVGEADENGEDYYLWTYKKLEIGFNGNRIVDVNLTSEGKVKLVPNTKIQMSYSVKWKKSDVKFEDRFDKYLDPSFFQHRIHWFSIFNSFMMVIFLVGLVSMILMRTLRKDYARYSKEEEMDDMDRDLGDEYGWKQVHGDVFRPSSHPLIFSSLIGSGCQIFAVSLIVIIVAMIEDLYTERGSMLSTAIFVYAATSPVNGYFGGSLYARQGGRRWIKQMFIGAFLIPAMVCGTAFFINFIAIYYHASRAIPFGTMVAVCCICFFVILPLNLVGTILGRNLSGQPNFPCRVNAVPRPIPEKKWFMEPAVIVCLGGILPFGSIFIEMYFIFTSFWAYKIYYVYGFMMLVLVILCIVTVCVTIVCTYFLLNAEDYRWQWTSFLSAASTAIYVYMYSFYYYFFKTKMYGLFQTSFYFGYMAVFSTALGIMCGAIGYMGTSAFVRKIYTNVKID

SEQ ID NO: 10097 - protein, 584 aa, Homo sapiens
MRPLPGALGVAAAAALWLLLLLLPRTRADEHEHTYQDKEEVVLWMNTVGPYHNRQETYKYFSLPFCVGSKKSISHYHETLGEALQGVELEFSGLDIKFKDDVMPATYCEIDLDKEKRDAFVYAIKNHYWYQMYIDDLPIWGIVGEADENGEDYYLWTYKKLEIGFNGNRIVDVNLTSEGKVKLVPNTNPDVIFSKMEKDVKFEDRFDKYLDPSFFQHRIHWFSIFNSFMMVIFLVGLVSMILMRTLRKDYARYSKEEEMDDMDRDLGDEYGWKQVHGDVFRPSSHPLIFSSLIGSGCQIFAVSLIVIIVAMIEDLYTERGSMLSTAIFVYAATSPVNGYFGGSLYARQGGRRWIKQMFIGAFLIPAMWHCLLHQFHSHLLPCFKSHSFWNNGGRLLHLFFCYSSSKSCWYNTWPKSVRSAQLSLSCQCCASSYTGEKMVHGAVIVCLGGILPFGSIFIEMYFIFTSFWAYKIYYVYGFMMLVLVILCIVTVCVTIVCTYFLLNAEDYRWQWTSFLSAASTAIYVYMYSFYYYFFKTKMYGLFQTSFYFGYMAVFSTALGIMCGAIGYMGTSAFVRKIYTNVKID

SEQ ID NO: 10098 - protein, 259 aa, Homo sapiens
MAPNIYLVRQRISRLGQRMSGFQINLNPLKEPLGFIKVLEWIASIFAFATCGGFKGQTEIQVNCPPAVTENKTVTATFGYPFRLNEASFQPPPGVNICDVNWKDYVLIGDYSSSAQFYVTFAVFVFLYCIAALLLYVGYTSLYLDSRKLPMIDFVVTLVATFLWLVSTSAWAKALTDIKIATGHNIIDELPPCKKKAVLCYFGSVTSMGSLNVSVIFGFLNMILWGGNAWFVYKETSLHSPSNTSAPHSQGGIPPPTGI

SEQ ID NO: 10099 - protein, 241 aa, Homo sapiens
MSGFQINLNPLKEPLGFIKVLEWIASIFAFATCGGFKGQTEIQVNCPPAVTENKTVTATFGYPFRLNEASFQPPPGVNICDVNWKDYVLIGDYSSSAQFYVTFAVFVFLYCIAALLLYVGYTSLYLDSRKLPMIDFVVTLVATFLWLVSTSAWAKALTDIKIATGHNIIDELPPCKKKAVLCYFGSVTSMGSLNVSVIFGFLNMILWGGNAWFVYKETSLHSPSNTSAPHSQGGIPPPTGI

SEQ ID NO: 10100 - protein, 528 aa, Homo sapiens
MRCALALSALLLLLSTPPLLPSSPSPSPSPSPSQNATQTTTDSSNKTAPTPASSVTIMATDTAQQSTVPTSKANEILASVKATTLGVSSDSPGTTTLAQQVSGPVNTTVARGGGSGNPTTTIESPKSTKSADTTTVATSTATAKPNTTSSQNGAEDTTNSGGKSSHSVTTDLTSTKAEHLTTPHPTSPLSPRQPTLTHPVATPTSSGHDHLMKISSSSSTVAIPGYTFTSPGMTTTLPSSVISQRTQQTSSQMPASSTAPSSQETVQPTSPATALRTPTLPETMSSSPTAASTTHRYPKTPSPTVAHESNWAKCEDLETQTQSEKQLVLNLTGNTLCAGGASDEKLISLICRAVKATFNPAQDKCGIRLASVPGSQTVVVKEITIHTKLPAKDVYERLKDKWDELKEAGVSDMKLGDQGPPEEAEDRFSMPLIITIVCMASFLLLVAALYGCCHQRLSQRKDQQRLTEELQTVENGYHDNPTLEVMETSSEMQEKKVVSLNGELGDSWIVPLDNLTKDDLDEEEDTHL

SEQ ID NO: 10101 - protein, 382 aa, Homo sapiens
MRSPLCWLLPLLILASVAQGQPTRRPRPGTGPGRRPRPRPRPTPSFPQPDEPAEPTDLPPPLPPGPPSIFPDCPRECYCPPDFPSALYCDSRNLRKVPVIPPRIHYLYLQNNFITELPVESFQNATGLRWINLDNNRIRKIDQRVLEKLPGLVFLYMEKNQLEEVPSALPRNLEQLRLSQNHISRIPPGVFSKLENLLLLDLQHNRLSDGVFKPDTFHGLKNLMQLNLAHNILRKMPPRVPTAIHQLYLDSNKIETIPNGYFKSFPNLAFIRLNYNKLTDRGLPKNSFNISNLLVLHLSHNRISSVPAINNRLEHLYLNNNSIEKINGTQICPNDLVAFHDFSSDLENVPHLRYLRLDGNYLKPPIPLDLMMCFRLLQSVVI

SEQ ID NO: 10102 - protein, 1152 aa, Homo sapiens
MALRVLLLTALTLCHGFNLDTENAMTFQENARGFGQSVVQLQGSRVVVGAPQEIVAANQRGSLYQCDYSTGSCEPIRLQVPVEAVNMSLGLSLAATTSPPQLLACGPTVHQTCSENTYVKGLCFLFGSNLRQQPQKFPEALRGCPQEDSDIAFLIDGSGSIIPHDFRRMKEFVSTVMEQLKKSKTLFSLMQYSEEFRIHFTFKEFQNNPNPRSLVKPITQLLGRTHTATGIRKVVRELFNITNGARKNAFKILVVITDGEKFGDPLGYEDVIPEADREGVIRYVIGVGDAFRSEKSRQELNTIASKPPRDHVFQVNNFEALKTIQNQLREKIFAIEGTQTGSSSSFEHEMSQEGFSAAITSNGPLLSTVGSYDWAGGVFLYTSKEKSTFINMTRVDSDMNDAYLGYAAAIILRNRVQSLVLGAPRYQHIGLVAMFRQNTGMWESNANVKGTQIGAYFGASLCSVDVDSNGSTDLVLIGAPHYYEQTRGGQVSVCPLPRGRARWQCDAVLYGEQGQPWGRFGAALTVLGDVNGDKLTDVAIGAPGEEDNRGAVYLFHGTSGSGISPSHSQRIAGSKLSPRLQYFGQSLSGGQDLTMDGLVDLTVGAQGHVLLLRSQPVLRVKAIMEFNPREVARNVFECNDQVVKGKEAGEVRVCLHVQKSTRDRLREGQIQSVVTYDLALDSGRPHSRAVFNETKNSTRRQTQVLGLTQTCETLKLQLPNCIEDPVSPIVLRLNFSLVGTPLSAFGNLRPVLAEDAQRLFTALFPFEKNCGNDNICQDDLSITFSFMSLDCLVVGGPREFNVTVTVRNDGEDSYRTQVTFFFPLDLSYRKVSTLQNQRSQRSWRLACESASSTEVSGALKSTSCSINHPIFPENSEVTFNITFDVDSKASLGNKLLLKANVTSENNMPRTNKTEFQLELPVKYAVYMVVTSHGVSTKYLNFTASENTSRVMQHQYQVSNLGQRSLPISLVFLVPVRLNQTVIWDRPQVTFSENLSSTCHTKERLPSHSDFLAELRKAPVVNCSIAVCQRIQCDIPFFGIQEEFNATLKGNLSFDWYIKTSHNHLLIVSTAEILFNDSVFTLLPGQGAFVRSQTETKVEPFEVPNPLPLIVGSSVGGLLLLALITAALYKLGFFKRQYKDMMSEGGPPGAEPQ

SEQ ID NO: 10103 - protein, 366 aa, Homo sapiens
MRVMAPRALLLLLSGGLALTETWACSHSMRYFDTAVSRPGRGEPRFISVGYVDDTQFVRFDSDAASPRGEPRAPWVEQEGPEYWDRETQNYKRQAQADRVSLRNLRGYYNQSEDGSHTLQRMYGCDLGPDGRLLRGYDQSAYDGKDYIALNEDLRSWTAADTAAQITQRKLEAARAAEQLRAYLEGTCVEWLRRYLENGKETLQRAEPPKTHVTHHPLSDHEATLRCWALGFYPAEITLTWQRDGEDQTQDTELVETRPAGDGTFQKWAAVVVPSGQEQRYTCHMQHEGLQEPLTLSWEPSSQPTIPIMGIVAGLAVLVVLAVLGAVVTAMMCRRKSSGGKGGSCSQAACSNSAQGSDESLITCKA

SEQ ID NO: 10104 - protein, 366 aa, Homo sapiens
MRVMAPRTLILLLSGALALTETWAGSHSMRYFSTSVSWPGRGEPRFIAVGYVDDTQFVRFDSDAASPRGEPREPWVEQEGPEYWDRETQKYKRQAQADRVNLRKLRGYYNQSEDGSHTLQRMFGCDLGPDGRLLRGYNQFAYDGKDYIALNEDLRSWTAADTAAQITQRKWEAAREAEQRRAYLEGTCVEWLRRYLENGKETLQRAEHPKTHVTHHPVSDHEATLRCWALGFYPAEITLTWQWDGEDQTQDTELVETRPAGDGTFQKWAAVVVPSGEEQRYTCHVQHEGLPEPLTLRWKPSSQPTIPIVGIVAGLAVLAVLAVLGAMVAVVMCRRKSSGGKGGSCSQAASSNSAQGSDESLIACKA

SEQ ID NO: 10105 - protein, 365 aa, Homo sapiens
MAVMAPRTLLLLLSGALALTQTWAGSHSMRYFFTSVSRPGRGEPRFIAVGYVDDTQFVRFDSDAASQKMEPRAPWIEQEGPEYWDQETRNMKAHSQTDRANLGTLRGYYNQSEDGSHTIQIMYGCDVGPDGRFLRGYRQDAYDGKDYIALNEDLRSWTAADMAAQITKRKWEAVHAAEQRRVYLEGRCVDGLRRYLENGKETLQRTDPPKTHMTHHPISDHEATLRCWALGFYPAEITLTWQRDGEDQTQDTELVETRPAGDGTFQKWAAVVVPSGEEQRYTCHVQHEGLPKPLTLRWELSSQPTIPIVGIIAGLVLLGAVITGAVVAAVMWRRKSSDRKGGSYTQAASSDSAQGSDVSLTACKV

SEQ ID NO: 10106 - protein, 213 aa, Homo sapiens [sequence omitted]

SEQ ID NO: 10107 - protein, 476 aa, Homo sapiens [sequence omitted]

SEQ ID NO: 10108 - protein, 233 aa, Homo sapiens
MAGVGAGPLRAMGRQALLLLALCATGAQGLYFHIGETEKRCFIEEIPDETMVIGNYRTQMWDKQKEVFLPSTPGLGMHVEVKDPDGKVVLSRQYGSEGRFTFTSHTPGDHQICLHSNSTRMALFAGGKLRVHLDIQVGEHANNYPEIAAKDKLTELQLRARQLLDQVEQIQKEQDYQRASAYLLYREERFRLTSESTNQRVLWWSIAQTVILILTGIWQMRHLKSFFEAKKLV

SEQ ID NO: 10109 - protein, 948 aa, Homo sapiens
MVFLPLKWSLAIMSFLLSSLLALLTVSTPSWCQSTEASPKRSDGTPFPWNKIRLPEYVIPVHYDLLIHANLTTLTFWGTTKVEITASQPTSTIILHSHHLQISRATLRKGAGERLSEEPLQVLEHPPQEQIALLAPEPLLVGLPYTVVIHYAGNLSETFHGFYKSTYRTKEGELRILASTQFEPTAARMAFPCFDEPAFKASFSIKIRREPRHLAISNMPLVKSVTVAEGLIEDHFDVTVKMSTYLVAFIISDFESVSKITKSGVKVSVYAVPDKINQADYALDAAVTLLEFYEDYFSIPYPLPKQDLAAIPDFQSGAMENWGLTTYRESALLFDAEKSSASSKLGITVTVAHELAHQWFGNLVTMEWWNDLWLNEGFAKFMEFVSVSVTHPELKVGDYFFGKCFDAMEVDALNSSHPVSTPVENPAQIREMFDDVSYDKGACILNMLREYLSADAFKSGIVQYLQKHSYKNTKNEDLWDSMASICPTDGVKGMDGFCSRSQHSSSSSHWHQEGVDVKTMMNTWTLQRGFPLITITVRGRNVHMKQEHYMKGSDGAPDTGYLWHVPLTFITSKSNMVHRFLLKTKTDVLILPEEVEWIKFNVGMNGYYIVHYEDDGWDSLTGLLKGTHTAVSSNDRASLINNAFQLVSIGKLSIEKALDLSLYLKHETEIMPVFQGLNELIPMYKLMEKRDMNEVETQFKAFLIRLLRDLIDKQTWTDEGSVSEQMLRSELLLLACVHNYQPCVQRAEGYFRKWKESNGNLSLPVDVTLAVFAVGAQSTEGWDFLYSKYQFSLSSTEKSQIEFALCRTQNKEKLQWLLDESFKGDKIKTQEFPQILTLIGRNPVGYPLAWQFLRKNWNKLVQKFELGSSSIAHMVMGTTNQFSTRTRLEEVKGFFSSLKENGSQLRCVQQTIETIEENIGWMDKNFDKIRVWLQSEKLEHDPEADATG

SEQ ID NO: 10110 - protein, 929 aa, Homo sapiens [sequence omitted]

SEQ ID NO: 10111 - protein, 478 aa, Homo sapiens
MFKFHQMKHIFEILDKMRCLRKRSTVSFLGVLVIFLLFMNLYIEDSYVLEGDKQLIRETSTHQLNSERYVHTFKDLSNFSGAINVTYRYLAATPLQRKRYLTIGLSSVKRKKGNYLLETIKSIFEQSSYEELKEISVVVHLADFNSSWRDAMVQDITQKFAHHIIAGRLMVIHAPEEYYPILDGLKRNYNDPEDRVKFRSKQNVDYAFLLNFCANTSDYYVMLEDDVRCSKNFLTAIKKVIASLEGTYWVTLEFSKLGYIGKLYHSHDLPRLAHFLLMFYQEMPCDWLLTHFRGLLAQKNVIRFKPSLFQHMGYYSSYKGTENKLKDDDFEEESFDIPDNPPASLYTNMNVFENYEASKAYSSVDEYFWGKPPSTGDVFVIVFENPIIIKKIKVNTGTEDRQNDILHHGALDVGENVMPSKQRRQCSSYLRLGEFKNGNFEMSGVNQKIPFDIHCMRIYVTKTQKEWLIIRSISIWTS

SEQ ID NO: 10112 - protein, 790 aa, Homo sapiens
MRTYRYFLLLFWVGQPYPTLSTPLSKRTSGFPAKKRALELSGNSKNELNRSKRSWMWNQFFLLEEYTGSDYQYVGKLHSDQDRGDGSLKYILSGDGAGDLFIINENTGDIQATKRLDREEKPVYILRAQAINRRTGRPVEPESEFIIKIHDINDNEPIFTKEVYTATVPEMSDVGTFVVQVTATDADDPTYGNSAKVVYSILQGQPYFSVESETGIIKTALLNMDRENREQYQVVIQAKDMGGQMGGLSGTTTVNITLTDVNDNPPRFPQSTYQFKTPESSPPGTPIGRIKASDADVGENAEIEYSITDGEGLDMFDVITDQETQEGIITVKKLLDFEKKKVYTLKVEASNPYVEPRFLYLGPFKDSATVRIVVEDVDEPPVFSKLAYILQIREDAQINTTIGSVTAQDPDAARNPVKYSVDRHTDMDRIFNIDSGNGSIFTSKLLDRETLLWHNITVIATEINNPKQSSRVPLYIKVLDVNDNAPEFAEFYETFVCEKAKADQLIQTLHAVDKDDPYSGHQFSFSLAPEAASGSNFTIQDNKDNTAGILTRKNGYNRHEMSTYLLPVVISDNDYPVQSSTGTVTVRVCACDHHGNMQSCHAEALIHPTGLSTGALVAILLCIVILLVTVVLFAALRRQRKKEPLIISKEDIRDNIVSYNDEGGGEEDTQAFDIGTLRNPEAIEDNKLRRDIVPEALFLPRRTPTARDNTDVRDFINQRLKENDTDPTAPPYDSLATYAYEGTGSVADSLSSLESVTTDADQDYDYLSDWGPRFKKLADMYGGVDSDKDS

SEQ ID NO: 10113 - protein, 663 aa, Homo sapiens
MRTYRYFLLLFWVGQPYPTLSTPLSKRTSGFPAKKRALELSGNSKNELNRSKRSWMWNQFFLLEEYTGSDYQYVGKLHSDQDRGDGSLKYILSGDGAGDLFIINENTGDIQATKRLDREEKPVYILRAQAINRRTGRPVEPESEFIIKIHDINDNEPIFTKEVYTATVPEMSDVGTFVVQVTATDADDPTYGNSAKVVYSILQGQPYFSVESETGIIKTALLNMDRENREQYQVVIQAKDMGGQMGGLSGTTTVNITLTDVNDNPPRFPQSTYQFKTPESSPPGTPIGRIKASDADVGENAEIEYSITDGEGLDMFDVITDQETQEGIITVKKLLDFEKKKVYTLKVEASNPYVEPRFLYLGPFKDSATVRIVVEDVDEPPVFSKLAYILQIREDAQINTTIGSVTAQDPDAARNPVKYSVDRHTDMDRIFNIDSGNGSIFTSKLLDRETLLWHNITVIATEINNPKQSSRVPLYIKVLDVNDNAPEFAEFYETFVCEKAKADQLIQTLHAVDKDDPYSGHQFSFSLAPEAASGSNFTIQDNKDNTAGILTRKNGYNRHEMSTYLLPVVISDNDYPVQSSTGTVTVRVCACDHHGNMQSCHAEALIHPTGLSTGALVAILLCIVILLGKLVLPASYLPMVRGSHCYCDTLDLSASPIKAYSLI

SEQ ID NO: 10114 - protein, 1479 aa, Homo sapiens
MGPGRPAPAPWPRHLLRCVLLLGCLHLGRPGAPGDAALPEPNVFLIFSHGLQGCLEAQGGQVRVTPACNTSLPAQRWKWVSRNRLFNLGTMQCLGTGWPGTNTTASLGMYECDREALNLRWHCRTLGDQLSLLLGARTSNISKPGTLERGDQTRSGQWRIYGSEEDLCALPYHEVYTIQGNSHGKPCTIPFKYDNQWFHGCTSTGREDGHLWCATTQDYGKDERWGFCPIKSNDCETFWDKDQLTDSCYQFNFQSTLSWREAWASCEQQGADLLSITEIHEQTYINGLLTGYSSTLWIGLNDLDTSGGWQWSDNSPLKYLNWESDQPDNPSEENCGVIRTESSGGWQNRDCSIALPYVCKKKPNATAEPTPPDRWANVKVECEPSWQPFQGHCYRLQAEKRSWQESKKACLRGGGDLVSIHSMAELEFITKQIKQEVEELWIGLNDLKLQMNFEWSDGSLVSFTHWHPFEPNNFRDSLEDCVTIWGPEGRWNDSPCNQSLPSICKKAGQLSQGAAEEDHGCRKGWTWHSPSCYWLGEDQVTYSEARRLCTDHGSQLVTITNRFEQAFVSSLIYNWEGEYFWTALQDLNSTGSFFWLSGDEVMYTHWNRDQPGYSRGGCVALATGSAMGLWEVKNCTSFRARYICRQSLGTPVTPELPGPDPTPSLTGSCPQGWASDTKLRYCYKVFSSERLQDKKSWVQAQGACQELGAQLLSLASYEEEHFVANMLNKIFGESEPEIHEQHWFWIGLNRRDPRGGQSWRWSDGVGFSYHNFDRSRHDDDDIRGCAVLDLASLQWVAMQCDTQLDWICKIPRGTDVREPDDSPQGRREWLRFQEAEYKFFEHHSTWAQAQRICTWFQAELTSVHSQAELDFLSHNLQKFSRAQEQHWWIGLHTSESDGRFRWTDGSIINFISWAPGKPRPVGKDKKCVYMTASREDWGDQRCLTALPYICKRSNVTKETQPPDLPTTALGGCPSDWIQFLNKCFQVQGQEPQSRVKWSEAQFSCEQQEAQLVTITNPLEQAFITASLPNVTFDLWIGLHASQRDFQWVEQEPLMYANWAPGEPSGPSPAPSGNKPTSCAVVLHSPSAHFTGRWDDRSCTEETHGFICQKGTDPSLSPSPAALPPAPGTELSYLNGTFRLLQKPLRWHDALLLCESHNASLAYVPDPYTQAFLTQAARGLRTPLWIGLAGEEGSRRYSWVSEEPLNYVGWQDGEPQQPGGCTYVDVDGAWRTTSCDTKLQGAVCGVSSGPPPPRRISYHGSCPQGLADSAWIPFREHCYSFHMELLLGHKEARQRCQRAGGAVLSILDEMENVFVWEHLQSYEGQSRGAWLGMNFNPKGGTLVWQDNTAVNYSNWGPPGLGPSMLSHNSCYWIQSNSGLWRPGACTNITMGVVCKLPRAEQSSFSPSALPENPAALVVVLMAVLLLLALLTAALILYRRRQSIERGAFEGARYSRSSSSPTEATEKNILVSDMEMNEQQE

SEQ ID NO: 10115 - protein, 229 aa, Homo sapiens
MAPHGPGSLTTLVPWAAALLLALGVERALALPEICTQCPGSVQNLSKVAFYCKTTRELMLHARCCLNQKGTILGLDLQNCSLEDPGPNFHQAHTTVIIDLQANPLKGDLANTFRGFTQLQTLILPQHVNCPGGINAWNTITSYIDNQICQGQKNLCNNTGDPEMCPENGSCVPDGPGLLQCVCADGFHGYKCMRQGSFSLLMFFGILGATTLSVSILLWATQRRKAKTS

SEQ ID NO: 10116 - protein, 303 aa, Homo sapiens
MARRGPGWRPLLLLVLLAGAAQGGLYFRRGQTCYRPLRGDGLAPLGRSTYPRPHEYLSPADLPKSWDWRNVDGVNYASITRNQHIPQYCGSCWAHASTSAMADRINIKRKGAWPSTLLSVQNVIDCGNAGSCEGGNDLSVWDYAHQHGIPDETCNNYQAKDQECDKFNQCGTCNEFKECHAIRNYTLWRVGDYGSLSGREKMMAEIYANGPISCGIMATERLANYTGGIYAEYQDTTYINHVVSVAGWGISDGTEYWIVRNSWGEPWGERGWLRIVTSTYKDGKGARYNLAIEEHCTFGDPIV

SEQ ID NO: 10117 - protein, 705 aa, Homo sapiens
MTKFGFLRLSYEKQDTLLKLLILSMAAVLSFSTRLFAVLRFESVIHEFDPYFNYRTTRFLAEEGFYKFHNWFDDRAWYPLGRIIGGTIYPGLMITSAAIYHVLHFFHITIDIRNVCVFLAPLFSSFTTIVTYHLTKELKDAGAGLLAAAMIAVVPGYISRSVAGSYDNEGIAIFCMLLTYYMWIKAVKTGSICWAAKCALAYFYMVSSWGGYVFLINLIPLHVLVLMLTGRFSHRIYVAYCTVYCLGTILSMQISFVGFQPVLSSEHMAAFGVFGLCQIHAFVDYLRSKLNPQQFEVLFRSVISLVGFVLLTVGALLMLTGKISPWTGRFYSLLDPSYAKNNIPIIASVSEHQPTTWSSYYFDLQLLVFMFPVGLYYCFSNLSDARIFIIMYGVTSMYFSAVMVRLMLVLAPVMCILSGIGVSQVLSTYMKNLDISRPDKKSKKQQDSTYPIKNEVASGMILVMAFFLITYTFHSTWVTSEAYSSPSIVLSARGGDGSRIIFDDFREAYYWLRHNTPEDAKVMSWWDYGYQITAMANRTILVDNNTWNNTHISRVGQAMASTEEKAYEIMRELDVSYVLVIFGGLTGYSSDDINKFLWMVRIGGSTDTGKHIKENDYYTPTGEFRVDREGSPVLLNCLMYKMCYYRFGQVYTEAKRPPGFDRVRNAEIGNKDFELDVLEEAYTTEHWLVRIYKVKDLDNRGLSRT

SEQ ID NO: 10118 - protein, 705 aa, Homo sapiens
MTKFGFLRLSYEKQDTLLKLLILSMAAVLSFSTRLFAVLRFESVIHEFDPYFNYRTTRFLAEEGFYKFHNWFDDRAWYPLGRIIGGTIYPGLMITSAAIYHVLHFFHITIDIRNVCVFLAPLFSSFTSIVTYLLTKELKDAGAGLLAAAMIAVVPGYISRSVAGSYDNEGIAIFCMLLTYYMWIKAVKTGSICWAAKCALAYFYMVSSWGGYVFLINLIPLHVLVLMLTGRFSHRIYVAYCTVYCLGTILSRQISFVGFQPVLSSEHMAGFGVFGLCQIHAFVDYLRSKLNPQQFEVLFRSVISLVGFVLLTVGALLMLTGKISPWTGRFYSLLDPSYAKNNIPIIASVSEHQPTTWSSYYFDLQLLVFMFPVGLYYCFSNLSDARIFIIMYGVTSMYFSAVMVRLMLVLAPVMSILSGIGVSQVLSTYMKNLDISRPDKKSKKQQDSTYPIKIEVASGMILVMAFFLITYTFHSTWVTSEAYSSPSIVLSARGGDGSRIIFDDFREAYYWLRHNTPEDAKVMSWWDYGYQITAMANRTILVDNNTWNNTHISRVGQAMASTEEKAYEIMRELDVSYVLVIFGGLTGYSSDDINKFLWMVRIGGSTDTGKHIKENDYYTPTGEFRVDREGSPVLLNCLMYKMCYYRFGQVYTEAKRPPGFDRVRNAEIGNKDFELDVLEEGYTTEHWLVRIYKVKDLDNRGLSRT

SEQ ID NO: 10119 - protein, 541 aa, Homo sapiens
MVADPPRDSKGLAAAEPTANGGLALASIEDQGAAAGGYCGSRDQVRRCLRANLLVLLTVVAVVAGVALGLGVSGAGGALALGPERLSAFVFPGELLLRLLRMIILPLVVCSLIGGAASLDPGALGRLGAWALLFFLVTTLLASALGVGLALALQPGAASAAINASVGAAGSAENAPSKEVLDSFLDLARNIFPSNLVSAAFRSYSTTYEERNITGTRVKVPVGQEVEGMNILGLVVFAIVFGVALRKLGPEGELLIRFFNSFNEATMVLVSWIMWYAPVGIMFLVAGKIVEMEDVGLLFARLGKYILCCLLGHAIHGLLVLPLIYFLFTRKNPYRFLWGIVTPLATAFGTSSSSATLPLMMKCVEENNGVAKHISRFILPIGATVNMDGAALFQCVAAVFIAQLSQQSLDFVKIITILVTATASSVGAAGIPAGGVLTLAIILEAVNLPVDHISLILAVDWLVDRSCTVLNVEGDALGAGLLQNYVDRTESRSTEPELIQVKSELPLDPLPVPTEEGNPLLKHYRGPAGDATVASEKESVM

SEQ ID NO: 10120 - protein, 495 aa, Homo sapiens
MASFLAFLLLNFRVCLLLLQLLMPHSAQFSVLGPSGPILAMVGEDADLPCHLFPTMSAETMELKWVSSSLRQVVNVYADGKEVEDRQSAPYRGRTSILRDGITAGKAALRIHNVTASDSGKYLCYFQDGDFYEKALVELKVAALGSDLHVDVKGYKDGGIHLECRSTGWYPQPQIQWSNNKGENIPTVEAPVVADGVGLYAVAASVIMRGSSGEGVSCTIRSSLLGLEKTASISIADPFFRSAQRWIAALAGTLPVLLLLLGGAGYFLWQQQEEKKTQFRKKKREQELREMAWSTMKQEQSTRGWRSIQYASQWKKALFKPADVILDPKTANPILLVSEDQRSVQRAKEPQDLPDNPERFNWHYCVLGCESFISGRHYWEVEVGDRKEWHIGVCSKNVQRKGWVKMTPENGFWTMGLTDGNKYRTLTEPRTNLKLPKPPKKVGVFLDYETGDISFYNAVDGSHIHTFLDVSFSEALYPVFRILTLEPTALTICPA

SEQ ID NO: 10121 - protein, 513 aa, Homo sapiens
MKMASFLAFLLLNFRVCLLLLQLLMPHSAQFSVLGPSGPILAMVGEDADLPCHLFPTMSAETMELKWVSSSLRQVVNVYADGKEVEDRQSAPYRGRTSILRDGITAGKAALRIHNVTASDSGKYLCYFQDGDFYEKALVELKVAALGSDLHVDVKGYKDGGIHLECRSTGWYPQPQIQWSNNKGENIPTVEAPVVADGVGLYAVAASVIMRGSSGEGVSCTIRSSLLGLEKTASISIADPFFRSAQRWIAALARTLPVLLLLLGGAGYFLWQQQEEKKTQFRKKKREQELREMAWSTMKQEQSTRVKLLEELRWRSIQYASRGERHSAYNEWKKALFKPADVILDPKTANPILLVSEDQRSVQRAKEPQDLPDNPERFNWHYCVLGCESFISGRHYWEVEVGDRKEWHIGVCSKNVQRKGWVKMTPENGFWTMGLTDGNKYRTLTEPRTNLKLPKPPKKVGVFLDYETGDISFYNAVDGSHIHTFLDVSFSEALYPVFRILTLEPTALSICPA

SEQ ID NO: 10122 - protein, 334 aa, Homo sapiens
MKMASSLAFLLLNFHVSLLLVQLLTPCSAQFSVLGPSGPILAMVGEDADLPCHLFPTMSAETMELKWVSSSLRQVVNVYADGKEVEDRQSAPYRGRTSILRDGITAGKAALRIHNVTASDSGKYLCYFQDGDFYEKALVELKVAALGSNLHVEVKGYEDGGIHLECRSTGWYPQPQIQWSNAKGENIPAVEAPVVADGVGLYEVAASVIMRGGSGEGVSCIIRNSLLGLEKTASISIADPFFRSAQPWIAALAGTLPILLLLLAGASYFLWRQQKEITALSSEIESEQEMKEMGYAATEREISLRESLQEELKRKKIQYLTRGEESSSDTNKSA

SEQ ID NO: 10123 - protein, 542 aa, Homo sapiens
MVGEDADLPCHLFPTMSAETMELRWVSSSLRQVVNVYADGKEVEDRQSAPYRGRTSILRDGITAGKAALRIHNVTASDSGKYLCYFQDGDFYEKALVELKVAALGSDLHIEVKGYEDGGIHLECRSTGWYPQPQIKWSDTKGENIPAVEAPVVADGVGLYAVAASVIMRGSSGGGVSCIIRNSLLGLEKTASISIADPFFRSAQPWIAALAGTLPISLLLLAGASYFLWRQQKEKIALSRETEREREMKEMGYAATEQEISLREKLQEELKWRKIQYMARGEKSLAYHEWKMALFKPADVILDPDTANAILLVSEDQRSVQRAEEPRDLPDNPERFEWRYCVLGCENFTSGRHYWEVEVGDRKEWHIGVCSKNVERKKGWVKMTPENGYWTMGLTDGNKYRALTEPRTNLKLPEPPRKVGIFLDYETGEISFYNATDGSHIYTFPHASFSEPLYPVFRILTLEPTALTICPIPKEVESSPDPDLVPDHSLETPLTPGLANESGEPQAEVTSLLLPAHPGAEVSPSATTNQNHKLQARTEALY

SEQ ID NO: 10124 - protein, 352 aa, Homo sapiens
MKMASFLAFLLLNFRVCLLLLQLLMPHSAQFSVLGPSGPILAMVGEDADLPCHLFPTMSAETMELKWVSSSLRQVVNVYADGKEVEDRQSAPYRGRTSILRDGITAGKAALRIHNVTASDSGKYLCYFQDGDFYEKALVELKVAALGSDLHVDVKGYKDGGIHLECRSTGWYPQPQIQWSNNKGENIPTVEAPVVADGVGLYAVAASVIMRGSSGEGVSCTIRSSLLGLEKTASISIADPFFRSAQRWIAALAGTLPVLLLLLGGAGYFLWQQQEEKKTQFRKKKREQELREMAWSTMKQEQSTRVKLLEELRWRSIQYASRGERHSAYNEWKKALFKPGEEMLQMRLHFVK

SEQ ID NO: 10125 - protein, 584 aa, Homo sapiens
MKMASSLAFLLLNFHVSLFLVQLLTPCSAQFSVLGPSGPILAMVGEDADLPCHLFPTMSAETMELRWVSSSLRQVVNVYADGKEVEDRQSAPYRGRTSILRDGITAGKAALRIHNVTASDSGKYLCYFQDGDFYEKALVELKVAALGSDLHIEVKGYEDGGIHLECRSTGWYPQPQIKWSDTKGENIPAVEAPVVADGVGLYAVAASVIMRGSSGGGVSCIIRNSLLGLEKTASISIADPFFRSAQPWIAALAGTLPISLLLLAGASYFLWRQQKEKIALSRETEREREMKEMGYAATEQEISLREKLQEELKWRKIQYMARGEKSLAYHEWKMALFKPADVILDPDTANAILLVSEDQRSVQRAEEPRDLPDNPERFEWRYCVLGCENFTSGRHYWEVEVGDRKEWHIGVCSKNVERKKGWVKMTPENGYWTMGLTDGNKYRALTEPRTNLKLPEPPRKVGIFLDYETGEISFYNATDGSHIYTFPHASFSEPLYPVFRILTLEPTALTICPIPKEVESSPDPDLVPDHSLETPLTPGLANESGEPQAEVTSLLLPAHPGAEVSPSATTNQNHKLQARTEALY

SEQ ID NO: 10126 - protein, 359 aa, Homo sapiens [sequence omitted]

SEQ ID NO: 10127 - protein, 731 aa, Homo sapiens
  VARIANT 248, 249, 250, 254, 261, 264, 280, 299, 400, 411, 429: Xaa = Any Amino Acid
MASSLAFLLLNFHVSLFLVQLLTPCSAQFSVLGPSGPILAMVGEDADLPCHLFPTMSAETMELRWVSSSLRQVVNVYADGKEVEYRQSAPYRGRTSILRDGITAGKAALRIHNVTASDSGKYLCYFQHGDFYEKAPVELKVAALGSDLHIEVKGYDDGGIHLECRSTGWYPQPQINWSDSKGENIPAVEGPVNVYGVGLYAVPPPVIMTGTSGGGVSCIITNSLLGLEKTASISIADPFIQGGAPARXXXGPGXGTLAYFXVAXSWQGASYFLWRQQKEXIGLSRETEREREMKEMGYXATEQEISAKRSLQEELKWRKIQYMARGEESSSDTKKSALMLKWKKALFKPGDKMLQMRVSPCKINWMYSKIYCRKGELIKFISGRVKIENKPLSIKHQWAXSMWGGKQQKCXKRILVASWGRIRVLGKAXTDLTFISPLVTRPLGLSPMTLMRESHSGQARDTGFWKDLLSMAQALHAVALKSRKNGRPHGHLLKLSAADVILYPDMANAILLVSEDQRSVQRAEEPHDLPDNPERFEWRYCVLGCESFMSERHYWEVEVGDRKEWHIGVCSKNVERKKVWVKMTPENGYWTMGLTDGNKYRALTEPRTNLKLPEPPRKVGVILDYETGHISFYNATDGSHIYTFLHASSSEPLYPVFRILTLEPTALTVCPIPKVESSPDPDLVPDHSLEIPLTPGLANESGEPQAEVTSLLLPAQPGAKGLTLHNSQSEP

SEQ ID NO: 10128 - protein, 348 aa, Homo sapiens
MLQTKDLIWTLFFLGTAVSLQVDIVPSQGEISVGESKFFLCQVAGDAKDKDISWFSPNGEKLTPNQQRISVVWNDDSSSTLTIYNANIDDAGIYKCVVTGEDGSESEATVNVKIFQKLMFKNAPTPQEFREGEDAVIVCDVVSSLPPTIIWKHKGRDVILKKDVRFIFLSNNYLPIPGIKKTDEGTYRCEGRILARGEINFNDIQVIVNVPPTIQARQNIVNATANLGQSVTLVCDAEGFPGPTMSWTKDGEQIEQEEHDEKYLFSDDSSHLTIKKVDKNHEAENICIAENKVGEQDATIHLKVFAKPQITYVEDQTAMELAEQVILTVEASGDHIPYITWWTSTWQI

SEQ ID NO: 10129 - protein, 298 aa, Homo sapiens
MRNHTMVTEFILLGIPETEGLETALLFLFSSFYLCTLLGNVLILTAIISSTRLHTPMYFFLGNLSIFDLGFSSTTVPKMLFYLSGNSHAISYAGCVSQLFFYHFLGCTECFLYTVMACDRFVAICFPLRYTVIMNHRVCFMLATGTWMIGCVHAMILTPLTFQLPYCGPNKVGYYFCDIPAVLPLACKDTSLAQRVGFTNVGLLSLICFFLILVSYTCIGISISKIRSAEGRQRAFSTCSAHLTAILCAYGPVIVIYLQPNPSALLGSIIQILNNLVTPMLNPLIYSLRNKDVKSDQP

SEQ ID NO: 10130 - protein, 300 aa, Homo sapiens
MANCEFSPVSGDKPCCRLSRRAQLCLGVSILVLILVVVLAVVVPRWRQQWSGPGTTKRFPETVLARCVKYTEIHPEMRHVDCQSVWDAFKGAFISKHPCNITEEDYQPLMKLGTQTVPCNKILLWSRIKDLAHQFTQVQRDMFTLEDTLLGYLADDLTWCGEFNTSKINYQSCPDWRKDCSNNPVSVFWKTVSRRFAEAACDVVHVMLNGSRSKIFDKNSTFGSVEVHNLQPEKVQTLEAWVIHGGREDSRDLCQDPTIKELESIISKRNIQFSCKNIYRPDKFLQCVKNPEDSSCTSEI

SEQ ID NO: 10131 - protein, 300 aa, Homo sapiens
MANCEFSPVSGDKPCCRLSRRAQLCLGVSILVLILVVVLAVVVPRWRQTWSGPGTTKRFPETVLARCVKYTEIHPEMRHVDCQSVWDAFKGAFISKHPCNITEEDYQPLMKLGTQTVPCNKILLWSRIKDLAHQFTQVQRDMFTLEDTLLGYLADDLTWCGEFNTSKINYQSCPDWRKDCSNNPVSVFWKTVSRRFAEAACDVVHVMLNGSRSKIFDKNSTFGSVEVHNLQPEKVQTLEAWVIHGGREDSRDLCQDPTIKELESIISKRNIQFSCKNIYRPDKFLQCVKNPEDSSCTSEI

SEQ ID NO: 10132 - protein, 256 aa, Homo sapiens
MAHRPPSPALASVLLALLLSGAARAAEIVGGHEAQPHSRPYMASLQMRGNPGSHFCGGTLIHPSFVLTAAHCLRDIPQRLVNVVLGAHNVRTQEPTQQHFSVAQVFLNNYDAENKLNDVLLIQLSSPANLSASVATVQLPQQDQPVPHGTQCLAMGWGRVGAHDPPAQVLQELNVTVVTFFCRPHNICTFVPRRKAGICFGDSGGPLICDGIIQGIDSFVIWGCATRLFPDFFTRVALYVDWIRSTLRRVEAKGRP

SEQ ID NO: 10133 - protein, 273 aa, Homo sapiens
MGAQDEEEGIQDLDGLLVFDKIVEVTLLNLPWYNEETEGQRGEMTAPKSPRAKIRGTLCAEGTRGRSSTARCSLFGSDFVNTFDGSMYSFAGYCSYLLAGGCQKRSFSIIGDFQNGKRVSLSVYLGEFFDIHLFVNGTVTQGDQRVSMPYASKGLYLETEAGYYKLSGEAYGFVARIDGSGNFQVLLSDRYFNKTCGLCGNFNIFAEDDFMTQEGTLTSDPYDFANSWALSSGEQWCERASPPSSSCNISSGEMQKVGVDWPGCTWMVCDFWI

SEQ ID NO: 10134 - protein, 375 aa, Homo sapiens [sequence omitted]

SEQ ID NO: 10135 - protein, 280 aa, Homo sapiens
MWFLTTLLLWVPVDGQVDTTKAVITLQPPWVSVFQEETVTLHCEVLHLPGSSSTQWFLNGTATQTSTPSYRITSASVNDSGEYRCQRGLSGRSDPIQLEIHRGWLLLQVSSRVFMEGEPLALRCHAWKDKLVYNVLYYRNGKAFKFFHWNSNLTILKTNISHNGTYHCSGMGKHRYTSAGISQYTVKGLQLPTPVWFHVLFYLAVGIMFLVNTVLWVTIRKELKRKKKWNLEISLDSGHEKKVISSLQEDRHLEEELKCQEQKEEQLQEGVHRKEPQGAT

SEQ ID NO: 10136 - protein, 156 aa, Homo sapiens
MALEKSLVRLLLLVLILLVLGWVQPSLGKESRAKKFQRQHMDSDSSPSSSSTYCNQMMRRRNMTQGRCKPVNTFVHEPLVDVQNVCFQEKVTCKNGQGNCYKSNSSMHITDCRLTNGSRYPNCAYRTSPKERHIIVACEGSPYVPVHFDASVEDST

SEQ ID NO: 10137 - protein, 312 aa, Homo sapiens
MKAGNFSDTPEFFLLGLSGDPELQPILFMLFLSMYLATMLGNLLIILAVNSDSHLHTPMYFLLSILSLVDICFTSTTMPKMLVNIQAQAQSINYTGCLTQICFVLVFVGLENGILVMMAYDRFVAICHPLRYNVIMNPKLCGLLLLLSFIVSVLDALLHTLMVLQLTFCIDLEIPHFFCELAHILKLACSDVLINNILVYLVTSLLGVVPLSGIIFSYTRIVSSVMKIPSAGGKYKAFSICGSHLIVVSLFYGTGFGVYLSSGATHSSRKGAIASVMYTVVTPMLNPLIYSLRNKDMLKALRKLISRIPSFH

SEQ ID NO: 10138 - protein, 1023 aa, Homo sapiens
MTLNNCASMKLEVHFQSKQNEDSEEEEQCTISSHWAFQQESKCWSPMGSSDLLAPPSPGLPATSSCESVLTELSATSLPVITVSLPPEPADLPLPGRAPSSSDRPLLSPTQGQEGPQDKAKKRHRNRSFLKHLESLRRKEKSGSQQAEPKHSPATSEKVSKASSFRSCRGFLSAGFYRAKNWAATSAGGSGANTRKAWEAWPVASFRHPQWTHRGDCLVHVPGDHKPGTFPRSLSIESLCPEDGHRLADWQPGRRWGCEGRRGSCGSTGSHASTYDNLPELYPAEPVMVGAEAEDEDDEESGGSYAHLDDILQHVWGLQQRVELWSRAMYPDLGPGDEEEEEATSSVEIATVEVKCQAEALSQMEVPAHGESPAWAQAEVQPAVLAPAQAPAEAEPVAQEEAEAPAPAPAPAPAQDSEQEAHSGGEPTFASSLSVEEGHSISDTVASSSELDSSGNSMNEAEAAGSLAGLQASMPRERRDSGVGASLTRPCRKLRWHSFQNSHRPSLNSESLEINRQFAGQINLLHKGSLLRLTAFMEKYTVPHKQGWVWSMPKFMRRNKTPDYRGQHVFGVPPLIHVQRTGQPLPQSIQQAMRYLRSQCLDQVGIFRKSGVKSRIQNLRQMNETSPDNVCYEGQSAYDVADLLKQYFRDLPEPIFTSKLTTTFLQIYQLLPKDQWLAAAQAATLLLPDENREVLQTLLYFLSDIASAEENQMTAGNLAVCLAPSIFHLNVSKKDSPSPRIKSKRSLIGRPGPRDLSDNMAATQGLSHMISDCKKLFQVPQDMVLQLCSSYSAAELSPPGPALAELRQAQAAGVSLSLYMEENIQDLLRDAAERFKGWMSVPGPQHTELACRKAPDGHPLRLWKASTEVAAPPAVVLHRVLRERALWDEDLLRAQVLEALMPGVELYHYVTDSMAPHPCRDFVVLRMWRSDLPRGGCLLVSQSLDPEQPVPESGVRALMLTSQYLMEPCGLGRSRLTHICRADLRGRSPDWYNKVFGHLCAMEVAKIRDSFPTLQAAGPETKL

SEQ ID NO: 10139 - protein, 374 aa, Homo sapiens
FASFTDKIRFLEQQNKMLETKWSLLQQQKMAQSNMDNMFGSYINNLTQQLETLGQEKLKLEVELGNMQGLVEDFKNKYEDEIHKLTEMENEFVLIKKEVDEAYMNKVELGSRLEGLTDEINFLRQLYEEEIRELQCQISDTSAVLSMDNSSLDMDSIIAEVKVQYEEITNHSQAEAESMYQIKYEELQTLVGKHGNDLRRTKTEISEMNRNISRLQAEAEGLKGQRTSLEAAIADAQQRGELAVKDANAELSELEAAQERAKQDMARPLREYQELMNVKLALDIQIATYRKLLEGDESRLESGMLNMSIHTKTTSSYAAFGGLTSPGLSYSLGSSFGSGAGSSSFSSTGSTRAVVVKKIKTRDGKLESSDVLPK

SEQ ID NO: 10140 - protein, 435 aa, Homo sapiens
GSSSFRGGLGRGYGGASGIGGITTVTVNQSLLSPLNLEVDPNIQAVRTQEKEQIKTLNNKFASFTDKIRFLEQQNKMLETKWSLLQQQKMAQSNMDNMFGSYINNLTQQLETLGQEKLKLEVELGNMQGLVEDFKNKYEDEIHKLTEMENEFVLIKKEVDEAYMNKVELGSRLEGLTDEINFLRQLYEEEIRELQCQISDTSAVLSMDNSSLDMDSIIAEVKVQYEEITNHSQAEAESMYQIKYEELQTLVGKHGNDLRRTKTEISEMNRNISRLQAEAEGLKGQRTSLEAAIADAQQRGELAVKDANAELSELEAAQERAKQDMARPLREYQELMNVKLALDIQIATYRKLLEGDESRLESGMLNMSIHTKTTSSYAGAFGGLTSPGLSYSLGSSFGSGAGSSSFSSTGSTRAVVVKKIKTRDGKLESSDVLPK

SEQ ID NO: 10141 - protein, 541 aa, Homo sapiens
MRGFVHFHHAAYSFLPPGGILLPLHRPSWATWLDFLILKVAVGTRLHRVPVKIKRMCVNGLCRARKHRHLCCGEKQWGDWRPHLAVILSNQAGDPELYQRAIVAIGDTLAGKGLVEAAHFCYLMAHVPFGHYTVKTDHLVLLGSSHSQEFLKFATTEAIQRTEIFEYCQMLGRPKSFIPSFQVYKLLYASRLADYGLVSQALHYCEAIGAAVLSQGESSHPVLLVELIKLAEKLKLSDPLVLERRSGDRDLEPDWLAQLRRQLEQKVAGDIGDPHPTRSDISGAGGTTTENTFYQDFSGCQGYSEAPGYRSALWLTPEQTCLLQPSPQQPFPLQPGSYPAGGGAGQTGTPRPFYSVPETHLPGTGSSVAVTEATGGTVWEEMLQTHLGPGENTVSQETSQPPDGQEVISKPQTPLAARPRSISESSASSAKEDEKESSDEADKNSPRNTAQRGKLGDGKEHTKSSGFGWFSWFRSKPTKNASPAGDEDSSDSPDSEVGVKAEDPHPAGGQLRALGLEACLDQRVFPLSSAPTLVFFFLHLP

SEQ ID NO: 10142 - protein, 957 aa, Homo sapiens
METQELRGALALLLLCFFTSASQDLQVIDLLTVGESRQMVAVAEKIRTALLTAGDIYLLSTFRLPPKQGGVLFGLYSRQDNTRWLEASVVGKINKVLVRYQREDGKVHAVNLQQAGLADGRTHTVLLRLRGPSRPSPALHLYVDCKLGDQHAGLPALAPIPPAEVDGLEIRTGQKAYLRMQGFVESMKIILGGSMARVGALSECPFQGDESIHSAVTNALHSILGEQTKALVTQLTLFNQILVELRDDIRDQVKEMSLIRNTIMECQVCGFHEQRSHCSPNPCFRGVDCMEVYEYPGYRCGPCPPGLQGNGTHCSDINECAHADPCFPGSSCINTMPGFHCEACPRGYKGTQVSGVGIDYARASKQVCNDIDECNDGNNGGCDPNSICTNTVGSFKCGPCRLGFLGNQSQGCLPARTCHSPAHSPCHIHAHCLFERNGAVSCQCNVGWAGNGNVCGTDTDIDGYPDQALPCMDNNKHCKQDNCLLTPNSGQEDADNDGVGDQCDDDADGDGIKNVEDNCRLFPNKDQQNSDTDSFGDACDNCPNVPNNDQKDTDGNGEGDACDNDVDGDGIPNGLDNCPKVPNPLQTDRDEDGVGDACDSCPEMSNPTQVQGDDSDLVGDVCDTNEDSDGDGHQDTKDNCPQLPNSSQLDSDNDGLGDECDGDDDNDGIPDYVPPGPDNCRLVPNPNQKDSDGNGVGDVCEDDFDNDAVVDPLDVCPESAEVTLTDFRAYQTVVLDPEGDAQIDPNWVVLNQGMEIVQTMNSDPGLAVGYTAFNGVDFEGTFHVNTVTDDDYAGFLFSYQDSGRFYVVMWKQTEQTYWQATPFRAVAQPGLQLKAVTSVSGPGEHLRNALWHTGHTPDQVRLLWTDPRNVGWRDKTSYRWQLLHRPQVGYIRVKLYEGPQLVADSGVIIDTSMRGGRLGVFCFSQENIIWSNLQYRCNDTVPEDFEPFRRQLLQGRV

SEQ ID NO: 10143 - protein, 513 aa, Homo sapiens
MIRTPLSASAHRLLLPGSRGRPPRNMQPTGREGSRALSRRYLRRLLLLLLLLLLRQPVTRAETTPGAPRALSTLGSPSLFTTPGVPSALTTPGLTTPGTPKTLDLRGRAQALMRSFPLVDGHNDLPQVLRQRYKNVLQDVNLRNFSHGQTSLDRLRDGLVGAQFWSASVSCQSQDQTAVRLALEQIDLIHRMCASYSELELVTSAEGLNSSQKLACLIGVEGGHSLDSSLSVLRSFYVLGVRYLTLTFTCSTPWAESSTKFRHHMYTNVSGLTSFGEKVVEELNRLGMMIDLSYASDTLIRRVLEVSQAPVIFSHSAARAVCDNLLNVPDDILQLLKKNGGIVMVTLSMGVLQCNLLANVSTVADHFDHIRAVIGSEFIGIGGNYDGTGRFPQGLEDVSTYPVLIEELLSRSWSEEELQGVLRGNLLRVFRQVEKVREESRAQSPVEAEFPYGQLSTSCHSHLVPQNGHQATHLEVTKQPTNRVPWRSSNASPYLVPGLVAAATIPTFTQWLC

SEQ ID NO: 10144 - protein, 266 aa, Homo sapiens [sequence omitted]

SEQ ID NO: 10145 - protein, 266 aa, Homo sapiens
MVCLKLPGGSCMTALTVTLMVLSSPLALSGDTRPRFLWQPKRECHFFNGTERVRFLDRYFYNQEESVRFDSDVGEFRAVTELGRPDAEYWNSQKDILEQARAAVDTYCRHNYGVVESFTVQRRVQPKVTVYPSKTQPLQHHNLLVCSVSGFYPGSIEVRWFLNGQEEKAGMVSTGLIQNGDWTFQTLVMLETVPRSGEVYTCQVEHPSVTSPLTVEWRARSESAQSKMLSGVGGFVLGLLFLGAGLFIYFRNQKGHSGLQPTGFLS

SEQ ID NO: 10146 - protein, 365 aa, Homo sapiens
MGVPRPQPWALGLLLFLLPGSLGAESHLSLLYHLTAVSSPAPGTPAFWVSGWLGPQQYLSYNSLRGEAEPCGAWVWENQVSWYWEKETTDLRIKEKLFLEAFKALGGKGPYTLQGLLGCELGPDNTSVPTAKFALNGEEFMNFDLKQGTWGGDWPEALAISQRWQQQDKAANKELTFLLFSCPHRLREHLERGRGNLEWKEPPSMRLKARPSSPGFSVLTCSAFSFYPPELQLRFLRNGLAAGTGQGDFGPNSDGSFHASSSLTVKSGDEHHYCCIVQHAGLAQPLRVELESPAKSSVLVVGIVIGVLLLTAAAVGGALLWRRMRSGLPAPWISLRGDDTGVLLPTPGEAQDADLKDVNVIPATA

SEQ ID NO: 10147 - protein, 317 aa, Homo sapiens [sequence omitted]

SEQ ID NO: 10148 - protein, 234 aa, Homo sapiens
MGILSFLPVLATESDWADCKSPQPWGHMLLWTAVLFLAPVAGTPAAPPKAVLKLEPQWINVLQEDSVTLTCRGTHSPESDSIQWFHNGNLIPTHTQPSYRFKANNNDSGEYTCQTGQTSLSDPVHLTVLSEWLVLQTPHLEFQEGETIVLRCHSWKDKPLVKVTFFQNGKSKKFSRSDPNFSIPQANHSHSGDYHCTGNIGYTLYSSKPVTITVQGPRLRTAAKQSSLVGAEVP

SEQ ID NO: 10149 - protein, 291 aa, Homo sapiens
MGILSFLPVLATESDWADCKSPQPWGHMLLWTAVLFLAPVAGTPAAPPKAVLKLEPQWINVLQEDSVTLTCRGTHSPESDSIQWFHNGNLIPTHTQPSYRFKANNNDSGEYTCQTGQTSLSDPVHLTVLSEWLVLQTPHLEFQEGETIVLRCHSWKDKPLVKVTFFQNGKSKKFSRSDPNFSIPQANHSHSGDYHCTGNIGYTLYSSKPVTITVQAPSSSPMGIIVAVVTGIAVAAIVAAVVALIYCRKKRISANPTNPDEADKVGAENTITYSLLMHPDALEEPDDQNRI

SEQ ID NO: 10150 - protein, 267 aa, Homo sapiens
MGILSFLPVLATESDWADCKSPQPWGHMLLWTAVLFLAPVAGTPAAPPKAVLKLEPQWINVLQEDSVTLTCRGTHSPESDSIQWFHNGNLIPTHTQPSYRFKANNNDSGEYTCQTGQTSLSDPVHLTVLSEWLVLQTPHLEFQEGETIVLRCHSWKDKPLVKVTFFQNGKSKKFSRSDPNFSIPQANHSHSGDYHCTGNIGYTLYSSKPVTITVQAPSSSPMGIIVAVVTGIAVAAIVAAVVALIYCRKKRISATWTSNDCHQKETT

SEQ ID NO: 10151 - protein, 310 aa, Homo sapiens
MGILSFLPVLATESDWADCKSPQPWGHMLLWTAVLFLAPVAGTPAAPPKAVLKLEPQWINVLQEDSVTLTCRGTHSPESDSIQWFHNGNLIPTHTQPSYRFKANNNDSGEYTCQTGQTSLSDPVHLTVLSEWLVLQTPHLEFQEGETIVLRCHSWKDKPLVKVTFFQNGKSKKFSRSDPNFSIPQANHSHSGDYHCTGNIGYTLYSSKPVTITVQAPSSSPMGIIVAVVTGIAVAAIVAAVVALIYCRKKRISALPGYPECREMGETLPEKPANPTNPDEADKVGAENTITYSLLMHPDALEEPDDQNRI

SEQ ID NO: 10152 - protein, 276 aa, Homo sapiens
MGILSFLPVLATESDWADCKSPQPWGHMLLWTAVLFLAPVAGTPAAPPKAVLKLEPQWINVLQEDSVTLTCRGTHSPESDSIQWFHNGNLIPTHTQPSYRFKANNNDSGEYTCQTGQTSLSDPVHLTVLSEWLVLQTPHLEFQEGETIVLRCHSWKDKPLVKVTFFQNGKSKKFSRSDPNFSIPQANHSHSGDYHCTGNIGYTLYSSKPVTITVQAPSSSPMGIIVAVVTGIAVAAIVAAVVALIYCRKKRISANSTDPVKAAQFEMLSCSHLDVK

SEQ ID NO: 10153 - protein, 323 aa, Homo sapiens
MGILSFLPVLATESDWADCKSPQPWGHMLLWTAVLFLAPVAGTPAAPPKAVLKLEPQWINVLQEDSVTLTCRGTHSPESDSIQWFHNGNLIPTHTQPSYRFKANNNDSGEYTCQTGQTSLSDPVHLTVLSEWLVLQTPHLEFQEGETIVLRCHSWKDKPLVKVTFFQNGKSKKFSRSDPNFSIPQANHSHSGDYHCTGNIGYTLYSSKPVTITVQAPSSSPMGIIVAVVTGIAVAAIVAAVVALIYCRKKRISANSTDPVKAAQFEPPGRQMIAIRKRQPEETNNDYETADGGYMTLNPRAPTDDDKNIYLTLPPNDHVNSNN

SEQ ID NO: 10154 - protein, 303 aa, Homo sapiens
MGILSFLPVLATESDWADCKSPQPWGHMLLWTAVLFLAAPPKAVLKLEPQWINVLQEDSVTLTCRGTHSPESDSIQWFHNGNLIPTHTQPSYRFKANNNDSGEYTCQTGQTSLSDPVHLTVLSEWLVLQTPHLEFQEGETIVLRCHSWKDKPLVKVTFFQNGKSKKFSRSDPNFSIPQANHSHSGDYHCTGNIGYTLYSSKPVTITVQAPSSSPMGIIVAVVTGIAVAAIVAAVVALIYCRKKRISALPGYPECREMGETLPEKPANPTNPDEADKVGAENTITYSLLMHPDALEEPDDQNRI

SEQ ID NO: 10155 - protein, 348 aa, Homo sapiens
EELWSRPYLPGQSRHLLQLPRKQGQLRSLHLTCDSAPVGSQGTWSTSCRINHLIFRGGAQITFLATFDVSPKAVLGDRLLLTANVSSENNTPRTSKTTFQLELPVKYAVYTVVSSHEQFTKYLNFSESEEKESHVAMHRYQVNNLGQRDLPVSINFWVPVELNQEAVWMDVEVSHPQNPSLRCSSEKIAPPASDFLAHIQKNPVLDCSIAGCLRFRCDVPSFSVQEELDFTLKGNLSFGWVRQILQKKVSVVSVAEITFDTSVYSQLPGQEAFMRAQTTTVLEKYKVHNPTPLIVGSSIGGLLLLALITAVLYKVGFFKRQYKEMMEEANGQIAPENGTQTPSPPSEK

SEQ ID NO: 10156 - protein, 1163 aa, Homo sapiens
MTRTRAALLLFTALATSLGFNLDTEELTAFRVDSAGFGDSVVQYANSWVVVGAPQKITAANQTGGLYQCGYSTGACEPIGLQVPPEAVNMSLGLSLASTTSPSQLLACGPTVHHECGRNMYLTGLCFLLGPTQLTQRLPVSRQECPRQEQDIVFLIDGSGSISSRNFATMMNFVRAVISQFQRPSTQFSLMQFSNKFQTHFTFEEFRRTSNPLSLLASVHQLQGFTYTATAIQNVVHRLFHASYGARRDATKILIVITDGKKEGDSLDYKDVIPMADAAGIIRYAIGVGLAFQNRNSWKELNDIASKPSQEHIFKVEDFDALKDIQNQLKEKIFAIEGTETTSSSSFELEMAQEGFSAVFTPDGPVLGAVGSFTWSGGAFLYPPNMSPTFINMSQENVDMRDSYLGYSTELALWKGVQSLVLGAPRYQHTGKAVIFTQVSRQWRMKAEVTGTQIGSYFGASLCSVDVDTDGSTDLVLIGAPHYYEQTRGGQVSVCPLPRGWRRWWCDAVLYGEQGHPWGRFGAALTVLGDVNGDKLTDVVIGAPGEEENRGAVYLFHGVLGPSISPSHSQRIAGSQLSSRLQYFGQALSGGQDLTQDGLVDLAVGARGQVLLLRTRPVLWVGVSMQFIPAEIPRSAFECREQVVSEQTLVQSNICLYIDKRSKNLLGSRDLQSSVTLDLALDPGRLSPRATFQETKNRSLSRVRVLGLKAHCENFNLLLPSCVEDSVTPITLRLNFTLVGKPLLAFRNLRPMLAALAQRYFTASLPFEKNCGADHICQDNLGISFSFPGLKSLLVGSNLELNAEVMVWNDGEDSYGTTITFSHPAGLSYRYVAEGQKQGQLRSLHLTCDSAPVGSQGTWSTSCRINHLIFRGGAQITFLATFDVSPKAVLGDRLLLTANVSSENNTPRTSKTTFQLELPVKYAVYTVVSSHEQFTKYLNFSESEEKESHVAMHRYQVNNLGQRDLPVSINFWVPVELNQEAVWMDVEVSHPQNPSLRCSSEKIAPPASDFLAHIQKNPVLDCSIAGCLRFRCDVPSFSVQEELDFTLKGNLSFGWVRQILQKKVSVVSVAEITFDTSVYSQLPGQEAFMRAQTTTVLEKYKVHNPTPLIVGSSIGGLLLLALITAVLYKVGFFKRQYKEMMEEANGQIAPENGTQTPSPPSEK

SEQ ID NO: 10157 - protein, 1130 aa, Homo sapiens
MTRTRAALLLFTALATSLGFNLDTEELTAFRVDSAGFGDSVVQYANSWVVVGAPQKITAANQTGGLYQCGYSTGACEPIGLQVPPEAVNMSLGLSLASTTSPSQLLACGPTVHHECGRNMYLTGLCFLLGPTQLTQRLPVSRQECPRQEQDIVFLIDGSGSISSRNFATMMNFVRAVISQFQRPSTQFSLMQFSNKFQTHFTFEEFRRSSNPLSLLASVHQLQGFTYTATAIQNVVHRLFHASYGARRDAAKILIVITDGKKEGDSLDYKDVIPMADAAGIIRYAIGVGLAFQNRNSWKELNDIASKPSQEHIFKVEDFDALKDIQNQLKEKIFAIEGTETTSSSSFELEMAQEGFSAVFTPSQDGPVLGAVGSFTWSGGAFLYPPNMSPTFINMSQENVDMRDSYLGYSTELALWKGVQSLVLGAPRYQHTGKAVIFTQVSRQWRMKAEVTGTQIGSYFGASLCSVDVDSDGSTDLVLIGAPHYYEQTRGGQVSVCPLPRGVRRWWCDAVLYGEQGHPWGRFGAALTVLGDVNGDKLTDVVIGAPGEEENRGAVYLFHGVLGPSISPSHSQRIAGSQLSSRLQYFGQALSGGQDLTQDGLVDLAVGARGQVLLLRTRPVLWVGVSMQFIPAEIPRSAFECREQVVSEQTLVQSNICLYIDKRSKNLLGSRDLQSSVTLDLALDPGRLSPRATFQETKNRSLSRVRVLGLKAHCENFNLLLPSCVEDSVTPITLRLNFTLVGKPLLAFRNLRPMLAADAQRYFTASLPFEKNCGADHICQDNLGISFSFPGKQGQLRSLHLTCDSAPVGSQGTWSTSCRINHLIFRGGAQITFLATFDVSPKAVLGDRLLLTANVSSENNTPRTSKTTFQLELPVKYAVYTVVSSHEQFTKYLNFSESEEKESHVAMHRYQAVPSVQVNNLGQRDLPVSINFWVPVELNQEAVWMDVEVSHPQNPSLRCSSEKIAPPASDFLAHIQKNPVLDCSIAGCLRFRCDVPSFSVQEELDFTLKGNLSFGWVRQILQKKVSVVSVAEITFDTSVYSQLPGQEAFMRAQTTTVLEKYKVHNPTPLIVGSSIGGLLLLALITAVLYKVGFFKRQYKEMMEEANGQIAPENGTQTPSPPTPHYPQDNV

SEQ ID NO: 10158 - protein, 222 aa, Homo sapiens
MSGSSLPSALALSLLLVSGSLLPGPGAAQNEPRIVTSEEVIIRDSPVLPVTLQCNLTSSSHTLTYSYWTKNGVELSATRKNASNMEYRINKPRAEDSGEYHCVYHFVSAPKANATIEVKAAPDITGHKRSENKNEGQDATMYCKSVGYPHPDWIWRKKENGMPMDIVNTSGRFFIINKENYTELNIVNLQITEDPGEYEWCGATWPHSGLSWEFWLKLSSLW

SEQ ID NO: 10159 - protein, 677 aa, Homo sapiens
MPGFLVRILLLLLVLLLLGPTRGLRNATQRMFEIDYSRDSFLKDGQPFRYISGSIHYSRVPRFYWKDRLLKMKMAGLNAIQTYVPWNFHEPWPGQYQFSEDHDVEYFLRLAHELGLLVILRPGPYICAEWEMGGLPAWLLEKESILLRSSDPDYLAAVDKWLGVLLPKMKPLLYQNGGPVITVQVENEYGSYFACDFDYLRFLQKRFRHHLGDDVVLFTTDGAHKTFLKCGALQGLYTTVDFGTGSNITDAFLSQRKCEPKGPLINSEFYTGWLDHWGQPHSTIKTEAVASSLYDILARGASVNLYMFIGGTNFAYWNGANSPYAAQPTSYDYDAPLSEAGDLTEKYFALRNIIQKFEKVPEGPIPPSTPKFAYGKVTLEKLKTVGAALDILCPSGPIKSLYPLTFIQVKQHYGFVLYRTTLPQDCSNPAPLSSPLNGVHDRAYVAVDGIPQGVLERNNVITLNITGKAGATLDLLVENMGRVNYGAYINDFKGLVSNLTLSSNILTDWTIFPLDTEDAVRSHLGGWGHRDSGHHDEAWAHNSSNYTLPAFYMGNFSIPSGIPDLPQDTFIQFPGWTKGQVWINGFNLGRYWPARGPQLTLFVPQHILMTSAPNTITVLELEWAPCSSDDPELCAVTFVDRPVIGSSVTYDHPSKPVEKRLMPPPPQKNKDSWLDHV

SEQ ID NO: 10160 - protein, 685 aa, Homo sapiens
MDVCVRLALWLLWGLLLHQGQSLSHSHSEKATGTSSGANSEESTAAEFCRIDKPLCHSEDEKLSFEAVRNIHKLMDDDANGDVDVEESDEFLREDLNYHDPTVKHSTFHGEDKLISVEDLWKAWKSSEVYNWTVDEVVQWLITYVELPQYEETFRKLQLSGHAMPRLAVTNTTMTGTVLKMTDRSHRQKLQLKALDTVLFGPPLLTRHNHLKDFMLVVSIVIGVGGCWFAYIQNRYSKEHMKKMMKDLEGLHRAEQSLHDLQERLHKAQEEHRTVEVEKVHLEKKLRDEINLAKQEAQRLKELREGTENERSRQKYAEEELEQVREALRKAEKELESHSSWYAPEALQKWLQLTHEVEVQYYNIKKQNAEKQLLVAKEGAEKIKKKRNTLFGTFHVAHSSSLDDVDHKILTAKQALSEVTAALRERLHRWQQIEILCGFQIVNNPGIHSLVAALNIDPSWMGSTRPNPAHFIMTDDVDDMDEEIVSPLSMQSPSLQSSVRQRLTEPQHGLGSQRDLTHSDSESSLHMSDRQRVAPKPPQMSRAADEALNAMTSNGSHRLIEGVHPGSLVEKLPDSPALAKKALLALNHGLDKAHSLMELSPSAPPGGSPHLDSSRSHSPSSPDPDTPSPVGDSRALQASRNTRIPHLAGKKAVAEEDNGSIGEETDSSPGRKKFPLKIFKKPLKK

SEQ ID NO: 10161 - protein, 685 aa, Homo sapiens [sequence omitted]

SEQ ID NO: 10162 - protein, 269 aa, Homo sapiens
MAASAGAGAVIAAPDSRRWLWSVLAAALGLLTAGVSALEVYTPKEIFVANGTQGKLTCKFKSTSTTGGLTSVSWSFQPEGADTTVSFFHYSQGQVYLGNYPPFKDRISWAGDLDKKDASINIENMQFIHNGTYICDVKNPPDIVVQPGHIRLYVVEKENLPVFPVWVVVGIVTAVVLGLTLLISMILAVLYRRKNSKRDYTGCSTSESLSPVKQAPRKSPSDTEGLVKSLPSGSHQGPVIYAQLDHSGGHHSDKINKSESVVYADIRKN

SEQ ID NO: 10163 - protein, 191 aa, Homo sapiens [sequence omitted]

SEQ ID NO: 10164 - protein, 183 aa, Homo sapiens
PFSSVTAGVSALEVYTPKEIFVANGTQGKLTCKFKSTSTTGGLTSVSWSFQPEGADTTVSFFHYSQGQVYLGNYPPFKDRISWAGDLDKKDASINIENMQFIHNGTYICDVKNPPDIVVQPGHIRLYVVEKENLPVFPVWVVVGIVTAVVLGLTLLISMILAVLYRRKNSKRDYTGAQSYMHS

SEQ ID NO: 10165 - protein, 238 aa, Homo sapiens
METPAWPRVPRPETAVARTLLLGWVFAQVAGASGTTNTVAAYNLTWKSTNFKTILEWEPKPVNQVYTVQISTKSGDWKSKCFYTTDTECDLTDEIVKDVKQTYLARVFSYPAGNVESTGSAGEPLYENSPEFTPYLETNLGQPTIQSFEQVGTKVNVTVEDERTLVRRNNTFLSLRDVFGKDLIYTLYYWKSSSSGKKYSTSLELWYLWSSSLSSSWLYLYTSVERQEWGRAGRRTPH

SEQ ID NO: 10166 - protein, 295 aa, Homo sapiens
METPAWPRVPRPETAVARTLLLGWVFAQVAGASGTTNTVAAYNLTWKSTNFKTILEWEPKPVNQVYTVQISTKSGDWKSKCFYTTDTECDLTDEIVKDVKQTYLARVFSYPAGNVESTGSAGEPLYENSPEFTPYLETNLGQPTIQSFEQVGTKVNVTVEDERTLVRRNNTFLSLRDVFGKDLIYTLYYWKSSSSGKKTAKTNTNEFLIDVDKGENYCFSVQAVIPSRTVNRKSTDSPVECMGQEKGEFREIFYIIGAVVFVVIILVIILAISLHKCRKAGVGQSWKENSPLNVS

SEQ ID NO: 10167 - protein, 459 aa, Homo sapiens
MGAARGSPARPRRLPLLSVLLLPLLGGTQTAIVFIKQPSSQDALQGRRALLRCEVEAPGPVHVYWLLDGAPVQDTERRFAQGSSLSFAAVDRLQDSGTFQCVARDDVTGEEARSANASFNIKWIEAGPVVLKHPASEAEIQPQTQVTLRCHIDGHPRPTYQWFRDGTPLSDGQSNHTVSSKERNLTLRPAGPEHSGLYSCCAHSAFGQACSSQNFTLSIADESFARVVLAPQDVVVARYEEAMFHCQFSAQPPPSLQWLFEDETPITNRSRPPHLRRATVFANGSLLLTQVRPRNAGIYRCIGQGQRGPPIILEATLHLAEIEDMPLFEPRVFTAGSEERVTCLPPKGLPEPSVWWEHAGVRLPTHGRVYQKGHELVLANIAESDAGVYTCHAANLAGQRRQDVNITVASEHLCPEGQGEVEGNTGLGVMDRGFPGTHLRSSQFWALQAWESVHYWESV

SEQ ID NO: 10168 - protein, 1014 aa, Homo sapiens
MGAARGSPARPRRLPLLSVLLLPLLGGTQTAIVFIKQPSSQDALQGRRALLRCEVEAPGPVHVYWLLDGAPVQDTERRFAQGSSLSFAAVDRLQDSGTFQCVARDDVTGEEARSANASFNIKWIEAGPVVLKHPASEAEIQPQTQVTLRCHIDGHPRPTYQWFRDGTPLSDGQSNHTVSSKERNLTLRPAGPEHSGLYSCCAHSAFGQACSSQNFTLSIADESFARVVLAPQDVVVARYEEAMFHCQFSAQPPPSLQWLFEDETPITNRSRPPHLRRATVFANGSLLLTQVRPRNAGIYRCIGQGQRGPPIILEATLHLAEIEDMPLFEPRVFTAGSEERVTCLPPKGLPEPSVWWEHAGVRLPTHGRVYQKGHELVLANIAESDAGVYTCHAANLAGQRRQDVNITVATVPSWLKKPQDSQLEEGKPGYLDCLTQATPKPTVVWYRNQMLISEDSRFEVFKNGTLRINSVEVYDGTWYRCMSSTPAGSIEAQARVQVLEKLKFTPPPQPQQCMEFDKEATVPCSATGREKPTIKWERADGSSLPEWVTDNAGTLHFARVTRDDAGNYTCIASNGPQGQIRAHVQLTVAVFITFKVEPERTTVYQGHTALLQCEAQGDPKPLIQWKDKPVPEESEGPGSPPPYKMIQTIGLSVGAAVAYIIAVLGLMFYCKKRCKAKRLQKQPEGEEPEMECLNGGPLQNGQPSAEIQEEVALTSLGSGPAATNKRHSTSDKMHFPRSSLQPITTLGKSEFGEVFLAKAQGLEEGVAETLVLVKSLQSKDEQQQLDFRRELEMFGKLNHANVVRLLGLCREAEPHYMVLEYVDLGDLKQFLRISKSKDEKLKSQPLSTKQKVALCTQVALGMEHLSNNRFVHKDLAARNCLVSAQRQVKVSALGLSKDVYNSEYYHFRQAWVPLRWMSPEAILEGDFSTKSDVWAFGVLMWEVFTHGEMPHGGQADDEVLADLQAGKARLPQPEGCPSKLYRLMQRCWALSPKDRPSFSEIASALGDSTVDSKP

SEQ ID NO: 10169 - protein, 706 aa, Homo sapiens
MGDERPHYYGKHGTPQKYDPTFKGPIYNRGCTDIICCVFLLLAIVGYVAVGIIAWTHGDPRKVIYPTDSRGEFCGQKGTKNENKPYLFYFNIVKCASPLVLLEFQCPTPQICVEKCPDRYLTYLNARSSRDFEYYKQFCVPGFKNNKGVAEVLRDGDCPAVLIPSKPLARRCFPAIHAYKGVLMVGNETTYEDGHGSRKNITDLVEGAKKANGVLEARQLAMRIFEDYTVSWYWIIIGLVIAMAMSLLFIILLRFLAGIMVWVMIIMVILVLGYGIFHCYMEYSRLRGEAGSDVSLVDLGFQTDFRVYLHLRQTWLAFMIILSILEVIIILLLIFLRKRILIAIALIKEASRAVGYVMCSLLYPLVTFFLLCLCIAYWASTAVFLSTSNEAVYKIFDDSPCPFTAKTCNPETFPSSNESRQCPNARCQFAFYGGESGYHRALLGLQIFNAFMFFWLANFVLALGQVTLAGAFASYYWALRKPDDLPAFPLFSAFGRALRYHTGSLAFGALILAIVQIIRVILEYLDQRLKAAENKFAKCLMTCLKCCFWCLEKFIKFLNRNAYIMIAIYGTNFCTSARNAFFLLMRNIIRVAVLDKVTDFLFLLGKLLIVGSVGILAFFFFTHRIRIVQDTAPPLNYYWVPILTVIVGSYLIAHGFFSVYGMCVDTLFLCFLEDLERNDGSAERPYFMSSTLKKPLNKTNKKAAES

SEQ ID NO: 10170 - protein, 993 aa, Homo sapiens
MAAEWASRFWLWATLLIPAAAVYEDQVGKFDWRQQYVGKVKFASLEFSPGSKKLVVATEKNVIAALNSRTGEILWRHVDKGTAEGAVDAMLLHGQDVITVSNGGRIMRSWETNIGGLNWEITLDSGSFQALGLVGLQESVRYIAVLKKTTLALHHLSSGHLKWVEHLPESDSIHYQMVYSYGSGVVWALGVVPFSHVNIVKFNVEDGEIVQQVRVSTPWLQHLSGACGVVDEAVLVCPDPSSRSLQTLALETEWELRQIPLQSLDLEFGSGFQPRVLPTQPNPVDASRAQFFLHLSPSHYALLQYHYGTLSLLKNFPQTALVSFATTGEKTVAAVMACRNEVQKSSSSEDGSMGSFSEKSSSKDSLACFNQTYTINLYLVETGRRLLDTTITFSLEQSGTRPERLYIQVFLKKDDSVGYRALVQTEDHLLLFLQQLAGKVVLWSREESLAEVVCLEMVDLPLTGAQAELEGEFGKKADGLLGMFLKRLSSQLILLQAWTSHLWKMFYDARKPRSQIKNEINIDTLARDEFNLQKMMVMVTASGKLFGIESSSGTILWKQYLPNVKPDSSFKLMVQRTTAHFPHPPQCTLLVKDKESGMSSLYVFNPIFGKWSQVAPPVLKRPILQSLLLPVMDQDYAKVLLLIDDEYKVTAFPATRNVLRQLHELAPSIFFYLVDAEQGRLCGYRLRKDLTTELSWELTIPPEVQRIVKVKGKRSSEHVHSQGRVMGDRSVLYKSLNPNLLAVVTESTDAHHERTFIGIFLIDGVTGRIIHSSVQKKAKGPVHIVHSENWVVYQYWNTKARRNEFTVLELYEGTEQYNATAFSSLDRPQLPQVLQQSYIFPSSISAMEATITERGITSRHLLIGLPSGAILSLPKALLDPRRPEIPTEQSREENLIPYSPDVQIHAERFINYNQTVSRMRGIYTAPSGLESTCLVVAYGLDIYQTRVYPSKQFDVLKDDYDYVLISSVLFGLVFATMITKRLAQVKLLNRAWR

SEQ ID NO: 10171 - protein, 356 aa, Homo sapiens
MAAEGWIWRWGWGRRCLGRPGLLGPGPGPTTPLFLLLLLGSVTADITDGNSEHLKREHSLIKPYQGVGSSSMPLWDFQGSTMLTSQYVRLTPDERSKEGSIWNHQPCFLKDWEMHVHFKVHGTGKKNLHGDGIALWYTRDRLVPGPVFGSKDNFHGLAIFLDTYPNDETTERVFPYISVMVNNGSLSYDHSKDGRWTELAGCTADFRNRDHDTFLAVRYSRGRLTVMTDLEDKNEWKNCIDITGVRLPTGYYFGASAGTGDLSDNHDIISMKLFQLMVEHTPDEESIDWTKIEPSVNFLKSPKDNVDDPTGNFRSGPLTGWRVFLLLLCALLGIVVCAVVGAVVFQKRQERNKRFY

SEQ ID NO: 10172 - protein, 385 aa, Homo sapiens
MGLGPVFLLLAGIFPFAPPGAAAEPHSLRYNLTVLSWDGSVQSGFLAEVHLDGQPFLRYDRQKCRAKPQGQWAEDVLGNKTWDRETRDLTGNGKDLRMTLAHIKDQKEGLHSLQEIRVCEIHEDNSTRSSQHFYYDGELFLSQNVETEEWTVPQSSRAQTLAMNVRNFLKEDAMKTKTHYHAMHADCLQELRRYLESSVVLRRRVPPMVNVTRSEASEGNITVTCRASSFYPRNITLTWRQDGVSLSHDTQQWGDVLPDGNGTYQTWVATRICQGEEQRFTCYMEHSGNHSTHPVPSGKVLVLQSHWQTFHVSAVAAAAAAIFVIIIFYVRCCKKKTSAAEGPELVSLQVLDQHPVGTSDHRDATQLGFQPLMSALGSTGSTEGA

SEQ ID NO: 10173 - protein, 382 aa, Homo sapiens
MGLGPVFLLLAGIFPFAPPGAAAEPHSLRYNLTVLSWDGSVQSGFLAEVHLDGQPFLRYDRQKCRAKPQGQWAEDVLGNKTWDRETRDLTGNGKDLRMTLAHIKDQKEGLHSLQEIRVCEIHEDNSTRSSQHFYYDGELFLSQNLETEEWTVPQSSRAQTLAMNVRNFLKEDAMKTKTHYHAMHADCLQELRRYLESGVVLRRTVPPMVNVTRSEASEGNITVTCRASSFYPRNIILTWRQDGVSLSHDTQQWGDVLPDGNGTYQTWVATRICRGEEQRFTCYMEHSGNHSTHPVPSGKVLVLQSHWQTFHVSAVAAAAIFVIIIFYVRCCKKKTSAAEGPELVSLQVLDQHPVGTSDHRDATQLGFQPLMSALGSTGSTEG

SEQ ID NO: 10174 - protein, 383 aa, Homo sapiens
MGLGPVFLLLAGIFPFAPPGAAAEPHSLRYNLTVLSWDGSVQSGFLTEVHLDGQPFLRCDRQKCRAKPQGQWAEDVLGNKTWDRETRDLTGNGKDLRMTLAHIKDQKEGLHSLQEIRVCEIHEDNSTRSSQHFYYDGELFLSQNLETKEWTMPQSSRAQTLAMNVRNFLKEDAMKTKTHYHAMHADCLQELRRYLKSGVVLRRTVPPMVNVTRSEASEGNITVTCRASGFYPWNITLSWRQDGVSLSHDTQQWGDVLPDGNGTYQTWVATRICQGEEQRFTCYMEHSGNHSTHPVPSGKVLVLQSHWQTFHVSAVAAAAIFVIIIFYVRCCKKKTSAAEGPELVSLQVLDQHPVGTSDHRDATQLGFQPLMSDLGSTGSTEGA

SEQ ID NO: 10175 - protein, 687 aa, Homo sapiens
MAAAQEADGARSAVVAAGGGSSGQVTSNGSIGRDPPAETQPQNPPAQPAPNAWQVIKGVLFRIFIIWAISSWFRRGPAPQDQAGPGGAPRVASRNLFPKDTLMNLHVYISEHEHFTDFNATSALFWEQHDLVYGDWTSGENSDGCYEHFAELDIPQSVQQNGSIYIHVYFTKSGFHPDPRQKALYRRLATVHMSRMINKYKRRRFQKTKNLLTGETEADPEMIKRAEDYGPVEVISHWHPNITINIVDDHTPWVKGSVPPPLDQYVKFDAVSGDYYPIIYFNDYWNLQKDYYPINESLASLPLRVSFCPLSLWRWQLYAAQSTKSPWNFLGDELYEQSDEEQDSVKVALLETNPYLLALTIIVSIVHSVFEFLAFKNDIQFWNSRQSLEGLSVRSVFFGVFQSFVVLLYILDNETNFVVQVSVFIGVLIDLWKITKVMDVRLDREHRVAGIFPRLSFKDKSTYIESSTKVYDDMAFRYLSWILFPLLGCYAVYSLLYLEHKGWYSWVLSMLYGFLLTFGFITMTPQLFINYKLKSVAHLPWRMLTYKALNTFIDDLFAFVIKMPVMYRIGCLRDDVVFFIYLYQRWIYRVDPTRVNEFGMSGEDPTAAAPVAEVPTAAGALTPTPAPTTTTATREEASTSLPTKPTQGASSASEPRQGLFVEALSVPLSLCVSSHLALPAQHHWESW

SEQ ID NO: 10176 - protein, 669 aa, Homo sapiens
MAAAQEADGARSAVVAAGGGSSGQVTSNGSIGRDPPAETQPQNPPAQPAPNAWQVIKGVLFRIFIIWAISSWFRRGPAPQDQAGPGGAPRVASRNLFPKDTLMNLHVYISEHEHFTDFNATSALFWEQHDLVYGDWTSGENSDGCYEHFAELDIPQSVQQNGSIYIHVYFTKSGFHPDPRQKALYRRLATVHMSRMINKYKRRRFQKTKNLLTGETEADPEMIKRAEDYGPVEVISHWHPNITINIVDDHTPWVKGSVPPPLDQYVKFDAVSGDYYPIIYFNDYWNLQKDYYPINESLASLPLRVSFCPLSLWRWQLYAAQSTKSPWNFLGDELYEQSDEEQDSVKVALLETNPYLLALTIIVSIVHSVFEFLAFKNDIQFWNSRQSLEGLSVRSVFFGVFQSFVVLLYILDNETNFVVQVSVFIGVLIDLWKITKVMDVRLDREHRVAGIFPRLSFKDKSTYIESSTKVYDDMAFRYLSWILFPLLGCYAVYSLLYLEHKGWYSWVLSMLYGFLLTFGFITMTPQLFINYKLKSVAHLPWRMLTYKALNTFIDDLFAFVIKMPVMYRIGCLRDDVVFFIYLYQRWIYRVDPTRVNEFGMSGEDPTAAAPVAEVPTAAGALTPTPAPTTTTATREEASTSLPTKPTQGASSASEPQEAPPKPAEDKKKD

SEQ ID NO: 10177 - protein, 235 aa, Homo sapiens
MDPARPLGLSILLLFLTEAALGDAAQEPTGNNAEICLLPLDYGPCRALLLRYYYDRYTQSCRQFLYGGCEGNANNFYTWEACDDACWRIEKVPKVCRLQVSVDDQCEGSTEKYFFNLSSMTCEKFFSGGCHRNRIENRFPDEATCMGFCAPKKIPSFCYSPKDEGLCSANVTRYYFNPRYRTCDAFTYTGCGGNDNNFVSREDCKRACAKALKKKKKMPKLRFASRIRKIRKKQF

SEQ ID NO: 10178 - protein, 465 aa, Homo sapiens
  VARIANT 335, 442: Xaa = Any Amino Acid
MRLLAWLIFLANWGGARAEPGKFWHIADLHLDPDYKVSKDPFQVCPSAGSQPVPDAGPWGDYLCDSPWALINSSIYAMKEIEPEPDFILWTGDDTPHVPDEKLGEAAVLEIVERLTKLIREVFPDTKVYAALGNHDFHPKNQFPAGSNNIYNQIAELWKPWLSNESIALFKKGAFYCEKLPGPSGAGRIVVLNTNLYYTSNALTADMADPGQQFQWLEDVLTDASKAGDMVYIVGHVPPGFFEKTQNKAWFREGFNEKYLKVVRKHHRVIAGQFFGHHHTDSFRMLYDDAGVPISAMFITPGVTPWKTTLPGVVNGANNPAIRVFEYDRATLSLXDMVTYFMNLSQANAQGTPRWELEYQLTEAYGVPDASAHSIDTVLDRIAGDQSTLQRYYVYNSVSYSAGVCDEACSMQHVCAMRQVDIDAYTTCLYASGTTPVPQLPXLLMALLGLCTTRAVTCQAHHSSW

SEQ ID NO: 10179 - protein, 738 aa, Homo sapiens
MTSSGPGPRFLLLLPLLLPPAASASDRPRGRDPVNPEKLLVITVATAETEGYLRFLRSAEFFNYTVRTLGLGEEWRGGDVARTVGGGQKVRWLKKEMEKYADREDMIIMFVDSYDVILAGSPTELLKKFVQSGSRLLFSAESFCWPEWGLAEQYPEVGTGKRFLNSGGFIGFATTIHQIVRQWKYKDDDDDQLFYTRLYLDPGLREKLSLNLDHKSRIFQNLNGALDEVVLKFDRNRVRIRNVAYDTLPIVVHGNGPTKLQLNYLGNYVPNGWTPEGGCGFCNQDRRTLPGGQPPPRVFLAVFVEQPTPFLPRFLQRLLLLDYPPDRVTLFLHNNEVFHEPHIADSWPQLQDHFSAVKLVGPEEALSPGEARDMAMDLCRQDPECEFYFSLDADAVLTNLQTLRILIEENRKVIAPMLSRHGKLWSNFWGALSPDEYYARSEDYVELVQRKRVGVWNVPYISQAYVIRGDTLRMELPQRDVFSGSDTDPDMAFCKSFRDKGIFLHLSNQHEFGRLLATSRYDTEHLHPDLWQIFDNPVDWKEQYIHENYSRALEGEGIVEQPCPDVYWFPLLSEQMCDELVAEMEHYGQWSGGRHEDSRLAGGYENVPTVDIHMKQVGYEDQWLQLLRTYVGPMTESLFPGYHTKARAVMNFVVRYRPDEQPSLRPHHDSSTFTLNVALNHKGLDYEGGGCRFLRYDCVISSPRKGWALLHPGRLTHYHEGLPTTWGTRYIMVSFVDP

SEQ ID NO: 10180 - protein, 737 aa, Homo sapiens
MGGCTVKPQLLLLALVLHPWNPCLGADSEKPSSIPTDKLLVITVATKESDGFHRFMQSAKYFNYTVKVLGQGEEWRGGDGINSIGGGQKVRLMKEVMEHYADQDDLVVMFTECFDVIFAGGPEEVLKKFQKANHKVVFAADGILWPDKRLADKYPVVHIGKRYLNSGGFIGYAPYVNRIVQQWNLQDNDDDQLFYTKVYIDPLKREAINITLDHKCKIFQTLNGAVDEVVLKFENGKARAKNTFYETLPVAINGNGPTKILLNYFGNYVPNSWTQDNGCTLCEFDTVDLSAVDVHPNVSIGVFIEQPTPFLPRFLDILLTLDYPKEALKLFIHNKEVYHEKDIKVFFDKAKHEIKTIKIVGPEENLSQAEARNMGMDFCRQDEKCDYYFSVDADVVLTNPRTLKILIEQNRKIIAPLVTRHGKLWSNFWGALSPDGYYARSEDYVDIVQGNRVGVWNVPYMANVYLIKGKTLRSEMNERNYFVRDKLDPDMALCRNAREMGVFMYISNRHEFGRLLSTANYNTSHYNNDLWQIFENPVDWKEKYINRDYSKIFTENIVEQPCPDVFWFPIFSEKACDELVEEMEHYGKWSGGKHHDSRISGGYENVPTDDIHMKQVDLENVWLDFIREFIAPVTLKVFAGYYTKGFALLNFVVKYSPERQRSLRPHHDASTFTINIALNNVGEDFQGGGCKFLRYNCSIESPRKGWSFMHPGRLTHLHEGLPVKNGTRYIAVSFIDP

SEQ ID NO: 10181 - protein, 758 aa, Homo sapiens
MGGCTVKPQLLLLALVLHPWNPCLGADSEKPSSIPTDKLLVITVATKESDGFHRFMQSAKYFNYTVKVLGQGEEWRGGDGINSIGGGQKVRLMKEVMEHYADQDDLVVMFTECFDVIFAGGPEEVLKKFQKANHKVVFAADGILWPDKRLADKYPVVHIGKRYLNSGGFIGYAPYVNRIVQQWNLQDNDDDQLFYTKVYIDPLKREAINITLDHKCKIFQTLNGAVDEVVLKFENGKARAKNTFYETLPVAINGNGPTKILLNYFGNYVPNSWTQDNGCTLCEFDTVDLSAVDVHPNVSIGVFIEQPTPFLPRFLDILLTLDYPKEALKLFIHNKEVYHEKDIKVFFDKAKHEIKTIKIVGPEENLSQAEARNMGMDFCRQDEKCDYYFSVDADVVLTNPRTLKILIEQNRKIIAPLVTRHGKLWSNFWGALSPDGYYARSEDYVDIVQGNRVGVWNVPYMANVYLIKGKTLRSEMNERNYFVRDKLDPDMALCRNAREMTLQREKDSPTPETFQMLSPPKGVFMYISNRHEFGRLLSTANYNTSHYNNDLWQIFENPVDWKEKYINRDYSKIFTENIVEQPCPDVFWFPIFSEKACDELVEEMEHYGKWSGGKHHDSRISGGYENVPTDDIHMKQVDLENVWLHFIREFIAPVTLKVFAGYYTKGFALLNFVVKYSPERQRSLRPHHDASTFTINIALNNVGEDFQGGGCKFLRYNCSIESPRKGWSFMHPGRLTHLHEGLPVKNGTRYIAVSFIDP

SEQ ID NO: 10182 - protein, 1163 aa, Homo sapiens [sequence omitted]

SEQ ID NO: 10183 - protein, 1466 aa, Homo sapiens
MMSFVQKGSWLLLALLHPTIILAQQEAVEGGCSHLGQSYADRDVWKPEPCQICVCDSGSVLCDDIICDDQELDCPNPEIPFGECCAVCPQPPTAPTRPPNGQGPQGPKGDPGPPGIPGRNGDPGIPGQPGSPGSPGPPGICESCPTGPQNYSPQYDSYDVKSGVAVGGLAGYPGPAGPPGPPGPPGTSGHPGSPGSPGYQGPPGEPGQAGPSGPPGPPGAIGPSGPAGKDGESGRPGRPGERGLPGPPGIKGPAGIPGFPGMKGHRGFDGRNGEKGETGAPGLKGENGLPGENGAPGPMGPRGAPGERGRPGLPGAAGARGNDGARGSDGQPGPPGPPGTAGFPGSPGAKGEVGPAGSPGSNGAPGQRGEPGPQGHAGAQGPPGPPGINGSPGGKGEMGPAGIPGAPGLMGARGPPGPAGANGAPGLRGGAGEPGKNGAKGEPGPRGERGEAGIPGVPGAKGEDGKDGSPGEPGANGLPGAAGERGAPGFRGPAGPNGIPGEKGPAGERGAPGPAGPRGAAGEPGRDGVPGGPGMRGMPGSPGGPGSDGKPGPPGSQGESGRPGPPGPSGPRGQPGVMGFPGPKGNDGAPGKNGERGGPGGPGPQGPPGKNGETGPQGPPGPTGPGGDKGDTGPPGPQGLQGLPGTGGPPGENGKPGEPGPKGDAGAPGAPGGKGDAGAPGERGPPGLAGAPGLRGGAGPPGPEGGKGAAGPPGPPGAAGTPGLQGMPGERGGLGSPGPKGDKGEPGGPGADGVPGKDGPRGPTGPIGPPGPAGQPGDKGEGGAPGLPGIAGPRGSPGERGETGPPGPAGFPGAPGQNGEPGGKGERGAPGEKGEGGPPGVAGPPGGSGPAGPPGPQGVKGERGSPGGPGAAGFPGARGLPGPPGSNGNPGPPGPSGSPGKDGPPGPAGNTGAPGSPGVSGPKGDAGQPGEKGSPGAQGPPGAPGPLGIAGITGARGLAGPPGMPGPRGSPGPQGVKGESGKPGANGLSGERGPPGPQGLPGLAGTAGEPGRDGNPGSDGLPGRDGSPGGKGDRGENGSPGAPGAPGHPGPPGPVGPAGKSGDRGESGPAGPAGAPGPAGSRGAPGPQGPRGDKGETGERGAAGIKGHRGFPGNPGAPGSPGPAGQQGAIGSPGPAGPRGPVGPSGPPGKDGTSGHPGPIGPPGPRGNRGERGSEGSPGHPGQPGPPGPPGAPGPCCGGVGAAAIAGIGGEKAGGFAPYYGDEPMDFKINTDEIMTSLKSVNGQIESLISPDGSRKNPARNCRDLKFCHPELKSGEYWVDPNQGCKLDAIKVFCNMETGETCISANPLNVPRKHWWTDSSAEKKHVWFGESMDGGFQFSYGNPELPEDVLDVQLAFLRLLSSRASQNITYHCKNSIAYMDQASGNVKKALKLMGSNEGEFKAEGNSKFTYTVLEDGCTKHTGEWSKTVFEYRTRKAVRLPIVDIAPYDIGGPDQEFGVDVGPVCFL

SEQ ID NO: 10184 - protein, 694 aa, Homo sapiens
MRQSLLFLTSVVPFVLAPRPPDDPGFGPHQRLEKLDSLLSDYDILSLSNIQQHSVRKRDLQTSTHVETLLTFSALKRHFKLYLTSSTERFSQNFKVVVVDGKNESEYTVKWQDFFTGHVVGEPDSRVLAHIRDDDVIIRINTDGAEYNIEPLWRFVNDTKDKRMLVYKSEDIKNVSRLQSPKVCGYLKVDNEELLPKGLVDREPPEELVHRVKRRADPDPMKNTCKLLVVADHRFYRYMGRGEESTTTNYLIELIDRVDDIYRNTSWDNAGFKGYGIQIEQIRILKSPQEVKPGEKHYNMAKSYPNEEKDAWDVKMLLEQFSFDIAEEASKVCLAHLFTYQDFDMGTLGLAYVGSPRANSHGGVCPKAYYSPVGKKNIYLNSGLTSTKNYGKTILTKEADLVTTHELGHNFGAEHDPDGLAECAPNEDQGGKYVMYPIAVSGDHENNKMFSNCSKQSIYKTIESKAQECFQERSNKVCGNSRVDEGEECDPGIMYLNNDTCCNSDCTLKEGVQCSDRNSPCCKNCQFETAQKKCQEAINATCKGVSYCTGNSSECPPPGNAEDDTVCLDLGKCKDGKCIPFCEREQQLESCACNETDNSCKVCCRDLSGRCVPYVDAEQKNLFLRKGKPCTVGFCDMNGKCEKRVQDVIERFWDFIDQLSINTFGKFLADNIVGSVLVFSLIFWIPFSILVHCV

SEQ ID NO: 10185 - protein, 824 aa, Homo sapiens
MRQSLLFLTSVVPFVLAPRPPDDPGFGPHQRLEKLDSLLSDYDILSLSNIQQHSVRKRDLQTSTHVETLLTFSALKRHFKLYLTSSTERFSQNFKVVVVDGKNESEYTVKWQDFFTGHVVGEPDSRVLAHIRDDDVIIRINTDGAEYNIEPLWRFVNDTKDKRMLVYKSEDIKNVSRLQSPKVCGYLKVDNEELLPKGLVDREPPEELVHRVKRRADPDPMKNTCKLLVVADHRFYRYMGRGEESTTTNYLIELIDRVDDIYRNTSWDNAGFKGYGIQIEQIRILKSPQEVKPGEKHYNMAKSYPNEEKDAWDVKMLLEQFSFDIAEEASKVCLAHLFTYQDFDMGTLGLAYVGSPRANSHGGVCPKAYYSPVGKKNIYLNSGLTSTKNYGKTILTKEADLVTTHELGHNFGAEHDPDGLAECAPNEDQGGKYVMYPIAVSGDHENNKMFSNCSKQSIYKTIESKAQECFQERSNKVCGNSRVDEGEECDPGIMYLNNDTCCNSDCTLKEGVQCSDRNSPCCKNCQFETAQKKCQEAINATCKGVSYCTGNSSECPPPGNAEDDTVCLDLGKCKDGKCIPFCEREQQLESCACNETDNSCKVCCRDLSGRCVPYVDAEQKNLFLRKGKPCTVGFCDMNGKCEKRVQDVIERFWDFIDQLSINTFGKFLADNIVGSVLVFSLIFWIPFSILVHCVDKKLDKQYESLSLFHPSNVEMLSSMDSASVRIIKPFPAPQTPGRLQPAPVIPSAPAAPKLDHQRMDTIQEDPSTDSHMDEDGFEKDPFPNSSTAAKSFEDLTDHPVTRSEKAASFKLQRQNRVDSKETEC

SEQ ID NO: 10186 - protein, 284 aa, Homo sapiens
MVPIPAGVFTMGTDDPQIKQDGEAPARRVTIDALYMDAYEVSNTEFEKFVNSTGYLTEAEKFGDSFVFEGMLSEQVKTNIQQAVAAAPWWLPVKGANWRHPEGPDSTILHRPDHPVLHVSWNDAVAYCTWAGKRLPTEAEWEYSCRGGLHNRLFPWGNKLQPKGQHYANIWQGEFPVTNTGEDGFQGTAPVDAFPPNGYGLYNIVGNAWEWTSDWWTVHHSVEETLNPKGPPSGKDRVKKGGSYMCHRSYCYRYRCAARSQNTPDSSASNLGFRCAADRLPTMD

SEQ ID NO: 10187 - protein, 374 aa, Homo sapiens
MAAPALGLVCGRCPELGLVLLLLLLSLLCGAAGSQEAGTGAGAGSLAGSCGCGTPQRPGAHGSSAAAHRYSREANAPGPVPGERQLAHSKMVPIPAGVFTMGTDDPQIKQDGEAPARRVTIDALYMDAYEVSNTEFEKFVNSTGYLTEAEKFGDSFVFEGMLSEQVKTNIQQAVAAAPWWLPVKGANWRHPEGPDSTILHRPDHPVLHVSWNDAVAYCTWAGKRLPTEAEWEYSCRGGLHNRLFPWGNKLQPKGQHYANIWQGEFPVTNTGEDGFQGTAPVDAFPPNGYGLYNIVGNAWEWTSDWWTVHHSVEETLNPKGPPSGKDRVKKGGSYMCHRSYCYRYRCAARSQNTPDSSASNLGFRCAADRLPTMD

SEQ ID NO: 10188 - protein, 420 aa, Homo sapiens
MPGGCSRGPAAGDGRLRLARLALVLLGWVSSSSPTSSASSFSSSAPFLASAVSAQPPLPDQCPALCECSEAARTVKCVNRNLTEVPTDLPAYVRNLFLTGNQLAVLPAGAFARRPPLAELAALNLSGSRLDEVRAGAFEHLPSLRQLDLSHNPLADLSPFAFSGSNASVSAPSPLVELILNHIVPPEDERQNRSFEGMVVAALLAGRALQGLRRLELASNHFLYLPRDVLAQLPSLRHLDLSNNSLVSLTYVSFRNLTHLESLHLEDNALKVLHNGTLAELQGLPHIRVFLDNNPWVCDCHMADMVTWLKETEVVQGKDRLTCAYPEKMRNRVLLELNSADLDCDPILPPSLQTSYVFLGIVLALIGAIFLLVLYLNRKGIKKWMHNIRDACRDHMEGYHYRYEINADPRLTNLSSNSDV

SEQ ID NO: 10189 - protein, 162 aa, Homo sapiens [sequence omitted]

SEQ ID NO: 10190 - protein, 554 aa, Homo sapiens
AAAGAAATHLEVARGKRAALFFAAVAIVLGLPLWWKTTETYRASLPYSQISGLNALQLRLMVPVTVVFTRESVPLDDQEKLPFTVVHEREIPLKYKMKIKCRFQKAYRRALDHEEEALSSGSVQEAEAMLDEPQEQAEGSLTVYVISEHSSLLPQDMMSYIGPKRTAVVRGIMHREAFNIIGRRIVQVAQAMSLTEDVLAAALADHLPEDKWSAEKRRPLKSSLGYEITFSLLNPDPKSHDVYWDIEGAVRRYVQPFLNALGAAGNFSVDSQILYYAMLGVNPRFDSASSSYYLDMHSLPHVINPVESRLGSSAASLYPVLNFLLYVPELAHSPLYIQDKDGAPVATNAFHSPRWGGIMVYNVDSKTYNASVLPVRVEVDMVRVMEVFLAQLRLLFGIAQPQLPPKCLLSGPTSEGLMTWELDRLLWARSVENLATATTTLTSLAQLLGKISNIVIKDDVASEVYKAVAAVQKSAEELASGHLASAFVASQEAVTSSELAFFDPSLLHLLYFPDDQKFAIYIPLFLPMAVPILLSLVKIFLETRKSWRKPEKTD

SEQ ID NO: 10191 - protein, 278 aa, Homo sapiens
MLRSLLLHSLRLCAQTASCLVLFPRFLGTAFMLWLLDFLCIRKHFLGRRRRGQPEPEVELNSEGEEVPPDDPPICVSDDNRLCTLASLKAVWHGQKLDFFKQAHEGGPAPNSEVVLPDGFQSQHILDYAQGNRPLVLNFGSCTCPPFMARMSAFQRLVTKYQRDVDFLIIYIEEAHPSDGWVTTDSPYIIPQHRSLEDRVSAARVLQQGAPGCALVLDTMANSSSSAYGAYFERLYVIQSGTIMYQGGRGPDGYQVSELRTWLERYDEQLHGARPRRV

SEQ ID NO: 10192 - protein, 263 aa, Homo sapiens
MDNSWRLGPAIGLSAGQSQLLVSLLLLLTRVQPGTDVAAPEHISYVPQLSNDTLAGRLTLSTFTLEQPLGQFSSHNISDLDTIWLVVALSNATQSFTAPRTNQDIPAPANFSQRGYYLTLRANRVLYQTRGQLHVLRVGNDTHCQPTKIGCNHPLPGPGPYRVKFLVMNDEGPVAETKWSSDTRLQQAQALRAVPGPQSPGTVVIIAILSILLAVLLTVLLAVLIYTCFNSCRSTSLSGPEEAGSVRRYTTHLAFSTPAEGAS

SEQ ID NO: 10193 - protein, 891 aa, Homo sapiens
MFCAAVLENLGQTIVPDLGSLESQHDFRTPEFEEFNGKPDSLFFNDGQRRIDFVLVYEDESRKETNKKGTNEKQRRKRQAYESNLICHGLQLEATRSVLDDKLVFVKVHAPWEVLCTYAEIMHIKLPLKPNDLKNRSSAFGTLNWFTKVLSVDESIIKPEQEFFTAPFEKNRMNDFYIVDRDAFFNPATRSRIVYFILSRVKYQVINNVSKFGINRLVNSGIYKAAFPLHDCKFRRQSEDPSCPNERYLLYREWAHPRSIYKKQPLDLIRKYYGEKIGIYFAWLGYYTQMLLLAAVVGVACFLYGYLNQDNCTWSKEVCHPDIGGKIIMCPQCDRLCPFWKLNITCESSKKLCIFDSFGTLVFAVFMGVWVTLFLEFWKRRQAELEYEWDTVELQQEEQARPEYEARCTHVVINEITQEEERIPFTAWGKCIRITLCASAVFFWILLIIASVIGIIVYRLSVFIVFSAKLPKNINGTDPIQKYLTPQTATSITASIISFIIIMILNTIYEKVAIMITNFVPRTQTDYENSLTMKMFLFQFVNYYSSCFYIAFFKGKFVGYPGDPVYWLGKYRNEECDPGGCLLELTTQLTIIMGGKAIWNNIQEVLLPWIMNLIGRFHRVSGSEKITPRWEQDYHLQPMGKLGLFYEYLEMIIQFGFVTLFVASFPLAPLLALVNNILEIRVDAWKLTTQFRRLVPEKAQDIGAWQPIMQGIAILAVVTNAMIIAFTSDMIPRLVYYWSFSVPPYGDHTSYTMEGYINNTLSIFKVADFKNKSKGNPYSDLGNHTTCRYRDFRYPPGHPQEYKHNIYYWHVIAAKLAFIIVMEHVIYSVKFFISYAIPDVSKRTKSKIQREKYLTQKLLHENHLKDMTKNMGVIAERMIEAVDNNLRPKSE

SEQ ID NO: 10194 - protein, 574 aa, Homo sapiens
MCPRAARAPATLLLALGAVLWPAAGAWELTILHTNDVHSRLEQTSEDSSKCVNASRCMGGVARLFTKVQQIRRAEPNVLLLDAGDQYQGTIWFTVYKGAEVAHFMNALRYDAMALGNHEFDNGVEGLIEPLLKEAKFPILSANIKAKGPLASQISGLYLPYKVLPVGDEVVGIVGYTSKETPFLSNPGTNLVFEDEITALQPEVDKLKTLNVNKIIALGHSGFEMDKLIAQKVRGVDVVVGGHSNTFLYTGNPPSKEVPAGKYPFIVTSDDGRKVPVVQAYAFGKYLGYLKIEFDERGNVISSHGNPILLNSSIPEDPSIKADINKWRIKLDNYSTQELGKTIVYLDGSSQSCRFRECNMGNLICDAMINNNLRHTDEMFWNHVSMCILNGGGIRSPIDERNNGTITWENLAAVLPFGGTFDLVQLKGSTLKKAFEHSVHRYGQSTGEFLQVGGIHVVYDLSRKPGDRVVKLDVLCTKCRVPSYDPLKMDEVYKVILPNFLANGGDGFQMIKDELLRHDSGDQDINVVSTYISKMKVIYPAVEGRIKFSTGSHCHGSFSLIFLSLWAVIFVLYQ

SEQ ID NO: 10195 - protein, 277 aa, Homo sapiens
MVRLPLQCVLWGCLLTAVHPEPPTACREKQYLINSQCCSLCQPGQKLVSDCTEFTETECLPCGESEFLDTWNRETHCHQHKYCDPNLGLRVQQKGTSETDTICTCEEGWHCTSEACESCVLHRSCSPGFGVKQIATGVSDTICEPCPVGFFSNVSSAFEKCHPWTSCETKDLVVQQAGTNKTDVVCGPQDRLRALVVIPIIFGILFAILLVLVFIKKVAKKPTNKAPHPKQEPQEINFPDDLPGSNTAAPVQETLHGCQPVTQEDGKESRISVQERQ

SEQ ID NO: 10196 - protein, 287 aa, Homo sapiens
MGGRVFLAFCVWLTLPGAETQDSRGCARWCPQDSSCVNATACRCNPGFSSFSEIITTPDINECATLSKVSCGKFSDCWNTEGSYDCVCSPGYEPVSGAKTFKNESENTCQDVDECQQNPRLCKSYGTCVNTLGSYTCQCLPGFKDVNECTSGQNPCHSSTHCLNNVGSYQCRCRPGWQPIPGSPNGPNNTVCEDVDECSSGQHQCDSSTVCFNTVGSYSCRCRPGWKPRHGIPNNQKDTVCEDMTFSTWTPPPGVHSQTLSRFFDKVQDLGRDHLSSFAVLMAHYDV

SEQ ID NO: 10197 - protein, 239 aa, Homo sapiens [sequence omitted]

SEQ ID NO: 10198 - protein, 812 aa, Homo sapiens
MGGRVFLVFLAFCVWLTLPGAETQDSRGCARWCPQDSSCVNATACRCNPGFSSFSEIITTPMETCDDINECATLSKVSCGKFSDCWNTEGSYDCVCSPGYEPVSGAKTFKNESENTCQDVDECQQNPRLCKSYGTCVNTLGSYTCQCLPGFKLKPEDPKLCTDVNECTSGQNPCHSSTHCLNNVGSYQCRCRPGWQPIPGSPNGPNNTVCEDVDECSSGQHQCDSSTVCFNTVGSYSCRCRPGWKPRHGIPNNQKDTVCEDMTFSTWTPPPGVHSQTLSRFFDKVQDLGRDYKPGLANNTIQSILQALDELLEAPGDLETLPRLQQHCVASHLLDGLEDVLRGLSKNLSNGLLNFSYPAGTELSLEVQKQVDRSVTLRQNQAVMQLDWNQAQKSGDPGMGKLLAEAPLVLEPEKQMLLHETHQGLLQDGSPILLSDVISAFLSNNDTQNLSSPVTFTFSHRSVIPRQKVLCVFWEHGQNGCGHWATTGCSTIGTRDTSTICRCTHLSSFAVLMAHYDVQEEDPVLTVITYMGLSVSLLCLLLAALTFLLCKAIQNTSTSLHLQLSLCLFLAHLLFLVAIDQTGHKVLCSIIAGTLHYLYLATLTWMLLEALYLFLTARNLTVVNYSSINRFMKKLMFPVGYGVPAVTVAISAASRPHLYGTPSRCWLQPEKGFIWGFLGPVCAIFSVNLVLFLVTLWILKNRLSSLNSEVSTLRNTRMLAFKATAQLFILGCTWCLGILQVGPAARVMAYLFTIINSLQGVFIFLVYCLLSQQVREQYGKWSKGIRKLKTESEMHTLSSSAKADTSKPSTVN

SEQ ID NO: 10199 - protein, 837 aa, Homo sapiens
MVGACSPSYLGAFCVWLTLPGAETQDSRGCARWCPQDSSCVNATACRCNPGFSSFSEIITTPMETCDDINECATLSKVSCGKFSDCWNTEGSYDCVCSPGYEPVSGAKTFKNESENTCQDVDECQQNPRLCKSYGTCVNTLGSYTCQCLPGFKLKPEDPKLCTDVNECTSGQNPCHSSTHCLNNVGSYQCRCRPGWQPIPGSPNGPNNTVCEDVDECSSGQHQCDSSTVCFNTVGSYSCRCRPGWKPRHGIPNNQKDTVCEDMTFSTWTPPPGVHSQTLSRFFDKVQDLGRDYKPGLANNTIQSILQALDELLEAPGDLETLPRLQQHCVASHLLDGLEDVLRGLSKNLSNGLLNFSYPAGTELSLEVQKQVDRSVTLRQNQAVMQLDWNQAQKSGDPGPSVVGLVSIPGMGKLLAEAPLVLEPEKQMLLHETHQGLLQDGSPILLSDVISAFLSNNDTQNLSSPVTFTFSHRSVIPRQKVLCVFWEHGQNGCGHWATTGCSTIGTRDTSTICRCTHLSSFAVLMAHYDVQEEDPVLTVITYMGLSVSLLCLLLAALTFLLCKAIQNTSTSLHLQLSLCLFLAHLLFLVAIDQTGHKVLCSIIAGTLHYLYLATLTWMLLEALYLFLTARNLTVVNYSSINRFMKKLMFPVGYGVPAVTVAISAASRPHLYGTPSRCWLQPEKGFIWGFLGPVCAIFSVNLVLFLVTLWILKNRLSSLNSEVSTLRNTRMLAFKATAQLFILGCTWCLGILQVGPAARVMAYLFTIINSLQGVFIFLVYCLLSQQVREQYGKWSKGIRKLKTESEMHTLSSSAKADTSKPSTVRSRIAPEHFTNRPT

SEQ ID NO: 10200 - protein, 763 aa, Homo sapiens
MGGRVFLVFLAFCVWLTLPGAETQDSRGCARWCPQDSSCVNATACRCNPGFSSFSEIITTPMETCDDINECATLSKVSCGKFSDCWNTEGSYDCVCSPGYEPVSGAKTFKNESENTCQDVDECQQNPRLCKSYGTCVNTLGSYTCQCLPGFKLKPEDPKLCTDVDECSSGQHQCDSSTVCFNTVGSYSCRCRPGWKPRHGIPNNQKDTVCEDMTFSTWTPPPGVHSQTLSRFFDKVQDLGRDYKPGLANNTIQSILQALDELLEAPGDLETLPRLQQHCVASHLLDGLEDVLRGLSKNLSNGLLNFSYPAGTELSLEVQKQVDRSVTLRQNQAVMQLDWNQAQKSGDPGMGKLLAEAPLVLEPEKQMLLHETHQGLLQDGSPILLSDVISAFLSNNDTQNLSSPVTFTFSHRSVIPRQKVLCVFWEHGQNGCGHWATTGCSTIGTRDTSTICRCTHLSSFAVLMAHYDVQEEDPVLTVITYMGLSVSLLCLLLAALTFLLCKAIQNTSTSLHLQLSLCLFLAHLLFLVAIDQTGHKVLCSIIAGTLHYLYLATLTWMLLEALYLFLTARNLTVVNYSSINRFMKKLMFPVGYGVPAVTVAISAASRPHLYGTPSRCWLQPEKGFIWGFLGPVCAIFSVNLVLFLVTLWILKNRLSSLNSEVSTLRNTRMLAFKATAQLFILGCTWCLGILQVGPAARVMAYLFTIINSLQGVFIFLVYCLLSQQVREQYGKWSKGIRKLKTESEMHTLSSSAKADTSKPSTVN

SEQ ID NO: 10201 - protein, 715 aa, Homo sapiens
LRRRDSPVPLTLSPAAPAGSSAGTMGGRVFLVFLAFCVWLTLPGAETQDSRGCARWCPQDSSCVNATACRCNPGFSSFSEIITTPMETCDDINECATLSKVSCGKFSDCWNTEGSYDCVCSPGYEPVSGAKTFKNESENTCQDVDECQQNPRLCKSYGTCVNTLGSYTCQCLPGFKLKPEDPKLCTDVNECTSGQNPCHSSTHCLNNVGSYQCRCRPGWQPIPGSPNGPNNTVCEDVDECSSGQHQCDSSTVCFNTVGSYSCRCRPGWKPRHGIPNNQKDTVCEDMTFSTWTPPPGVHSQTLSRFFDKVQDLGRDYKPGLANNTIQSILQALDELLEAPGDLETLPRLQQHCVASHLLDGLEDVLRGLSKNLSNGLLNFSYPAGTELSLEVQKQVDRSVTLRQNQAVMQLDWNQAQKSGDPEEEDPVLTVITYMGLSVSLLCLLLAALTFLLCKAIQNTSTSLHLQLSLCLFLAHLLFLVAIDQTGHKVLCSIIAGTLHYLYLATLTWMLLEALYLFLTARNLTVVNYSSINRFMKKLMFPVGYGVPAVTVAISAASRPHLYGTPSRCWLQPEKGFIWGFLGPVCAIFSVNLVLFLVTLWILKNRLSSLNSEVSTLRNTRMLAFKATAQLFILGCTWCLGILQVGPAARVMAYLFTIINSLQGVFIFLVYCLLSQQVREQYGKWSKGIRKLKTESEMHTLSSSAKADTSKPSTVN

SEQ ID NO: 10202 - protein, 845 aa, Homo sapiens
VVAAGTTDVCHQAQLHRQFRGGPWASGCPPPLLYKVLASGQPAQLPSLRRRDSPVPLTLSPAAPAGSSAGTMGGRVFLVFLAFCVWLTLPGAETQDSRGCARWCPQDSSCVNATACRCNPGFSSFSEIITTPMETCDDINECATLSKVSCGKFSDCWNTEGSYDCVCSPGYEPVSGAKTFKNESENTCQDVDECQQNPRLCKSYGTCVNTLGSYTCQCLPGFKLKPEDPKLCTDVDECSSGQHQCDSSTVCFNTVGSYSCRCRPGWKPRHGIPNNQKDTVCEDMTFSTWTPPPGVHSQTLSRFFDKVQDLGRDYKPGLANNTIQSILQALDELLEAPGDLETLPRLQQHCVASHLLDGLEDVLRGLSKNLSNGLLNFSYPAGTELSLEVQKQVDRSVTLRQNQAVMQLDWNQAQKSGDPGPSVVGLVSIPGMGKLLAEAPLVLEPEKQMLLHETHQGLLQDGSPILLSDVISAFLSNNDTQNLSSPVTFTFSHRSVIPRQKVLCVFWEHGQNGCGHWATTGCSTIGTRDTSTICRCTHLSSFAVLMAHYDVQEEDPVLTVITYMGLSVSLLCLLLAALTFLLCKAIQNTSTSLHLQLSLCLFLAHLLFLVAIDQTGHKVLCSIIAGTLHYLYLATLTWMLLEALYLFLTARNLTVVNYSSINRFMKKLMFPVGYGVPAVTVAISAASRPHLYGTPSRCWLQPEKGFIWGFLGPVCAIFSVNLVLFLVTLWILKNRLSSLNSEVSTLRNTRMLAFKATAQLFILGCTWCLGILQVGPAARVMAYLFTIINSLQGVFIFLVYCLLSQQVREQYGKWSKGIRKLKTESEMHTLSSSAKADTSKPSTVN

SEQ ID NO: 10203 - protein, 894 aa, Homo sapiens
VVAAGTTDVCHQAQLHRQFRGGPWASGCPPPLLYKVLASGQPAQLPSLRRRDSPVPLTLSPAAPAGSSAGTMGGRVFLVFLAFCVWLTLPGAETQDSRGCARWCPQDSSCVNATACRCNPGFSSFSEIITTPMETCDDINECATLSKVSCGKFSDCWNTEGSYDCVCSPGYEPVSGAKTFKNESENTCQDVDECQQNPRLCKSYGTCVNTLGSYTCQCLPGFKLKPEDPKLCTDVNECTSGQNPCHSSTHCLNNVGSYQCRCRPGWQPIPGSPNGPNNTVCEDVDECSSGQHQCDSSTVCFNTVGSYSCRCRPGWKPRHGIPNNQKDTVCEDMTFSTWTPPPGVHSQTLSRFFDKVQDLGRDYKPGLANNTIQSILQALDELLEAPGDLETLPRLQQHCVASHLLDGLEDVLRGLSKNLSNGLLNFSYPAGTELSLEVQKQVDRSVTLRQNQAVMQLDWNQAQKSGDPGPSVVGLVSIPGMGKLLAEAPLVLEPEKQMLLHETHQGLLQDGSPILLSDVISAFLSNNDTQNLSSPVTFTFSHRSVIPRQKVLCVFWEHGQNGCGHWATTGCSTIGTRDTSTICRCTHLSSFAVLMAHYDVQEEDPVLTVITYMGLSVSLLCLLLAALTFLLCKAIQNTSTSLHLQLSLCLFLAHLLFLVAIDQTGHKVLCSIIAGTLHYLYLATLTWMLLEALYLFLTARNLTVVNYSSINRFMKKLMFPVGYGVPAVTVAISAASRPHLYGTPSRCWLQPEKGFIWGFLGPVCAIFSVNLVLFLVTLWILKNRLSSLNSEVSTLRNTRMLAFKATAQLFILGCTWCLGILQVGPAARVMAYLFTIINSLQGVFIFLVYCLLSQQVREQYGKWSKGIRKLKTESEMHTLSSSAKADTSKPSTVN

SEQ ID NO: 10204 - protein, 860 aa, Homo sapiens
CLACGDGTALSHSLFPLPLLPAAPTMGGRVFLAFCVWLTLPGAETQDSRGCARWCPQNSSCVNATACRCNPGFSSFSEIITTPTETCDDINECATPSKVSCGKFSDCWNTEGSYDCVCSPGYEPVSGAKTFKNESENTCQDVDECQQNPRLCKSYGTCVNTLGSYTCQCLPGFKFIPEDPKVCTDVNECTSGQNPCHSSTHCLNNVGSYQCRCRPGWQPIPGSPNGPNNTVCEDVDECSSGQHQCDSSTVCFNTVGSYSCRCRPGWKPRHGIPNNQKDTVCEDMTFSTWTPPPGVHSQTLSRFFDKVQDLGRDSKTSSAEVTIQNVIKLVDELMEAPGDVEALAPPVRHLIATQLLSNLEDIMRILAKSLPKGPFTYISPSNTELTLMIQERGDKNVTMGQSSARMKLNWAVAAGAEDPGPAVAGILSIQNMTTLLANASLNLHSKKQAELEEIYESSIRGVQLRRLSAVNSIFLSHNNTKELNSPILFAFSHLESSDGEAGRDPPAKDVMPGPRQELLCAFWKSDSDRGGHWATEGCQVLGSKNGSTTCQCSHLSSFAILMAHYDVEDWKLTLITRVGLALSLFCLLLCILTFLLVRPIQGSRTTIHLHLCICLFVGSTIFLAGIENEGGQVGLRCRLVAGLLHYCFLAAFCWMSLEGLELYFLVVRVFQGQGLSTRWLCLIGYGVPLLIVGVSAAIYSKGYGRPRYCWLDFEQGFLWSFLGPVTFIILCNAVIFVTTVWKLTQKFSEINPDMKKLKKARALTITAIAQLFLLGCTWVFGLFIFDDRSLVLTYVFTILNCLQGAFLYLLHCLLNKKVREEYRKWACLVAGGSKYSEFTSTTSGTGHNQTRALRASESGI

SEQ ID NO: 10205 - protein, 451 aa, Homo sapiens
MEQWDHFHNQQEDTDSCSESVKFDARSMTALLPPNPKNSPSLQEKLKSFKAALIALYLLVFAVLIPLIGIVAAQLLKWETKNCSVSSTNANDITQSLTGKGNDSEEEMRFQEVFMEHMSNMEKRIQHILDMEANLMDTEHFQNFSMTTDQRFNDILLQLSTLFSSVQGHGNAIDEISKSLISLNTTLLDLQLNIENLNGKIQENTFKQQEEISKLEERVYNVSAEIMAMKEEQVHLEQEIKGEVKVLNNITNDLRLKDWEHSQTLRNITLIQGPPGPPGEKGDRGPTGESGPRGFPGPIGPPGLKGDRGAIGFPGSRGLPGYAGRPGNSGPKGQKGEKGSGNTLTPFTKVRLVGGSGPHEGRVEILHSGQWGTICDDRWEVRVGQVVCRSLGYPGVQAVHKAAHFGQGTGPIWLNEVFCFGRESSIEECKIRQWGTRACSHSEDAGVTCTL

SEQ ID NO: 10206 - protein, 358 aa, Homo sapiens
MEQWDHFHNQQEDTDSCSESVKFDARSMTALLPPNPKNSPSLQEKLKSFKAALIALYLLVFAVLIPLIGIVAAQLLKWETKNCSVSSTNANDITQSLTGKGNDSEEEMRFQEVFMEHMSNMEKRIQHILDMEANLMDTEHFQNFSMTTDQRFNDILLQLSTLFSSVQGHGNAIDEISKSLISLNTTLLDLQLNIENLNGKIQENTFKQQEEISKLEERVYNVSAEIMAMKEEQVHLEQEIKGEVKVLNNITNDLRLKDWEHSQTLRNITLIQGPPGPPGEKGDRGPTGESGPRGFPGPIGPPGLKGDRGAIGFPGSRGLPGYAGRPGNSGPKGQKGEKGSGNTLRPVQLTDHIRAGPS

SEQ ID NO: 10207 - protein, 388 aa, Homo sapiens
MEQWDHFHNQQEDTDSCSESVKFDARSMTALLPPNPKNSPSLQEKLKSFKAALIALYLLVFAVLIPLIGIVAAQLLKWETKNCSVSSTNANDITQSLTGKGNDSEEEMRFQEVFMEHMSNMEKRIQHILDMEANLMDTEHFQNFSMTTDQRFNDILLQLSTLFSSVQGHGNAIDEISKSLISLNTTLLDLQLNIENLNGKIQENTFKQQEEISKLEERVYNVSAEIMAMKEEQVHLEQEIKGEVKVLNNITNDLRLKDWEHSQTLRNITLIQGPPGPPGEKGDRGPTGESGPRGFPGPIGPPGLKGDRGAIGFPGSRGLPGYAGRPGNSGPKGQKGEKGSGNTLSTGPIWLNEVFCFGRESSIEECKIRQWGTRACSHSEDAGVTCTL

SEQ ID NO: 10208 - protein, 507 aa, Homo sapiens
MEPAGPAPGRLGPLLCLLLAASCAWSGVAGEEELQVIQPDKSVSVAAGESAILHCTVTSLIPVGPIQWFRGAGPARELIYNQKEGHFPRVTTVSESTKRENMDFSISISNITPADAGTYYCVKFRKGSPDTEFKSGAGTELSVRAKPSAPVVSGPAARATPQHTVSFTCESHGFSPRDITLKWFKNGNELSDFQTNVDPVGESVSYSIHSTAKVVLTREDVHSQVICEVAHVTLQGDPLRGTANLSETIRVPPTLEVTQQPVRAENQVNVTCQVRKFYPQRLQLTWLENGNVSRTETASTVTENKDGTYNWMSWLLVNVSAHRDDVKLTCQVEHDGQPAVSKSHDLKVSAHPKEQGSNTAAENTGSNERNIYIVVGVVCTLLVALLMAALYLVRIRQKKAQGSTSSTRLHEPEKNAREITQVQSLDTNDITYADLNLPKGKKPAPQAAEPNNHTEYASIQTSPQPASEDTLTYADLDMVHLNRTPKQPAPKPEPSFSEYASVQVPRK

SEQ ID NO: 10209 - protein, 503 aa, Homo sapiens
MEPAGPAPGRLGPLLCLLLAASCAWSGVAGEEELQVIQPDKSVSVAAGESAILHCTVTSLIPVGPIQWFRGAGPARELIYNQKEGHFPRVTTVSESTKRENMDFSISISNITPADAGTYYCVKFRKGSPDTEFKSGAGTELSVRAKPSAPVVSGPAARATPQHTVSFTCESHGFSPRDITLKWFKNGNELSDFQTNVDPVGESVSYSIHSTAKVVLTREDVHSQVICEVAHVTLQGDPLRGTANLSETIRVPPTLEVTQQPVRAENQVNVTCQVRKFYPQRLQLTWLENGNVSRTETASTVTENKDGTYNWMSWLLVNVSAHRDDVKLTCQVEHDGQPAVSKSHDLKVSAHPKEQGSNTAAENTGSNERNIYIVVGVVCTLLVALLMAALYLVRIRQKKAQGSTSSTRLHEPEKNAREITQDTNDITYADLNLPKGKKPAPQAAEPNNHTEYASIQTSPQPASEDTLTYADLDMVHLNRTPKQPAPKPEPSFSEYASVQVPRK

SEQ ID NO: 10210 - protein, 398 aa, Homo sapiens
MPVPASWPHLPSPFLLMTLLLGGLTGVAGEEELQVIQPDKSISVAAGESATLHCTVTSLIPVGPIQWFRGAGPGRELIYNQKEGHFPRVTTVSDLTKRNNMDFSIRISNITPADAGTYYCVKFRKGSPDHVEFKSGAGTELSVRAKPSAPVVSGPAARATPQHTVSFTCESHGFSPRDITLKWFKNGNELSDFQTNVDPAGDSVSYSIHSTAKVVLTREDVHSQVICEVAHVTLQGDPLRGTANLSETIRVPPTLEVTQQPVRAENQVNVTCQVRKFYPQRLQLTWLENGNVSRTETASTLTENKDGTYNWMSWLLVNVSAHRDDVKLTCQVEHDGQPAVSKSHDLKVSAHPKEQGSNTAPGPALASAAPLLIAFLLGPKVLLVVGVSVIYVYWKQKA

SEQ ID NO: 10211 - protein, 504 aa, Homo sapiens
MEPAGPAPGRLGPLLCLLLAASCAWSGVAGEEELQVIQPDKSVLVAAGETATLRCTATSLIPVGPIQWFRGAGPGRELIYNQKEGHFPRVTTVSDLTKRNNMDFSIRIGNITPADAGTYYCVKFRKGSPDDVEFKSGAGTELSVRAKPSAPVVSGPAARATPQHTVSFTCESHGFSPRDITLKWFKNGNELSDFQTNVDPVGESVSYSIHSTAKVVLTREDVHSQVICEVAHVTLQGDPLRGTANLSETIRVPPTLEVTQQPVRAENQVNVTCQVRKFYPQRLQLTWLENGNVSRTETASTVTENKDGTYNWMSWLLVNVSAHRDDVKLTCQVEHDGQPAVSKSHDLKVSAHPKEQGSNTAAENTGSNERNIYIVVGVVCTLLVALLMAALYLVRIRQKKAQGSTSSTRLHEPEKNAREITQDTNDITYADLNLPKGKKPAPQAAEPNNHTEYASIQTSPQPASEDTLTYADLDMVHLNRTPKQPAPKPEPSFSEYASVQVPRK

SEQ ID NO: 10212 - protein, 266 aa, Homo sapiens
MVCLKLPGGSSLAALTVTLMVLSSRLAFAGDTRPRFLELLKSECHFFNGTERVRFLERHFHNQEEYARFDSDVGEYRAVRELGRPDAEYWNSQKDLLEQKRGQVDNYCRHNYGVGESFTVQRRVHPQVTVYPAKTQPLQHHNLLVCSVSGFYPGSIEVRWFRNGQEEKAGVVSTGLIQNGDWTFQTLVMLETFPRSGEVYTCQVEHPSVTSPLTVEWSARSESAQSKMLSGVGGFVLGLLFLGAGLFIYFRNQKGHSGLQPTGFLS

SEQ ID NO: 10213 - protein, 266 aa, Homo sapiens
MVCLKLPGGSSLAALTVTLMVLSSRLAFAGDTRPRFLELRKSECHFFNGTERVRYLDRYFHNQEEFLRFDSDVGEYRAVTELGRPVAESWNSQKDLLEQKRGRVDNYCRHNYGVGESFTVQRRVHPQVTVYPAKTQPLQHHNLLVCSVSGFYPGSIEVRWFRNGQEEKAGVVSTGLIQNGDWTFQTLVMLETVPRSGEVYTCQVEHPSVTSALTVEWRARSESAQSKMLSGVGGFVLGLLFLGAGLFIYFRNQKGHSGLQPTGFLS

SEQ ID NO: 10214 - protein, 266 aa, Homo sapiens
MVCLRLPGGSCMAVLTVTLMVLSSPLALAGDTRPRFLELRKSECHFFNGTERVRYLDRYFHNQEEFLRFDSDVGEYRAVTELGRPVAESWNSQKDLLEQKRGRVDNYCRHNYGVGESFTVQRRVHPQVTVYPAKTQPLQHHNLLVCSVSGFYPGSIEVRWFRNGQEEKAGVVSTGLIQNGDWTFQTLVMLETVPRSGEVYTCQVEHPSVTSALTVEWRARSESAQSKMLSGVGGFVLGLLFLGAGLFIYFRNQKGHSGLQPTGFLS

SEQ ID NO: 10215 - protein, 237 aa, Homo sapiens
MAGVSACIKYSMFTFNFLFWLCGILILALAIWVRVSNDSQAIFGSEDVGSSSYVAVDILIAVGAIIMILGFLGCCGAIKESRCMLLLFFIGLLLILLLQVATGILGAVFKSKSDRIVNETLYENTKLLSATGESEKQFQEAIIVFQEEFKCCGLVNGAADWGNNFQHYPELCACLDKQRPCQSYNGKQVYKETCISFIKDFLAKNLIIVIGISFGLAVIEILGLVFSMVLYCQIGNK

SEQ ID NO: 10216 - protein, 215 aa, Homo sapiens
MYGKSSTRAVLLLLGIQLTALWPIAAVEIYTSRVLEAVNGTDARLKCTFSSFAPVGDALTVTWNFRPLDGGPEQFVFYYHIDPFQPMSGRFKDRVSWDGNPERYDASILLWKLQFDDNGTYTCQVKNPPDVDGVIGEIRLSVVHTVRFSEIHFLALAIGSACALMIIIVIVVVLFQHYRKKRWAERAHKVVEIKSKEEERLNQEKKVSVYLEDTD

SEQ ID NO: 10217 - protein, 282 aa, Homo sapiens
MSKSGSPKEPEQLRKLFIGGMSFETTDESLRSHSEQWGTLTDCVVMSESNTKCSRGFGFVTYATMEEVDAAMNARPHKVNGRVVEPKRAVSRGDSQRPGAHLTVEKIFAGGIKEDAEEHHLRDYFEQHRKIEVIEIVTDQGNGRKRGFDFVNTDDHDSVDKTVIQKYHTVNGHNGEVRKALSKQEMAVLLLARGQSGSGNFGCHGGGFGGNDNFGHGGNFSYNDFGNYNNQSSNFGPMMGGNFGGRSSGPCDGGGQYFAKPLNQGGYDSSSSSSSHSCGRDF

SEQ ID NO: 10218 - protein, 636 aa, Homo sapiens
AKVAMSHFEPNEYIHYDLLEKNINIVRKRLNRPLTLSEKIVYGHLDDPASQEIERGKSYLRLRPDLGGADAVDVMAGIPWELKCPKVIGVKLTGSLSGWSSPKDVILKVAGILTVKGGTGAIVEYHGPGVDSISCTGMATICNMGAEIGATTSVFPYNHRMKKYLSKTGREDIANLADEFKDHLVPDPGCHYDQLIEINLSELKPHINGPFTPDLAHPVAEVGKVAEKEGWPLDIRVGLIGSCTNSSYEDMGRSAAVAKQALAHGLKCKSQFTITPGSEQIRATIERDGYAQILRDLGGIVLANACGPCIGQWDRKDIKKGEKNTIVTSYNRNFTGRNDANPETHAFVTSPEIVTALAIAGTLKFNPETDYLTGTDGKKFRLEAPDADELPKGEFDPGQDTYQHPPKDSSGQHVDVSPTSQRLQLLEPFDKWDGKDLEDLQILIKVKGKCTTDHISAAGPWLKFRGHLDNISNNLLIGAINIENGKANSVRNAVTQEFGPVPDTARYYKKHGIRWVVIGDENYGEGSSREHAALEPRHLGGRAIITKSFARIHETNLKKQGLLPLTFADPADYNKIHPVDKLTIQGLKDFTPGKPLKCIIKHPNGTQETILLNHTFNETQIEWFRAGSALNRMKEL

SEQ ID NO: 10219 - protein, 600 aa, Homo sapiens
NYAYPGVLLIGTDSHTPNGGGLGGISIGVGGRDRVDVMAGIPCELKCTKVIAMKLTGSLSGWTSPKDVILKVAGILTVKGGTGAIVEYHGPGVDSISCTGMATICNMGAEIGATTSVFPYNHRMKKYLSKTGRADIASLREEFKDHLVPDPGCQYDQVIEINLNELKPHINGPFTPDLAHPVAEVGTVAEKEGWPLDIRVGLIGSCTNSSYEDMGRSAAVAKQALAHGLKCKSQFTITPGSEQIRATIERDGYAQILRDVGGIVLANACGPCIGQRDRKDIKKGEKNTMVTSYNRNFTGRNDAFPETHAFVTSPEIVTALAIAGTLKFNPETDFLTGKDGKKFKLEAPDADELPRSSFDPGQDTYQQPPKDSSGQRVDVSPTSQRLQLLEPFDKWDGKDLEDLQILIKVKGKCTTDHISAAFPWLKFRGHLDNISNNLLIGAINIENGKANSVRNAVTQEFGPVPDTARYYKKHGIRWVVIGDENYGEGSSREHAALEPRHLGGRAIITKSFARIHETIKKQGLLPLTFADPSDYNKIHPVDKLTIQGLKDFAPGKPLKCIIKHPNGTQETILLNHTFNETQIEWFRAGSALNRMKELQQ

SEQ ID NO: 10220 - protein, 828 aa, Homo sapiens
GVRQYHVASVLCQRAKVAMSHFEPNEYIHYDLLEKNINIVRKRLNRPLTLSEKIVYGHLDDPASQEIERGKSYLRLRPDRVAMQDATAQMAMLQFISSGLSKVAVPSTIHCDHLIEAQVGGEKDLRRAKDINQEVYNFLATAGAKYGVGFWKPGSGIIHQIILENYAYPGVLLIGTDSHTPNGGGLGGICIGVGGADAVDVMAGIPWELKCPKVIGVKLTGSLSGWSSPKDVILKVAGILTVKGGTGAIVEYHGPGVDSISCTGMATICNMGAEIGATTSVFPYNHRMKKYLSKTGREDIANLADEFKDHLVPDPGCHYDQLIEINLSELKPHINGPFTPDLAHPVAEVGKVAEKEGWPLDIRVGLIGSCTNSSYEDMGRSAAVAKQALAHGLKCKSQFTITPGSEQIRATIERDGYAQILRDLGGIVLANACGPCIGQWDRKDIKKGEKNTIVTSYNRNFTGRNDANPETHAFVTSPEIVTALAIAGTLKFNPETDYLTGTDGKKFRLEAPDADELPKGEFDPGQDTYQHPPKDSSGQHVDVSPTSQRLQLLEPFDKWDGKDLEDLQILIKVKGKCTTDHISAAGPWLKFRGHLDNISNNLLIGAINIENGKANSVRNAVTQEFGPVPDTARYYKKHGIRWVVIGDENYGEGSSREHAALEPRHLGGRAIITKSFARIHDLSTSAHLLGAPLVKGSRPGPHSHCPGIVPGSRIRGISQSPRWVQKMKLSRLVRPPMTEACFPETNLKKQGLLPLTFADPADYNKIHPVDKLTIQGLKDFTPGKPLKCIIKHPNGTQETILLNHTFNETQIEWFRAGSALNRMKELQQ

SEQ ID NO: 10221 - protein, 780 aa, Homo sapiens
MAPYSLLVTRLQKALGVRQYHVASVLCQRAKVAMSHFEPNEYIHYDLLEKNINIVRKRLNRPLTLSEKIVYGHLDDPASQEIERGKSYLRLRPDRVAMQDATAQMAMLQFISSGLSKVAVPSTIHCDHLIEAQVGGEKDLRRAKDINQEVYNFLATAGAKYGVGFWKPGSGIIHQIILENYAYPGVLLIGTDSHTPNGGGLGGICIGVGGADAVDVMAGIPWELKCPKVIGVKLTGSLSGWSSPKDVILKVAGILTVKGGTGAIVEYHGPGVDSISCTGMATICNMGAEIGATTSVFPYNHRMKKYLSKTGREDIANLADEFKDHLVPDPGCHYDQLIEINLSELKPHINGPFTPDLAHPVAEVGKVAEKEGWPLDIRVGLIGSCTNSSYEDMGRSAAVAKQALAHGLKCKSQFTITPGSEQIRATIERDGYAQILRDLGGIVLANACGPCIGQWDRKDIKKGEKNTIVTSYNRNFTGRNDANPETHAFVTSPEIVTALAIAGTLKFNPETDYLTGTDGKKFRLEAPDADELPKGEFDPGQDTYQHPPKDSSGQHVDVSPTSQRLQLLEPFDKWDGKDLEDLQILIKVKGKCTTDHISAAGPWLKFRGHLDNISNNLLIGAINIENGKANSVRNAVTQEFGPVPDTARYYKKHGIRWVVIGDENYGEGSSREHAALEPRHLGGRAIITKSFARIHETNLKKQGLLPLTFADPADYNKIHPVDKLTIQGLKDFTPGKPLKCIIKHPNGTQETILLNHTFNETQIEWFRAGSALNRMKELQQ

SEQ ID NO: 10222 - protein, 154 aa, Homo sapiens
MLYCEAESPPTVEKVKPARENSETDLEIEGEHGHLGAVRAASPQKLEKSGFQELSSHSFPESALRMACGGNVAERPARFCLESSSGLAGESSCSFPRLSPASGAVPSRRLVKSGINTQTRFSNLLNVSTWGILCNLCNSPRSFPKKGSTEREHL

SEQ ID NO: 10223 - protein, 1122 aa, Homo sapiens
RRRSGDGVGGGGGSGSGRGARWGGGGAGEEHEWSKMADLFQSLAQLENLCKQLYETTDTTTRLQAEKALVEFTNSPDCLSKCQLLLERGSSSYSQLLAATCLTKLVSRTNNPLPLEQRIDIRNYVLNYLATRPKLATFVTQALIQLYARITKLGWFDCQKDDYVFRNAITDVTRFLQDSVEYCIIGVTILSQLTNEINQADTTHPLTKHRKIASSFRDSSLFDIFTLSCNLLKQASGKNLNLNDESQHGLLMQLLKLTHNCLNFDFIGTSTDESSDDLCTVQIPTSWRSAFLDSSTLQLFFDLYHSIPPSFSPLVLSCLVQIASVRRSLFNNAERAKFLSHLVDGVKRILENPQSLSDPNNYHEFCRLLARLKSNYQLGELVKVENYPEVIRLIANFTVTSLQHWEFAPNSVHYLLSLWQRLAASVPYVKATEPHMLETYTPEVTKAYITSRLESVHIILRDGLEDPLEDTGLVQQQLDQLSTIGRCEYEKTCALLVQLFDQSAQSYQELLQSASASPMDIAVQEGRLTWLVYIIGAVIGGRVSFASTDEQDAMDGELVCRVLQLMNLTDSRLAQAGNEKLELAMLSFFEQFRKIYIGDQVQKSSKLYRRLSEVLGLNDETMVLSVFIGKIITNLKYWGRCEPITSKTLQLLNDLSIGYPSVRKLVKLSAVQFMLNNHTSEHFSFLGINNQSNLTDMRCRTTFYTALGRLLMVDLGEDEDQYEQFMLPLTAAFEAVAQMFSTNSFNEQEAKRTLVGLVRDLRGIAFAFNAKTSFMMLFEWIYPSYMPILQRAIELWYHDPACTTPVLKLMAELVHNRSQRLQFDVSSPNGILLFRETSKMITMYGNRILTLGEVPKDQVYALKLKGISICFSMLKAALSGSYVNFGVFRLYGDDALDNALQTFIKLLLSIPHSDLLDYPKLSQSYYSLLEVLTQDHMNFIASLEPHVIMYILSSISEGLTALDTMVCTGCCSCLDHIVTYLFKQLSRSTKKRTTPLNQESDRFLHIMQQHPEMIQQMLSTVLNIIIFEDCRNQWSMSRPLLGLILLNEKYFSDLRNSIVNSQPPEKQQAMHLCFENLMEGIERNLLTKNRDRFTQNLSAFRREVNDSMKNSTYGVNSNDMMS

SEQ ID NO: 10224 - protein, 863 aa, Homo sapiens
MHDLPPDSGARRGGRGLADHSFPAGARAPGQPPSRGAAYRRACPRDGERGGGGRPRQQVSPPRSPQREPRGGQLRTPRMRPSCSRSLESLRVGAKPPPFQRWPSDSWIRCGAHRDWDEPPPRGGRMDGWSGDRARAAAPTGLQPPGCKDHGCSSGSPFRDPAGSSVIRSGKGDRQEGPSFLRPPAVTVKKLQKWMYKGRLLSLGMKGRARGTAPKVTGTQAASPNVGALKVRENRVLSVPPDQRITLTDLFENAYGSSMKGRELEELKDNIEFRGHKPLNSITVSKKRNWLYQSTLRPLNLEEENKKCQDRSHLSISPVSLPKHQLSQSFLKSSKEYCTYVVCNATNSSLSKNCALDFNEENDADDEGEIWYNPIPEDDDLGISSALSFGEADSAVLKLPAVNLSMLSGSDLMKAERHTEDSLCSSEHAGDIQTTRSNGMNPIHPAHSTEFVQQYKQKLGHKTQEGIMVEDSPMLKSPFAGSGILAATNSTELGIMEPSSPNPSPVKKGSSINWSLPDKIKSPRTVRKLSMKMKKLPEFSRKLSVKGTLNYINSPDNTPSLSKYNCREVHHTDILPSGNTTTAAKRNVISRYHLDTSVSSQQSYQKKNSMSSKYSCKGGYLSDGDSPELTTKASKHGSENKFGKGKEIISNSCSKNEIDIDAFRHYSFSDQPKCSQYISGLMSVHFYGAEDLKPPRIDSKDVFCAIQVDSVNKARTALLTCRTTFLDMDHTFNIEIENAQHLKLVVFSWEPTPRKNRVCCHGTVVLPTLFRVTKTHQLAVKLEPRGLIYVKVTLMEQWENSLHGLDINQEPIIFGVDIQKVVEKENIGLMVPLLIQKCIMEIEKRGCQVLSYYGSLLLPLLID

SEQ ID NO: 10225 - protein, 811 aa, Homo sapiens
WALVGAPASGQGLAGSATNSRVVSRESKLKNMATSNLLKNKGSLQFEDKWDFMRPIVLKLLRQESVTKQQWFDLFSDVHAVCLWDDKGPAKIHQALKEDILEFIKQAQARVLSHQDDTALLKAYIVEWRKFFTQCDILPKPFCQLEITLMGKQGSNKKSNVEDSIVRKLMLDTWNESIFSNIKNRLQDSAMKLVHAERLGEAFDSQLVIGVRESYVNLCSNPEDKLQIYRDNFEKAYLDSTERFYRTQAPSYLQQNGVQNYMKYADAKLKEEEKRALRYLETRRECNSVEALMECCVNALVTSFKETILAECQGMIKRNETEKLHLMFSLMDKVPNGIEPMLKDLEEHIISAGLADMVAAAETITTDSEKYVEQLLTLFNRFSKLVKEAFQDDPRFLTARDKAYKAVVNDATIFKLELPLKQKGVGLKTQPESKCPELLANYCDMLLRKTPLSKKLTSEEIEAKLKEVLLVLKYVQNKDVFMRYHKAHLTRRLILDISADSEIEENMVEWLREVGMPADYVNKLARMFQDIKVSEDLNQAFKEMHKNNKLALPADSVNIKILNAGAWSRSSEKVFVSLPTELEDLIPEVEEFYKKNHSGRKLHWHHLMSNGIITFKNEVGQYDLEVTTFQLAVLFAWNQRPREKISFENLKLATELPDAELRRTLWSLVAFPKLKRQVLLYEPQVNSPKDFTEGTLFSVNQEFSLIKNAKVQKRGKINLIGRLQLTTERMREEENEGIVQLRILRTQEAIIQIMKMRKKISNAQLQTELVEILKNMFLPQKKMIKEQIEWLIEHKYIRRDESDINTFIYMA

SEQ ID NO: 10226 - protein, 1047 aa, Homo sapiens
MMAAEAGSEEGGPVTAGAGGGGAAAGSSAYPAVCRVKIPAALPVAAAPYPGLVETGVAGTLGGGAALGSEFLGAGSVAGALGGAGLTGGGTAAGVAGAAAGVAGAAVAGPSGDMALTKLPTSLLAETLGPGGGFPPLPPPPYLPPLGAGLGTVDEGDSLDGPEYEEEEVAIPLTAPPTNQWYHGKLDRTIAEERLRQAGKSGSYLIRESDRRPGSFVLSFLSQMNVVNHFRIIAMCGDYYIGGRRFSSLSDLIGYYSHVSCLLKGEKLLYPVAPPEPVEDRRRVRAILPYTKVPDTDEISFLKGDMFIVHNELEDGWMWVTNLRTDEQGLIVEDLVEEVGREEDPHEGKIWFHGKISKQEAYNLLMTVGQVCSFLVRPSDNTPGDYSLYFRTNENIQRFKICPTPNNQFMMGGRYYNSIGDIIDHYRKEQIVEGYYLKEPVPMQDQEQVLNDTVDGKEIYNTIRRKTKDAFYKNIVKKGYLLKKGKGKRWKNLYFILEGSDAQLIYFESEKRATKPKGLIDLSVCSVYVVHDSLFGRPNCFQIVVQHFSEEHYIFYFAGETPEQAEDWMKGLQAFCNLRKSSPGTSNKRLRQVSSLVLHIEEAHKLPVKHFTNPYCNIYLNSVQVAKTHAREGQNPVWSEEFVFDDLPPDINRFEITLSNKTKKSKDPDILFMRCQLSRLQKGHATDEWFLLSSHIPLKGIEPGSLRVRARYSMEKIMPEEEYSEFKELILQKELHVVYALSHVCGQDRTLLASILLRIFLHEKLESLLLCTLNDREISMEDEATTLFRATTLASTLMEQYMKATATQFVHHALKDSILKIMESKQSCELSPSKLEKNEDVNTNLTHLLNILSELVEKIFMASEILPPTLRYIYGCLQKSVQHKWPTNTTMRTRVVSGFVFLRLICPAILNPRMFNIISDSPSPIAARTLILVAKSVQNLANLVEFGAKEPYMEGVNPFIKSNKHRMIMFLDELGNVPELPDTTEHSRTDLSRDLAALHEICVAHSDELRTLSNERGAQQHVLKKLLAITELLQQKQNQYTKTNDVR

SEQ ID NO: 10227 - protein, 870 aa, Homo sapiens
MKGWYHGKLDRTIAEERLRQAGKSGSYLIRESDRRPGSFVLSFLSQMNVVNHFRIIAMCGDYYIGGRRFSSLSDLIGYYSHVSCLLKGEKLLYPVAPPEPVEDRRRVRAILPYTKVPDTDEISFLKGDMFIVHNELEDGWMWVTNLRTDEQGLIVEDLVEEVGREEDPHEGKIWFHGKISKQEAYNLLMTVGQVCSFLVRPSDNTPGDYSLYFRTNENIQRFKICPTPNNQFMMGGRYYNSIGDIIDHYRKEQIVEGYYLKEPVPMQDQEQVLNDTVDGKEIYNTIRRKTKDAFYKNIVKKGYLLKKGKGKRWKNLYFILEGSDAQLIYFESEKRATKPKGLIDLSVCSVYVVHDSLFGRPNCFQIVVQHFSEEHYIFYFAGETPEQAEDWMKGLQAFCNLRKSSPGTSNKRLRQVSSLVLHIEEAHKLPVKHFTNPYCNIYLNSVQVAKTHAREGQNPVWSEEFVFDDLPPDINRFEITLSNKTKKSKDPDILFMRCQLSRLQKGHATDEWFLLSSHIPLKGIEPGSLRVRARYSMEKIMPEEEYSEFKELILQKELHVVYALSHVCGQDRTLLASILLRIFLHEKLESLLLCTLNDREISMEDEATTLFRATTLASTLMEQYMKATATQFVHHALKDSILKIMESKQSCELSPSKLEKNEDVNTNLTHLLNILSELVEKIFMASEILPPTLRYIYGCLQKSVQHKWPTNTTMRTRVVSGFVFLRLICPAILNPRMFNIISDSPSPIAARTLILVAKSVQNLANLVEFGAKEPYMEGVNPFIKSNKHRMIMFLDELGNVPELPDTTEHSRTDLSRDLAALHEICVAHSDELRTLSNERGAQQHVLKKLLAITELLQQKQNQYTKTNDVR

SEQ ID NO: 10228 - protein, 445 aa, Homo sapiens
PHTNNCTYFLTGLDAYNMPAWIFVNRSLALGKIRCFGFDMDYTLAAYKSPAYEALTFELLLERLVCIGYPHEILRYTYDPTFPTRRLVFDELYGNLLKVDAHGNVLLGAYGFTFLSEAEIWSFYPSKFIQRDDLQCFYILNMLFNLPETYLYACLVDFFSGCSRYTNCDTGYQHGNLFMSFRSLFQDVTDAMNNIHQSGCLKKTLEDLEKYVKKDPRLPILLGKMKEVGKVFLATNSSYNYTNAIMTYLFSISEAEASGRPWRSYFDLIVVDTQKPHFFAEGLVLRQVNTDSGKLHVGTSTGPHQHCAVYSGGSSDMVCELLGVRGMDILYIGDHIFGDILKSKKRQGWRTCLVVPELSWELDIWAQEKERLEELKRLDTHLADIYQHMDGSSCELQVINFTKREIQMPHESVVEQEQANLDPASCLLSCNQRSLPAKSCLSSAI

SEQ ID NO: 10229 - protein, 506 aa, Homo sapiens
MPAEKTVQVKNVMDKNGDAYGFYNNSVKTTGWGILEIRAGYGSQTLSNEIIMFVAGFLEGYLTAPHMNDHYTNLYPQLITKPSIMDKVQDFMEKQDKWTRKNIKEYKTDSFWRHTGYVMAQIDGLYVGAKKRAILEGTKPMTLFQIQFLNSVGDLLDLIPSLSPTKNGSLKVFKRWDMGHCSALIKVLPGFENVLFAHSSWYTYAAMLRIYKHWDFNIIDKDTSSSRLSFSSYPGFLESLDDFYILSSGLILLQTTNSVFNKTLLKQVIPETLLSWQRVRVANMMADSGKRWADIFSKYNSGTYNNQYMVLDLKKVKLNHSLDKGTLYIVEQIPTYVEYSEQTDVLRKGYWPSYNVPFHEKIYNWSGYPLLVQKLGLDYSYDLAPRAKIFRRDQGKVTDTASMKYIMRYNNYKKDPYSRGDPCNTICCREDLNSPNPSPGGCYDTKVADIYLASQYTSYAISGPTVQGGLPVFRWDRFNKTLHQGMPEVYNFDFITMKPILKLDIK

SEQ ID NO: 10230 - protein, 3270 aa, Homo sapiens
MEKLRIKYSEMYTIVPAEIESQVEECRKALEDIDEKISNEVLKSSPSYAMRRKIEEINNGLHNVEKMLQQKSKNIEKAQEIQKKMWDELDLWHSKLNELDSEVQDIVEQDPGQAQEWMDNLMIPFQQYQQVSQRAECRTSQLNKATVKMEEYSDLLKSTEAWIENTSHLLANPADYDSLRTLSHHASTVQDSKCFRSGPRPNIYVSYYVTVIQMALEDSEQKHNLLHSIFMDLEDLSIIFETDELTQSIQELSNQVTALQQKIMESLPQIQRMADDVVAIESEVKSMEKRVSKIKTILLSKEIFDFSPEEHLKHGEVILENIRPMKKTIAEIVSYQVELRLPQTGMKPLPVFQRTNQLLQDIKLLENVTQEQNELLKVVIKQTNEQDEEIENLKQILNNYSAQFSLEHMSPDQADKLPQLQGEIERMEKQILSLNQRKEDLLVDLKATVLNLHQHLKQEQEGVERDRLPAVTSEEGGVAERDASERKLNRRGSMSYLAAVEEEVEESSVKSDNGDEKAEPSPQSWSSLWKHDKDMEEDRASSSSGTIVQEAYGKISTSDNSMAQILTPDSLNTEQGPECSLRPNQTEEGTTPPIEADTLDSSDAQGGLEPRVEKTRPEPTEVLHACKTQVAELELWLQQANVAVEPETLNADMQQVLEQQLVGCQAMLTEIEHKVAFLLETCKDQGLGDNGATQHEAEALSLKLKTVKCNLEKVQMMLQEKHSEDQHPTILKKSSEPEHQEALQPVNLSELESIVTERPQFSRQKDFQQQQVLELKPMEQKDFIKFIEFNAKKMWPQYCQHDNDTTQESSASNQASSPENDVPDSILSPQGQNGDKWQYLHHELSSKIKLPLPQLVEPQVSTNMGILPSVTMYNFRYPTTEELKTYTTQLEDLRQEASNLQTQENMTEEAYINLDKKLFELFLTLSQCLSSVEEMLEMPRLYREDGSGQQVHYETLALELKKLYLALSDKKGDLLKAMTWPGENTNLLLECFDNLQVCLEHTQAAAVCRSKSLKAGLDYNRSYQNEIKRLYHQLIKSKTSLQQSLNEISGQSVAEQLQKADAYTVELENAESRVAKLRDEGERLHLPYALLQEVYKLEDVLDSMWGMLRARYTELSSPFVTESQQDALLQGMVELVKIGKEKLAHGHLKQTKSKVALQAQIENHKVFFQKLVADMLLIQAYSAKILPSLLQNRETFWAEQVTEVKILEEKSRQCGMKLQSLLQKWEEFDENYASLEKDLEILISTLPSVSLVEETEERLVERISFYQQIKRNIGGKHARLYQTLNEGKQLVASVSCPELEGQIAKLEEQWLSLNKKIDHELHRLQALLKHLLSYNRDSDQLTKWLESSQHTLNYWKEQSLNVSQDLDTIRSNINNFFEFSKEVDEKSSLKTAVISIGNQLLHLKETDTATLRASLAQFEQKWTMLITQLPDIQEKLHQLQMEKLPSRKAITEMISWMNNVEHQTSDEDSVHSPSSASQVKHLLQKHKEFRMEMDYKQWIVDFVNQSLLQLSTCDVESKRYERTEFAEHLGEMNRQWHRVHGMLNRKIQHLEQLLESITESENKIQILNNWLEAQEERLKTLQKPESVISVQKLLLDCQDIENQLAIKSKALDELKQSYLTLESGAVPLLEDTASRIDELFQKRSSVLTQVNQLKTSMQSVLQEWKIYDQLYDEVNMMTIRFWYCMEHSKPVVLSLETLRCQVENLQSLQDEAESSEGSWEKLQEVIGKLKGLCPSVAEIIEEKCQNTHKRWTQVNQAIADQLQKAQSLLQLWKAYSNAHGEAAARLKQQEAKFQQLANISMSGNNLAEILPPALQDIKELQHDVQKTKEAFLQNSSVLDRLPQPAESSTHMLLPGPLHSLQRAAYLEKMLLVKANEFEFVLSQFKDFGVRLESLKGLIMHEEENLDRLHQQEKENPDSFLNHVLALTAQSPDIEHLNEVSLKLPLSDVAVKTLQNMNRQWIRATATALERCSELQGIGLNEKFLYCCEKWIQLLEKIEEALKVDVANSLPELLEQQKTYKMLEAEVSINQTIADSYVTQSLQLLDTTEIENRPEFITEFSKLTDRWQNAVQGVRQRKGDVDGLVRQWQDFTTSVENLFRFLTDTSHLLSAVKGQERFSLYQTRSLIHELKNKEIHFQRRRTTCALTLEAGEKLLLTTDLKTKESVGRRISQLQDSWKDMEPQLAEMIKQFQSTVETWDQCEKKIKELKSRLQVLKAQSEDPLPELHEDLHNEKELIKELEQSLASWTQNLKELQTMKADLTRHVLVEDVMVLKEQIEHLHRQWEDLCLRVAIRKQEIEDRLNTWVVFNEKNKELCAWLVQMENKVLQTADISIEEMIEKLQKDCMEEINLFSENKLQLKQMGDQLIKASNKSRAAEIDDKLNKINDRWQHLFDVIGSRVKKLKETFAFIQQLDKNMSNLRTWLARIESELSKPVVYDVCDDQEIQKRLAEQQDLQRDIEQHSAGVESVFNICDVLLHDSDACANETECDSIQQTTRSLDRRWRNICAMSMERRMKIEETWRLWQKFLDDYSRFEDWLKSAERTAACPNSSEVLYTSAKEELKRFEAFQRQIHERLTQLELINKQYRRLARENRTDTASRLKQMVHEGNQRWDNLQRRVTAVLRRLRHFTNQREEFEGTRESILVWLTEMDLQLTNVEHFSESDADDKMRQLNGFQQEITLNTNKIDQLIVFGEQLIQKSEPLDAVLIEDELEELHRYCQEVFGRVSRFHRRLTSCTPGLEDEKEASENETDMEDPREIQTDSWRKRGESEEPSSPQSLCHLVAPGHERSGCETPVSVDSIPLEWDHTGDVGGSSSHEEDEEGPYYSALSGKSISDGHSWHVPDSPSCPEHHYKQMEGDRNVPPVPPASSTPYKPPYGKLLLPPGTDGGKEGPRVLNGNPQQEDGGLAGITEQQSGAFDRWEMIQAQELHNKLKIKQNLQQLNSDISAITTWLKKTEAELEMLKMAKPPSDIQEIELRVKRLQEILKAFDTYKALVVSVNVSSKEFLQTESPESTELQSRLRQLSLLWEAAQGAVDSWRGGLRQSLMQCQDFHQLSQNLLLWLASAKNRRQKAHVTDPKADPRALLECRRELMQLEKELVERQPQVDMLQEISNSLLIKGHGEDCIEAEEKVHVIEKKLKQLREQVSQDLMALQGTQNPASPLPSFDEVDSGDQPPATSVPAPRAKQFRAVRTTEGEEETESRVPGSTRPQRSFLSRVVRAALPLQLLLLLLLLLACLLPSSEEDYSCTQANNFARSFYPMLRYTNGPPPT

SEQ ID NO: 10231 - protein, 1871 aa, Homo sapiens [sequence omitted]

SEQ ID NO: 10232 - protein, 1067 aa, Homo sapiens
MAVGASFSSPQKFTAPSLEGGVLKCQLLVGEQCCSGNSRAEKAAINQVRHDQPPSYNRCRTRVSDERRKNTKPEPCLNCVYDKESNRSLRMERKSHRMAGKLKTHSTGLWWWQFACKFARLSLPSRSGRGTQGAILPGSQVRGGRGGPSGPAPPRPAPPRPPAARPRPKRRPRRRLRNVCGEPPPPPVPTPMMADGAAAGAGGSPSLRELRARMVAAANEIAKERRKQDVVNRVATHSSNIRSTFKPVIDGSMLKNDIKQRLARERREEKRRQQDANKETQLLEKERKTKLQYEKQMEERQRKLKERKEKEEQRRIAAEEKRHQKDEAQKEKFTAILYRTLERRRLADDYQQKRWSWGGSAMANSESKTANKRSASTEKLEQGTSALIRQMPLSSAGLQNSVAKRKTDKERSSSLNRRDSNLHSSTDKEQAERKPRVTGVTNYVMQYVTVPLRKCTSDELRAVMFPMSTMKIPPQTKVEESPLEKVETPPKASVDAPPQVNVEVFCNTSMEASPKAGVGMAPEVSTDSFPVVSVDVSPVVSTYDSEMSMDASPELSIEALPKVDLETVPKVSIVASPEASLEAPPEVSLEALPEVSVEAAPEGSLEAPPKGSAEVAPKESVKGSPKESMEASPEAMVKASPKTSLEASMEASPKAKARDAPKKSEMDKQALIPIAKKRLSSYTECYKWSSSPENACGLPSPISTNRQIQKNCPPSPLPLISKQSPQTSFPYKIMPIQHTLSVQSASSTVKKKKETVSKTTNRCEALSQRHMIYEESGNKSTAGIMNAEAATKILTELRRLAREQREKEEEERQREEMQQRVIKKSKDMAKEAVGGQAEDHLKLKDGQQQNETKKKKGWLDQEDQEAPLQKGDAKIKAQEEADKRKKEHERIMLQNLQERLERKKRIEEIMKRTRKTDVNASKVTETSSHDIYEEAEADNEESDKDSLNEMFPSAILNGTGSPTKFKMPFNNAKKMTHKLVFLEDGTSQVRKEPKTYFNGDLKNFRQKSMKDTSIQEVVSRPSSKRMTSHTTKTRKADETNTTSRSSAQTKSEGFHDILPKSSDTFRQ

SEQ ID NO: 10233 - protein, 729 aa, Homo sapiens
MGDYGFGVLVQSNTGNKSAFPVRFHPHLQPPHHHQNATPSPAAFINNNTAANGSSAGSAWLFPAPATHNIQDEILGSEKAKSQQQEQQDPLEKQQLSPSPGQEAGILPETEKAKSEENQGDNSSENGNGKEKIRIESPVLTGFDYQEATGLGTSTQPLTSSASSLTGFSNWSAAIAPSSSTIINEDASFFHQGGVPAASANNGALLFQNFPHHVSPGFGGSFSPQIGLLSQHHPHHPHFQHHHSQHQQQRRSPASPHPPPFTHRNAAFNQLPHLANNLNKPPSPWSSYQSPSPTPSSSWSPGGGGYGGWGGSQGRDHRRGLNGGITPLNSISPLKKNFASNHIQLQKYARPSSAFAPKSWMEDSLNRADNIFPFPDRPRTFDMHSLESSLIDIMRAENDTIKGRLNYSYPGSDSSLLINARTYGRRRGQSSLFPMEDGFLDDGRGDQPLHSGLGSPHCFSHQNGERVERYSRKVFVGGLPPDIDEDEITASFRRFGPLIVDWPHKAESKSYFPPKGYAFLLFQDESSVQALIDACIEEDGKLYLCVSSPTIKDKPVQIRPWNLSDSDFVMDGSQPLDPRKTIFVGGVPRPLRAVELAMIMDRLYGGVCYAGIDTDPELKYPKGAGRVAFSNQQSYIAAISARFVQLQHGEIDKRVEVKPYVLDDQLCDECQGARCGGKFAPFFCANVTCLQYYCEYCWAAIHSRAGREFHKPLVKEGGDRPRHISFRWN

SEQ ID NO: 10234 - protein, 712 aa, Homo sapiens
MGDYGFGVLVQSNTGNKSAFPVRFHPHLQPPHHHQNATPSPAAFINNNTAANGSSAGSAWLFPAPATHNIQDEILGSEKAKSQQQEQQDPLEKQQLSPSPGQEAGILPETEKAKSEENQGDNSSENGNGKEKIRIESPVLTGFDYQEATGLGTSTQPLTSSASSLTGFSNWSAAIAPSSSTIINEDASFFHQGGVPAASANNGALLFQNFPHHVSPGFGGSFSPQIGPLSQHHPHHPHFQHHHSQHQQQRRSPASPHPPPFTHRNAAFNQLPHLANNLNKPPSPWSSYQSPSPTPSSSWSPGGGGYGGWGGSQGRDHRRGLNGGITPLNSISPLKKNFASNHIQLQKYARPSSAFAPKSWMEDSLNRADNIFPFPDRPRTFDMHSLESSLIDIMRAENDTIKARTYGRRRGQSSLFPMEDGFLDDGRGDQPLHSGLGSPHCFSHQNGERVERYSRKVFVGGLPPDIDEDEITASFRRFGPLIVDWPHKAESKSYFPPKGYAFLLFQDESSVQALIDACIEEDGKLYLCVSSPTIKDKPVQIRPWNLSDSDFVMDGSQPLDPRKTIFVGGVPRPLRAVELAMIMDRLYGGVCYAGIDTDPELKYPKGAGRVAFSNQQSYIAAISARFVQLQHGEIDKRVEVKPYVLDDQLCDECQGARCGGKFAPFFCANVTCLQYYCEYCWAAIHSRAGREFHKPLVKEGGDRPRHISFRWN

SEQ ID NO: 10235 - protein, 521 aa, Homo sapiens
MSLSRSEEMHRLTENVYKTIMEQFNPSLRNFIAMGKNYEKALAGVTYAAKGYFDALVKMGELASESQGSKELGDVLFQMAEVHRQIQNQLEEMLKSFHNELLTQLEQKVELDSRYLSAALKKYQTEQRSKGDALDKCQAELKKLRKKSQGSKNPQKYSDKELQYIDAISNKQGELENYVSDGYKTALTEERRRFCFLVEKQCAVAKNSAAYHSKGKELLAQKLPLWQQACADPSKIPERAVQLMQQVASNGATLPSALSASKSNLVISDPIPGAKPLPVPPELAPFVGRMSAQESTPIMNGVTGPDGEDYSPWADRKAAQPKSLSPPQSQSKLSDSYSNTLPVRKSVTPKNSYATTENKTLPRSSSMAAGLERNGRMRVKAIFSHAAGDNSTLLSFKEGDLITLLVPEARDGWHYGESEKTKMRGWFPFSYTRVLDSDGSDRLHMSLQQGKSSSTGNLLDKDDLAIPPPDYGAASRAFPAQTASGFKQRPYSVAVPAFSQGLDDYGARSMSSGSGTLVSTV

SEQ ID NO: 10236 - protein, 520 aa, Homo sapiens
MSLSRSEEMHRLTENVYKTIMEQFNPSLRNFIAMGKNYEKALAGVTYAAKGYFDALVKMGELASESQGSKELGDVLFQMAEVHRQIQNQLEEMLKSFHNELLTQLEQKVELDSRYLSAALKKYQTEQRSKGDALDKCQAELKKLRKKSQGSKNPQKYSDKELQYIDAISNKQGELENYVSDGYKTALTEERRRFCFLVEKQCAVAKNSAAYHSKGKELLAQKLPLWQQACADPSKIPERAVQLMQQVASNGATLPSALSASKSNLVISDPIPGAKPLPVPPELAPFVGRMSAQESTPIMNGVTGPDGEDYSPWADRKAAQPKSLSPPQSQSKLSDSYSNTLPVRKSVTPKNSYATTENKTLPRSSSMAAGLERNGRMRVKAIFSHAAGDNSTLLSFKEGDLITLLVPEARDGWHYGESEKTKMRGWFPFSYTRVLDSDGSDRLHMSLQQGKSSSTGNLLDKDDLAIPPPDYGAASRAFPAQTASGFKQRPYSVAVPAFSQGLDDYGARSMSSADVEVARF

SEQ ID NO: 10237 - protein, 552 aa, Homo sapiens
MSLSRSEEMHRLTENVYKTIMEQFNPSLRNFIAMGKNYEKALAGVTYAAKGYFDALVKMGELASESQGSKELGDVLFQMAEVHRQIQNQLEEMLKSFHNELLTQLEQKVELDSRYLSAALKKYQTEQRSKGDALDKCQAELKKLRKKSQGSKNPQKYSDKELQYIDAISNKQGELENYVSDGYKTALTEERRRFCFLVEKQCAVAKNSAAYHSKGKELLAQKLPLWQQACADPSKIPERAVQLMQQVASNGATLPSALSASKSNLVISDPIPGAKPLPVPPELAPFVGRMSAQESTPIMNGVTGPDGEDYSPWADRKAAQPKSLSPPQSQSKLSDSYSNTLPVRKSVTPKNSYATTENKTLPRSSSMAAGLERNGRMRVKAIFSHAAGDNSTLLSFKEGDLITLLVPEARDGWHYGESEKTKMRGWFPFSYTRVLDSDGSDRLHMSLQQGKSSSTGNLLDKDDLAIPPPDYGAASRAFPAQTASGFKQRPYSVAVPAFSQGLDDYGARSMSRNPFAHVQLKPTVTNDRCDLSAQGPEGREHGDGSARTLAGR

SEQ ID NO: 10238 - protein, 999 aa, Homo sapiens
MGVAGRNRPGAAWAVLLLLLLLPPLLLLAGAVPPGRGRAAGPQEDVDECAQGLDDCHADALCQNTPTSYKCSCKPGYQGEGRQCEDIDECGNELNGGCVHDCLNIPGNYRCTCFDGFMLAHDGHNCLDVDECLENNGGCQHTCVNVMGSYECCCKEGFFLSDNQHTCIHRSEEGLSCMNKDHGCSHICKEAPRGSVACECRPGFELAKNQRDCILTCNHGNGGCQHSCDDTADGPECSCHPQYKMHTDGRSCLEREDTVLEVTESNTTSVVDGDKRVKRRLLMETCAVNNGGCDRTCKDTSTGVHCSCPVGFTLQLDGKTCKDIDECQTRNGGCDHFCKNIVGSFDCGCKKGFKLLTDEKSCQDVDECSLDRTCDHSCINHPGTFACACNRGYTLYGFTHCGDTNECSINNGGCQQVCVNTVGSYECQCHPGYKLHWNKKDCVEVKGLLPTSVSPRVSLHCGKSGGGDGCFLRCHSGIHLSSDVTTIRTSVTFKLNEGKCSLKNAELFPEGLRPALPEKHSSVKESFRYVNLTCSSGKQVPGAPGRPSTPKEMFITVEFELETNQKEVTASCDLSCIVKRTEKRLRKAIRTLRKAVHREQFHLQLSGMNLDVAKKPPRTSERQAESCGVGQGHAENQCVSCRAGTYYDGARERCILCPNGTFQNEEGQMTCEPCPRPGNSGALKTPEAWNMSECGGLCQPGEYSADGFAPCQLCALGTFQPEAGRTSCFPCGGGLATKHQGATSFQDCETRVQCSPGHFYNTTTHRCIRCPVGTYQPEFGKNNCVSCPGNTTTDFDGSTNITQCKNRRCGGELGDFTGYIESPNYPGNYPANTECTWTINPPPKRRILIVVPEIFLPIEDDCGDYLVMRKTSSSNSVTTYETCQTYERPIAFTSRSKKLWIQFKSNEGNSARGFQVPYVTYDEDYQELIEDIVRDGRLYASENHQEILKDKKLIKALFDVLAHPQNYFKYTAQESREMFPRSFIRLLRSKVSRFLRPYK

SEQ ID NO: 10239 - protein, 1246 aa, Homo sapiens
GAARLVLAPSRPPAYQAMGASRDRGLAALWCLGLLGGLARVAGTHYRYLWRGCYPCHLGQAGYPVSAGDQRPDVDECRTHNGGCQHRCVNTPGSYLCECKPGFRLHTDSRTCLAINSCALGNGGCQHHCVQLTITRHRCQCRPGFQLQEDGRHCVRRSPCANRNGSCMHRCQVVRGLARCECHVGYQLAADGKACEDVDECAAGLAQCAHGCLNTQGSFKCVCHAGYELGADGRQCYRIEMEIVNSCEANNGGCSHGCSHTSAGPLCTCPRGYELDTDQRTCIDVDDCADSPCCQQVCTNNPGGYECGCYAGYRLSADGCGCEDVDECASSRGGCEHHCTNLAGSFQCSCEAGYRLHEDRRGCSPLEEPMVDLDGELPFVRPLPHIAVLQDELPQLFQDDDVGADEEEAELRGEHTLTEKFVCLDDSFGHDCSLTCDDCRNGGTCLLGLDGCDCPEGWTGLICNETCPPDTFGKNCSFSCSCQNGGTCDSVTGACRCPPGVSGTNCEDGCPKGYYGKHCRKKCNCANRGRCHRLYGACLCDPGLYGRFCHLTCPPWAFGPGCSEECQCVQPHTQSCDKRDGSCSCKAGFRGERCQAECELGYFGPGCWQACTCPVGVACDSVSGECGKRCPAGFQGEDCGQECPVGTFGVNCSSSCSCGGAPCHGVTGQCRCPPGRTGEDCEADCPEGRWGLGCQEICPACQHAARCDPETGACLCLPGFVGSRCQDVCPAGWYGPSCQTRCSCANDGHCHPATGHCSCAPGWTGFSCQRACDTGHWGPDCSHPCNCSAGHGSCDAISGLCLCEAGYVGPRCEQQCPQGHFGPGCEQLCQCQHGAACDHVSGACTCPAGWRGTFCEHACPAGFFGLDCRSACNCTAGAACDAVNGSCLCPAGRRGPRCAEKCLPRDVRAGCRHSGGCLNGGLCDPHTGRCLCPAGWTGDKCQSPCLRGWFGEACAQRCSCPPAAACHHVTGACRCPPGFTGSGCEQGCPPGRYGPGCEQLCGCLNGGSCDAATGACRCPTGFLGTDCNLTCPQGRFGPNCTHVCGCGQGAACDPVTGTCLCPPGRAGVRCERGCPQNRFGVGCEHTCSCRNGGLCHASNGSCSCGLGWTGRHCELACPPGRYGAACHLECSCHNNSTCEPATGTCRCGPGFYGQACEHRRSGATCNLDCRRGQFGPSCTLHCDCGGGADCDPVSGQCHCVDGYMGPTCREGGPLRLPENPSLAQGSAGTLPASSRPTSRSGGPARH

SEQ ID NO: 10240 - protein, 304 aa, Homo sapiens
MSLMVVSMACVGGQDKPFLSAWPSPVVSEGEHVALQCRSRLGFNEFSLSKEDGMPVPELYNRVFRNTVFIGPVTPAHAGTYRCRGSHPHFLTGWSAPSNPLVIMVTGVHRKPSLLAHPGPLVKSEETVILQCWSDVMFEHFLLHREGKFNDTLRLTGELHDGVSKANFSIGRMTQDLAGTYRCYGSVPHSPYQLSAPSDPLDIVITGLCGKPSLSAQPRPMVKAGESVTLSCSSRSSYDIYHLSREGEAHELRFPAEPKVNGTFQANFPLGPATHGGTYRCFGSFRDSPYEWSDLSDPLLVSVT

SEQ ID NO: 10241 - protein, 336 aa, Homo sapiens
MSLMVVSMACVGGQDKPFLSAWPSPVVSEGEHVALQCRSRLGFNEFSLSKEDGMPVPELYNRVFRNTVFIGPVTPAHAGTYRCRGSHPHFLTGWSAPSNPLVIMVTGPLVKSEETVILQCWSDVMFEHFLLHREGKFNDTLRLTGELHDGVSKANFSIGRMTQDLAGTYRCYGSVPHSPYQLSAPSDPLDIVITGLCGKPSLSAQPRPMVKAGESVTLSCSSRSSYDIYHLSRDGEAHELRFPAVPKVNGTFQANFPLGPATHGGTYRCFGSFRDSPYEWSDLSDPLLVSVTAKQSGSWTLSFGVQQNPKSIVGLNTAMLYILVSQQTLEENSLYS

SEQ ID NO: 10242 - protein, 246 aa, Homo sapiens
MAAPGPALCLFDVDGTLTAPRQKITKEMDDFLQKLRQKIKIGVVGGSDFEKVQEQLGNDVVEKYDYVFPENGLVAYKDGKLLCRQNIQSHLGEALIQDLINYCLSYIAKIKLPKKRGTFIEFRNGMLNVSPIGRSCSQEERIEFYELDKKENIRQKFVADLRKEFAGKGLTFSIGGQISFDVFPDGWDKRYCLRHVENDGYKTIYFFGDKTMPGGNDHEIFTDPRTMGYSVTAPEDTRRICELLFS

SEQ ID NO: 10243 - protein, 1593 aa, Homo sapiens
MPCAQRSWLANLSVVAQLLNFGALCYGRQPQPGPVRFPDRRQEHFIKGLPEYHVVGPVRVDASGHFLSYGLHYPITSSRRKRDLDGSEDWVYYRISHEEKDLFFNLTVNQGFLSNSYIMEKRYGNLSHVKMMASSAPLCHLSGTVLQQGTRVGTAALSACHGLTGFFQLPHGDFFIEPVKKHPLVEGGYHPHIVYRRQKVPETKEPTCGLKDSVNISQKQELWREKWERHNLPSRSLSRRSISKERWVETLVVADTKMIEYHGSENVESYILTIMNMVTGLFHNPSIGNAIHIVVVRLILLEEEEQGLKIVHHAEKTLSSFCKWQKSINPKSDLNPVHHDVAVLLTRKDICAGFNRPCETLGLSHLSGMCQPHRSCNINEDSGLPLAFTIAHELGHSFGIQHDGKENDCEPVGRHPYIMSRQLQYDPTPLTWSKCSEEYITRFLDRGWGFCLDDIPKKKGLKSKVIAPGVIYDVHHQCQLQYGPNATFCQEVENVCQTLWCSVKGFCRSKLDAAADGTQCGEKKWCMAGKCITVGKKPESIPGGWGRWSPWSHCSRTCGAGVQSAERLCNNPEPKFGGKYCTGERKRYRLCNVHPCRSEAPTFRQMQCSEFDTVPYKNELYHWFPIFNPAHPCELYCRPIDGQFSEKMLDAVIDGTPCFEGGNSRNVCINGICKMVGCDYEIDSNATEDRCGVCLGDGSSCQTVRKMFKQKEGSGYVDIGLIPKGARDIRVMEIEGAGNFLAIRSEDPEKYYLNGGFIIQWNGNYKLAGTVFQYDRKGDLEKLMATGPTNESVWIQLLFQVTNPGIKYEYTIQKDGLDNDVEQMYFWQYGHWTECSVTCGTGIRRQTAHCIKKGRGMVKATFCDPETQPNGRQKKCHEKACPPRWWAGEWEACSATCGPHGEKKRTVLCIQTMVSDEQALPPTDCQHLLKPKTLLSCNRDILCPSDWTVGNWSECSVSCGGGVRIRSVTCAKNHDEPCDVTRKPNSRALCGLQQCPSSRRVLKPNKGTISNGKNPPTLKPVPPPTSRPRMLTTPTGPESMSTSTPAISSPSPTTASKEGDLGGKQWQDSSTQPELSSRYLISTGSTSQPILTSQSLSIQPSEENVSSSDTGPTSEGGLVATTTSGSGLSSSRNPITWPVTPFYNTLTKGPEMEIHSGSGEEREQPEDKDESNPVIWTKIRVPGNDAPVESTEMPLAPPLTPDLSRESWWPPFSTVMEGLLPSQRPTTSETGTPRVEGMVTEKPANTLLPLGGDHQPEPSGKTANRNHLKLPNNMNQTKSSEPVLTEEDATSLITEGFLLNASNYKQLTNGHGSAHWIVGNWSECSTTCGLGAYWKRVECTTQMDSDCAAIQRPDPAKRCHLRPCAGWKVGNWSKCSRNCSGGFKIREIQCVDSRDHRNLRPFHCQFLAGIPPPLSMSCNPEPCEAWQVEPWSQCSRSCGGGVQERGVFCPGGLCDWTKRPTSTMSCNEHLCCHWATGNWDLCSTSCGGGFQKRIVQCVPSEGNKTEDQDQCLCDHKPRPPEFKKCNQQACKKSADLLCTKDKLSASFCQTLKAMKKCSVPTVRAECCFSCPQTHITHTQRQRRQRLLQKSKEL

SEQ ID NO: 10244 - protein, 96 aa, Homo sapiens
MDTTLGPFILNVTSGALLCSQALCSGHGRCVRRTSHPKALLLLNPASFSIQLTPGGGPLSLRGALSLEDQAQMAVEFKCRCYPGWQAPWCERKSMW

SEQ ID NO: 10245 - protein, 253 aa, Homo sapiens
MAGTLQLGRALRPRGLWGFYGFPDCYNYDFLSPNYTGQCPSGIRAQNDQLGWLWGQSRALYPSIYMPAVLEGTGKSQMYVQHRVAEAFRVAVAAGDPNLPVLPYVQIFYDTTNHFLPLDELEHSLGESAAQGAAGVVLWVSWENTRTKESCQAIKEYMDTTLGPFILNVTSGALLCSQALCSGHGRCVRRTSHPKALLLLNPASFSIQLTPGGGPLSLRGALSLEDQAQMAVEFKCRCYPGWQAPWCERKSMW

SEQ ID NO: 10246 - protein, 176 aa, Homo sapiens
MYVQHRVAEAFRVAVAAGDPNLPVLPYVQIFYDTTNHFLPLDELEHSLGESAAQGAAGVVLWVSWENTRTKESCQAIKEYMDTTLGPFILNVTSGALLCSQALCSGHGRCVRRTSHPKALLLLNPASFSIQLTPGGGPLSLRGALSLEDQAQMAVEFKCRCYPGWQAPWCERKSMW

SEQ ID NO: 10247 - protein, 2347 aa, Homo sapiens [sequence omitted]

SEQ ID NO: 10248 - protein, 1256 aa, Homo sapiens
MPGPRGAAGGLAPEMRGAGAAGLLALLLLLLLLLLGLGGRVEGGPAGERGAGGGGALARERFKVVFAPVICKRTCLKGQCRDSCQQGSNMTLIGENGHSTDTLTGSGFRVVVCPLPCMNGGQCSSRNQCLCPPDFTGRFCQVPAGGAGGGTGGSGPGLSRTGALSTGALPPLAPEGDSVASKHAIYAVQVIADPPGPGEGPPAQHAAFLVPLGPGQISAEVQAPPPVVNVRVHHPPEASVQVHRIESSNAESAAPSQHLLPHPKPSHPRPPTQKPLGRCFQDTLPKQPCGSNPLPGLTKQEDCCGSIGTAWGQSKCHKCPQLQYTGVQKPGPVRGEVGADCPQGYKRLNSTHCQDINECAMPGVCRHGDCLNNPGSYRCVCPPGHSLGPSRTQCIADKPEEKSLCFRLVSPEHQCQHPLTTRLTRQLCCCSVGKAWGARCQRCPTDGTAAFKEICPAGKGYHILTSHQTLTIQGESDFSLFLHPDGPPKPQQLPESPSQAPPPEDTEEERGVTTDSPVSEERSVQQSHPTATTTPARPYPELISRPSPPTMRWFLPDLPPSRSAVEIAPTQVTETDECRLNQNICGHGECVPGPPDYSCHCNPGYRSHPQHRYCVDVNECEAEPCGPGRGICMNTGGSYNCHCNRGYRLHVGAGGRSCVDLNECAKPHLCGDGGFCINFPGHYKCNCYPGYRLKASRPPVCEDIDECRDPSSCPDGKCENKPGSFKCIACQPGYRSQGGGACRDVNECAEGSPCSPGWCENLPGSFRCTCAQGYAPAPDGRSCLDVDECEAGDVCDNGICSNTPGSFQCQCLSGYHLSRDRSHCEDIDECDFPAACIGGDCINTNGSYRCLCPQGHRLVGGRKCQDIDECSQDPSLCLPHGACKNLQGSYVCVCDEGFTPTQDQHGCEEVEQPHHKKECYLNFDDTVFCDSVLATNVTQQECCCSLGAGWGDHCEIYPCPVYSSAEFHSLCPDGKGYTQDNNIVNYGIPAHRDIDECMLFGSEICKEGKCVNTQPGYECYCKQGFYYDGNLLECVDVDECLDESNCRNGVCENTRGGYRCACTPPAEYSPAQRQCLSPEEMERAPERRDVCWSQRGEDGMCAGPLAGPALTFDDCCCRQGRGWGAQCRPCPPRGAGSHCPTSQSESNSFWDTSPLLLGKPPRDEDSSEEDSDECRCVSGRCVPRPGGAVCECPGGFQLDASRARCVDIDECRELNQRGLLCKSERCVNTSGSFRCVCKAGFARSRPHGACVPQRRR

SEQ ID NO: 10249 - protein, 1382 aa, Homo sapiens
VRGLVWASSWGWEVSALPAVQSASPRLPPGPRGPLPPASPAALPRCPLPSPGAPGPLLPSGAGPSPRPGAPPLPRVLRPRMPGPRGAAGGLAPEMRGAGAAGLLALLLLLLLLLGLGGRVEGGPAGERGAGGGGALARERFKVVFAPVICKRTCLKGQCRDSCQQGSNMTLIGENGHSTDTLTGSGFRVVVCPLPCMNGGQCSSRNQCLCPPDFTGRFCQVPAGGAGGGTGGSGPGLSRTGALSTGALPPLAPEGDSVASKHAIYAVQVIADPPGPGEGPPAQHAAFLVPLGPGQISAEVQAPPPVVNVRVHHPPEASVQVHRIESSNAESAAPSQHLLPHPKPSHPRPPTQKPLGRCFQDTLPKQPCGSNPLPGLTKQEDCCGSIGTAWGQSKCHKCPQLQYTGVQKPGPVRGEVGADCPQGYKRLNSTHCQDINECAMPGVCRHGDCLNNPGSYRCVCPPGHSLGPSRTQCIADKPEEKSLCFRLVSPEHQCQHPLTTRLTRQLCCCSVGKAWGARCQRCPTDGTAAFKEICPAGKGYHILTSHQTLTIQGESDFSLFLHPDGPPKPQQLPESPSQAPPPEDTEEERGVTTDSPVSEERSVQQSHPTATTTPARPYPELISRPSPPTMRWFLPDLPPSRSAVEIAPTQVTETDECRLNQNICGHGECVPGPPDYSCHCNPGYRSHPQHRYCVDVNECEAEPCGPGRGICMNTGGSYNCHCNRGYRLHVGAGGRSCVDLNECAKPHLCGDGGFCINFPGHYKCNCYPGYRLKASRPPVCEDIDECRDPSSCPDGKCENKPGSFKCIACQPGYRSQGGGACRDVNECAEGSPCSPGWCENLPGSFRCTCAQGYAPAPDGRSCLDVDECEAGDVCDNGICSNTPGSFQCQCLSGYHLSRDRSHCEDIDECDFPAACIGGDCINTNGSYRCLCPQGHRLVGGRKCQDIDECSQDPSLCLPHGACKNLQGSYVCVCDEGFTPTQDQHGCEEVEQPHHKKECYLNFDDTVFCDSVLATNVTQQECCCSLGAGWGDHCEIYPCPVYSSAEFHSLCPDGKGYTQDNNIVNYGIPAHRDIDECMLFGSEICKEGKCVNTQPGYECYCKQGFYYDGNLLECVDVDECLDESNCRNGVCENTRGGYRCACTPPAEYSPAQRQCLSPEEMDVDECQDPAACRPGRCVNLPGSYRCECRPPWVPGPSGRDCQLPESPAERAPERRDVCWSQRGEDGMCAGPLAGPALTFDDCCCRQGRGWGAQCRPCPPRGAGSHCPTSQSESNSFWDTSPLLLGKPPRDEDSSEEDSDECRCVSGRCVPRPGGAVCECPGGFQLDASRARCVDIDECRELNQRGLLCKSERCVNTSGSFRCVCKAGFARSRPHGACVPQRRR

SEQ ID NO: 10250 - protein, 266 aa, Homo sapiens
MVCLKLPGGSYMAKLTVTLMVLSSPLALAGDTRPRFLQQDKYECHFFNGTERVRFLHRDIYNQEEDLRFDSDVGEYRAVTELGRPDAEYWNSQKDFLEDRRAAVDTYCRHNYGVGESFTVQRRVEPKVTVYPARTQTLQHHNLLVCSVNGFYPGSIEVRWFRNSQEEKAGVVSTGLIQNGDWTFQTLVMLETVPRSGEVYTCQVEHPSVTSPLTVEWRAQSESAQSKMLSGVGGFVLGLLFLGAGLFIYFKNQKGHSGLHPTGLVS

SEQ ID NO: 10251 - protein, 255 aa, Homo sapiens
MTALTVTLMVLSSPLALSGDTTARFLQQDKYECHFFNGTERVRFLHRDIYNQEEDLRFDSDVGEYRAVTELGRPDAEYWNSQKDFLEDRRAAVDTYCRHNYGVGESFTVQRRVEPKVTVYPARTQTLQHHNLLVCSVNGFYPGSIEVRWFRNSQEEKAGVVSTGLIQNGDWTFQTLVMLETVPRSGEVYTCQVEHPSVTSPLTVEWRAQSESAQSKMLSGVGGFVLGLLFLGAGLFIYFKNQKGHSGLHPTGLVS

SEQ ID NO: 10252 - protein, 533 aa, Homo sapiens
MKLWVSALLMAWFGVLSCVQAEFFTSIGHMTDLIYAEKELVQSLKEYILVEEAKLSKIKSWANKMEALTSKSAADAEGYLAHPVNAYKLVKRLNTDWPALEDLVLQDSAAGFIANLSVQRQFFPTDEDEIGAAKALMRLQDTYRLDPGTISRGELPGTKYQAMLSVDDCFGMGRSAYNEGDYYHTVLWMEQVLKQLDAGEEATTTKSQVLDYLSYAVFQLGDLHRALELTRRLLSLDPSHERAGGNLRYFEQLLEEEREKTLTNQTEAELATPEGIYERPVDYLPERDVYESLCRGEGVKLTPRRQKRLFCRYHHGNRAPQLLIAPFKEEDEWDSPHIVRYYDVMSDEEIERIKEIAKPKLARATVRDPKTGVLTVASYRVSKSSWLEEDDDPVVARVNRRMQHITGLTVKTAELLQVANYGVGGQYEPHFDFSRRPFDSGLKTEGNRLATFLNYMSDVEAGGATVFPDLGAAIWPKKGTAVFWYNLLRSGEGDYRTRHAACPVLVGCKWVSNKWFHERGQEFLRPCGSTEVD

SEQ ID NO: 10253 - protein, 535 aa, Homo sapiens
MKLWVSALLMAWFGVLSCVQAEFFTSIGHMTDLIYAEKELVQSLKEYILVEEAKLSKIKSWANKMEALTSKSAADAEGYLAHPVNAYKLVKRLNTDWPALEDLVLQDSAAGFIANLSVQRQFFPTDEDEIGAAKALMRLQDTYRLDPGTISRGELPGTKYQAMLSVDDCFGMGRSAYNEGDYYHTVLWMEQVLKQLDAGEEATTTKSQVLDYLSYAVFQLGDLHRALELTRRLLSLDPSHERAGGNLRYFEQLLEEEREKTLTNQTEAELATPEGIYERPVDYLPERDVYESLCRGEGVKLTPRRQKRLFCRYHHGNRAPQLLIAPFKEEDEWDSPHIVRYYDVMSDEEIERIKEIAKPKLARATVRDPKTGVLTVASYRVSKSSWLEEDDDPVVARVNRRMQHITGLTVKTAELLQVANYGVGGQYEPHFDFSRNDERDTFKHLGTGNRVATFLNYMSDVEAGGATVFPDLGAAIWPKKGTAVFWYNLLRSGEGDYRTRHAACPVLVGCKWVSNKWFHERGQEFLRPCGSTEVD

SEQ ID NO: 10254 - protein, 900 aa, Homo sapiens
MRLFVSDGVPGCLPVLAAAGRARGRAEVLISTVGPEDCVVPFLTRPKVPVLQLDSGNYLFSTSAICRYFFLLSGWEQDDLTNQWLEWEATELQPALSAALYYLVVQGKKGEDVLGSVRRALTHIDHSLSRQNCPFLAGETESLADIVLWGALYPLLQDPAYLPEELSALHSWFQTLSTQEPCQRAAETVLKQQGVLALRPYLQKQPQPSPAEGRAVTNEPEEEELATLSEEEIAMAVTAWEKGLESLPPLRPQQNPVLPVAGERNVLITSALPYVNNVPHLGNIIGCVLSADVFARYSRLRQWNTLYLCGTDEYGTATETKALEEGLTPQEICDKYHIIHADIYRWFNISFDIFGRTTTPQQTKITQDIFQQLLKRGFVLQDTVEQLRCEHCARFLADRFVEGVCPFCGYEEARGDQCDKCGKLINAVELKKPQCKVCRSCPVVQSSQHLFLDLPKLEKRLEEWLGRTLPGSDWTPNAQFITRSWLRDGLKPRCITRDLKWGTPVPLEGFEDKVFYVWFDATIGYLSITANYTDQWERWWKNPEQVDLYQFMAKDNVPFHSLVFPCSALGAEDNYTLVSHLIATEYLNYEDGKFSKSRGVGVFGDMAQDTGIPADIWRFYLLYIRPEGQDSAFSWTDLLLKNNSELLNNLGNFINRAGMFVSKFFGGYVPEMVLTPDDQRLLAHVTLELQHYHQLLEKVRIRDALRSILTISRHGNQYIQVNEPWKRIKGSEADRQRAGTVTGLAVNIAALLSVMLQPYMPTVSATIQAQLQLPPPACSILLTNFLCTLPAGHQIGTVSPLFQKLENDQIESLRQRFGGGQAKTSPKPAVVETVTTAKPQQIQALMDEVTKQGNIVRELKAQKADKNEVAAEVAKLLDLKKQLAVAEGKPPEAPKGKKKK

SEQ ID NO: 10255 - protein, 266 aa, Homo sapiens [sequence omitted]

SEQ ID NO: 10256 - protein, 682 aa, Homo sapiens
MRKLIVGFIFLTFWTYTVRASTDLTQTGDCSQSIHQVTEVGQQIKTNFLFYSYYECMGTLKETCLYNATQYKVCSPGNDRPDVCYNPSEPPATTVFEIRLRTGLFLGDTSKIITRTVEKGIPKQITLRFDARAAINSNKLGTRCGSLNWERSYTVQNKYVCHESGVCENCAFWPCVIWATWKKNKKDPVHLQKGEANPSCAAGHCNPLELIITNPLDPPWKKGERVTLGIDGTGLNPQVAILVRGEVHKRSPKPVFQTFYEELNLPAPELPKKTKSLFLQLAGNVAHSLNVTSCYVCRGTTIGDRWPWEARELVPTDPAPDIIPVQKAQASNFWVLKTSIIGQYCIAREGKEFIVPVGKLNCIGQKLYNSTTKTITWWGLNHTEKNPFSKFSKLKTAWAHPESHQDWTAPTGLYRICGHTAYIQLPNKWAGSCVIGTIKLSFFLLPIKTGELLGFRVYTSREKRGIVIGNWKDNEWPPERIIQYYGPATWVQDGSWGYQTPIYMLNQIIRLQTVLEIITNETGRALTVLARQETQMRNAIYQNRLALDYLLAAEGGVCGKFNLTNCCLQIDDQGQVIENIVRDMTKLAHTPIQVWHKFDPESLFGKWFPAIGGFKTLIVGVLLVIRTCLLLPCVLPLLFQMIKGIVATLVHQKTSAHVNYMNHYRSISQRDSKSEDESENSH

SEQ ID NO: 10257 - protein, 546 aa, Homo sapiens [sequence omitted]

SEQ ID NO: 10258 - protein, 227 aa, Homo sapiens
  VARIANT 9, 12, 20, 35, 37, 66, 77, 126, 155, 160: Xaa = Any Amino Acid
MAHAAQVGXQDXTSPIMEEXITFHDHALMIIFLIXFXVLYALFLTLTTKLTNTNISDAQEMETVWXILPAIIVVLIXLPSLRILYMTDEVNDPSLTIKSIGHQWYWTYEYTDYGGLIFNSYMLPPXFLEPGDLRLLDVDNRVVLPIEAPIRMMIXSQDVXHSWAVPTLGLKTDAIPGRLNQTTFTATRPGVYYGQCSEICGANHSFMPIVLELIPLKIFEMGPVFTL

SEQ ID NO: 10259 - protein, 227 aa, Homo sapiens
MAHAAQVGLQDATSPIMEELITFHDHALMIIFLICFLVLYALFLTLTTKLTNTNISDAQEMETVWTILPAIILVLIALPSLRILYMTDEVNDPSLTIKSIGHQWYWTYEYTDYGGLIFNSYMLPPLFLEPGDLRLLDVDNRVVLPIEAPIRMMITSQDVLHSWAVPTLGLKTDAIPGRLNQTTFTATRPGVYYGQCSEICGANHSFMPIVLELIPLKIFEMGPVFTL

SEQ ID NO: 10260 - protein, 271 aa, Homo sapiens
MRAQEDLEGRTQHETTRDPSTPLPTEPKFDMLYKIEDVPPWYLCILLGFQHYLTCFSGTIAVPFLLAEALCVGHDQHMVSQLIGTIFTCVGITTLIQTTVGIRRSLAPLGMITAVGLSNLQFVDMNSSRNLFVLGFSMFFGLTLPNYLESNPGAINTGILEVDQILIVLLTTEMFVGGCLAFILDNTVPGSPEERGLIQWKAGAHANSDMSSSLKSYDFPIGMGIVKRITFLKYIPICPVFKGFSSSSKDQIAIPEDTPENTETASVCTKV

SEQ ID NO: 10261 - protein, 602 aa, Homo sapiens
MRAQEDLEGRTQHETTRDPSTPLPTEPKFDMLYKIEDVPPWYLCILLGFQHYLTCFSGTIAVPFLLAEALCVGHDQHMVSQLIGTIFTCVGITTLIQTTVGIRLPLFQASAFAFLVPAKAILALERWKCPPEEEIYGNWSLPLNTSHIWHPRIREVGLHVQGAIMVSSVVEVVIGLLGLPGALLNYIGPLTVTPTVSLIGLSVFQAAGDRAGSHWGISACSILLIILFSQYLRNLTFLLPVYRWGKGLTLLRIQIFKMFPIMLAIMTVWLLCYVLTLTDVLPTDPKAYGFQARTDARGDIMAIAPWIRIPYPCQWGLPTVTAAAVLGMFSATLAGIIESIGDYYACARLAGAPPPPVHAINRGIFTEGICCIIAGLLGTGNGSTSSSPNIGVLGITKVGSRRVVQYGAAIMLVLGTIGKFTALFASLPDPILGGMFCTLFGMITAVGLSNLQFVDMNSSRNLFVLGFSMFFGLTLPNYLESNPGAINTGILEVDQILIVLLTTEMFVGGCLAFILDNTVPGSPEERGLIQWKAGAHANSDMSSSLKSYDFPIGMGIVKRITFLKYIPICPVFKGFSSSSKDQIAIPEDTPENTETASVCTKV

SEQ ID NO: 10262 - protein, 598 aa, Homo sapiens
MRAQEDLEGRTQHETTRDPSTPLPTEPKFDMLYKIEDVPPWYLCILLGFQHYLTCFSGTIAVPFLLAEALCVGHDQHMVSQLIGTIFTCVGITTLIQTTVGIRLPLFQASAFAFLVPAKAILALERWKCPPEEEIYGNWSLPLNTSHIWHPRIREVQGAIMVSSVVEVVIGLLGLPGALLNYIGPLTVTPTVSLIGLSVFQAAGDRAGSHWGISACSILLIILFSQYLRNLTFLLPVYRWGKGLTLLRIQIFKMFPIMLAIMTVWLLCYVLTLTDVLPTDPKAYGFQARTDARGDIMAIAPWIRIPYPCQWGLPTVTAAAVLGMFSATLAGIIESIGDYYACARLAGAPPPPVHAINRGIFTEGICCIIAGLLGTGNGSTSSSPNIGVLGITKVGSRRVVQYGAAIMLVLGTIGKFTALFASLPDPILGGMFCTLFGMITAVGLSNLQFVDMNSSRNLFVLGFSMFFGLTLPNYLESNPGAINTGILEVDQILIVLLTTEMFVGGCLAFILDNTVPGSPEERGLIQWKAGAHANSDMSSSLKSYDFPIGMGIVKRITFLKYIPICPVFKGFSSSSKDQIAIPEDTPENTETASVCTKV

SEQ ID NO: 10263 - protein, 259 aa, Homo sapiens
MRAQEDLEGRTQHETTRDPSTPLPTEPKFDMLYKIEDVPPWYLCILLGFQHYLTCFSGTIAVPFLLAEALCVGHDQHMVSQLIGTIFTCVGMFCTLFGMITAVGLSNLQFVDMNSSRNLFVLGFSMFFGLTLPNYLESNPGAINTGILEVDQILIVLLTTEMFVGGCLAFILDNTVPGSPEERGLIQWKAGAHANSDMSSSLKSYDFPIGMGIVKRITFLKYIPICPVFKGFSSSSKDQIAIPEDTPENTETASVCTKV

SEQ ID NO: 10264 - protein, 168 aa, Homo sapiens
MTPGTQSPFFLLLLLTVLTVVTGSGHASSTPGGEKETSATQRSSVPSSTEKNALSTGVSFFFLSFHISNLQFNSSLEDPSTDYYQELQRDISEMAVCQCRRKNYGQLDIFPARDTYHPMSEYPTYHTHGRYVPPSSTDRSPYEKVSAGNGGSSLSYTNPAVAAASANL

SEQ ID NO: 10265 - protein, 1255 aa, Homo sapiens
MTPGTQSPFFLLLLLTVLTVVTGSGHASSTPGGEKETSATQRSSVPSSTEKNAVSMTSSVLSSHSPGSGSSTTQGQDVTLAPATEPASGSAATWGQDVTSVPVTRPALGSTTPPAHDVTSAPDNKPAPGSTAPPAHGVTSAPDTRPAPGSTAPPAHGVTSAPDTRPAPGSTAPPAHGVTSAPDTRPAPGSTAPPAHGVTSAPDTRPAPGSTAPPAHGVTSAPDTRPAPGSTAPPAHGVTSAPDTRPAPGSTAPPAHGVTSAPDTRPAPGSTAPPAHGVTSAPDTRPAPGSTAPPAHGVTSAPDTRPAPGSTAPPAHGVTSAPDTRPAPGSTAPPAHGVTSAPDTRPAPGSTAPPAHGVTSAPDTRPAPGSTAPPAHGVTSAPDTRPAPGSTAPPAHGVTSAPDTRPAPGSTAPPAHGVTSAPDTRPAPGSTAPPAHGVTSAPDTRPAPGSTAPPAHGVTSAPDTRPAPGSTAPPAHGVTSAPDTRPAPGSTAPPAHGVTSAPDTRPAPGSTAPPAHGVTSAPDTRPAPGSTAPPAHGVTSAPDTRPAPGSTAPPAHGVTSAPDTRPAPGSTAPPAHGVTSAPDTRPAPGSTAPPAHGVTSAPDTRPAPGSTAPPAHGVTSAPDTRPAPGSTAPPAHGVTSAPDTRPAPGSTAPPAHGVTSAPDTRPAPGSTAPPAHGVTSAPDTRPAPGSTAPPAHGVTSAPDTRPAPGSTAPPAHGVTSAPDTRPAPGSTAPPAHGVTSAPDTRPAPGSTAPPAHGVTSAPDTRPAPGSTAPPAHGVTSAPDTRPAPGSTAPPAHGVTSAPDTRPAPGSTAPPAHGVTSAPDTRPAPGSTAPPAHGVTSAPDTRPAPGSTAPPAHGVTSAPDTRPAPGSTAPPAHGVTSAPDTRPAPGSTAPPAHGVTSAPDTRPAPGSTAPPAHGVTSAPDTRPAPGSTAPPAHGVTSAPDNRPALGSTAPPVHNVTSASGSASGSASTLVHNGTSARATTTPASKSTPFSIPSHHSDTPTTLASHSTKTDASSTHHSSVPPLTSSNHSTSPQLSTGVSFFFLSFHISNLQFNSSLEDPSTDYYQELQRDISEMFLQIYKQGGFLGLSNIKFRPGSVVVQLTLAFREGTINVHDVETQFNQYKTEAASRYNLTISDVSVSDVPFPFSAQSGAGVPGWGIALLVLVCVLVALAIVYLIALAVCQCRRKNYGQLDIFPARDTYHPMSEYPTYHTHGRYVPPSSTDRSPYEKVSAGNGGSSLSYTNPAVAAASANL

SEQ ID NO: 10266 - protein, 1087 aa, Homo sapiens
MTPGTQSPFFLLLLLTVLTVVTGSGHASSTPGGEKETSATQRSSVPSSTEKNAVSMTSSVLSSHSPGSGSSTTQGQDVTLAPATEPASGSAATWGQDVTSVPVTRPALGSTTPPAHDVTSAPDNKPAPGSTAPPAHGVTSAPDTRPAPGSTAPPAHGVTSAPDTRPAPGSTAPPAHGVTSAPDTRPAPGSTAPPAHGVTSAPDTRPAPGSTAPPAHGVTSAPDTRPAPGSTAPPAHGVTSAPDTRPAPGSTAPPAHGVTSAPDTRPAPGSTAPPAHGVTSAPDTRPAPGSTAPPAHGVTSAPDTRPAPGSTAPPAHGVTSAPDTRPAPGSTAPPAHGVTSAPDTRPAPGSTAPPAHGVTSAPDTRPAPGSTAPPAHGVTSAPDTRPAPGSTAPPAHGVTSAPDTRPAPGSTAPPAHGVTSAPDTRPAPGSTAPPAHGVTSAPDTRPAPGSTAPPAHGVTSAPDTRPAPGSTAPPAHGVTSAPDTRPAPGSTAPPAHGVTSAPDTRPAPGSTAPPAHGVTSAPDTRPAPGSTAPPAHGVTSAPDTRPAPGSTAPPAHGVTSAPDTRPAPGSTAPPAHGVTSAPDTRPAPGSTAPPAHGVTSAPDTRPAPGSTAPPAHGVTSAPDTRPAPGSTAPPAHGVTSAPDTRPAPGSTAPPAHGVTSAPDTRPAPGSTAPPAHGVTSAPDTRPAPGSTAPPAHGVTSAPDTRPAPGSTAPPAHGVTSAPDTRPAPGSTAPPAHGVTSAPDTRPAPGSTAPPAHGVTSAPDTRPAPGSTAPPAHGVTSAPDTRPAPGSTAPPAHGVTSAPDTRPAPGSTAPPAHGVTSAPDTRPAPGSTAPPAHGVTSAPDTRPAPGSTAPPAHGVTSAPDTRPAPGSTAPPAHGVTSAPDTRPAPGSTAPPAHGVTSAPDTRPAPGSTAPPAHGVTSAPDTRPAPGSTAPPAHGVTSAPDNRPALGSTAPPVHNVTSASGSASGSASTLVHNGTSARATTTPASKSTPFSIPSHHSDTPTTLASHSTKTDASSTHHSSVPPLTSSNHSTSPQLSTGVSFFFLSFHISNLQFNSSLEDPSTDYYQELQRDISEMVSIGLSFPMLP

SEQ ID NO: 10267 - protein, 1243 aa, Homo sapiens
MTPGTQSPFFLLLLLTVLTGGEKETSATQRSSVPSSTEKNAVSMTSSVLSSHSPGSGSSTTQGQDVTLAPATEPASGSAATWGQDVTSVPVTRPALGSTTPPAHDVTSAPDNKPAPGSTAPPAHGVTSAPDTRPAPGSTAPPAHGVTSAPDTRPAPGSTAPPAHGVTSAPDTRPAPGSTAPPAHGVTSAPDTRPAPGSTAPPAHGVTSAPDTRPAPGSTAPPAHGVTSAPDTRPAPGSTAPPAHGVTSAPDTRPAPGSTAPPAHGVTSAPDTRPAPGSTAPPAHGVTSAPDTRPAPGSTAPPAHGVTSAPDTRPAPGSTAPPAHGVTSAPDTRPAPGSTAPPAHGVTSAPDTRPAPGSTAPPAHGVTSAPDTRPAPGSTAPPAHGVTSAPDTRPAPGSTAPPAHGVTSAPDTRPAPGSTAPPAHGVTSAPDTRPAPGSTAPPAHGVTSAPDTRPAPGSTAPPAHGVTSAPDTRPAPGSTAPPAHGVTSAPDTRPAPGSTAPPAHGVTSAPDTRPAPGSTAPPAHGVTSAPDTRPAPGSTAPPAHGVTSAPDTRPAPGSTAPPAHGVTSAPDTRPAPGSTAPPAHGVTSAPDTRPAPGSTAPPAHGVTSAPDTRPAPGSTAPPAHGVTSAPDTRPAPGSTAPPAHGVTSAPDTRPAPGSTAPPAHGVTSAPDTRPAPGSTAPPAHGVTSAPDTRPAPGSTAPPAHGVTSAPDTRPAPGSTAPPAHGVTSAPDTRPAPGSTAPPAHGVTSAPDTRPAPGSTAPPAHGVTSAPDTRPAPGSTAPPAHGVTSAPDTRPAPGSTAPPAHGVTSAPDTRPAPGSTAPPAHGVTSAPDTRPAPGSTAPPAHGVTSAPDTRPAPGSTAPPAHGVTSAPDTRPAPGSTAPPAHGVTSAPDTRPAPGSTAPPAHGVTSAPDTRPAPGSTAPPAHGVTSAPDNRPALGSTAPPVHNVTSASGSASGSASTLVHNGTSARATTTPASKSTPFSIPSHHSDTPTTLASHSTKTDASSTHHSSVPPLTSSNHSTSPQLSTGVSFFFLSFHISNLQFNSSLEDPSTDYYQELQRDISEMFLQIYKQGGFLGLSNIKFRPGSVVVQLTLAFREGTINVHDVETQFNQYKTEAASRYNLTISDVSVSDVPFPFSAQSGAGVPGWGIALLVLVCVLVALAIVYLIALAVCQCRRKNYGQLDIFPARDTYHPMSEYPTYHTHGRYVPPSSTDRSPYEKVSAGNGGSSLSYTNPAVAAASANL

SEQ ID NO: 10268 - protein, 273 aa, Homo sapiens
MTPGTQSPFFLLLLLTVLTVVTGSGHASSTPGGEKETSATQRSSVPSSTEKNALSTGVSFFFLSFHISNLQFNSSLEDPSTDYYQELQRDISEMFLQIYKQGGFLGLSNIKFRPGSVVVQLTLAFREGTINVHDVETQFNQYKTEAASRYNLTISDVSVSDVPFPFSAQSGAGVPGWGIALLVLVCVLVALAIVYLIALAVCQCRRKNYGQLDIFPARDTYHPMSEYPTYHTHGRYVPPSSTDRSPYEKVSAGNGGSSLSYTNPAVAAASANL

SEQ ID NO: 10269 - protein, 1252 aa, Homo sapiens
MTPGTQSPFFLLLLLTVLTGSGHASSTPGGEKETSATQRSSVPSSTEKNAVSMTSSVLSSHSPGSGSSTTQGQDVTLAPATEPASGSAATWGQDVTSVPVTRPALGSTTPPAHDVTSAPDNKPAPGSTAPPAHGVTSAPDTRPAPGSTAPPAHGVTSAPDTRPAPGSTAPPAHGVTSAPDTRPAPGSTAPPAHGVTSAPDTRPAPGSTAPPAHGVTSAPDTRPAPGSTAPPAHGVTSAPDTRPAPGSTAPPAHGVTSAPDTRPAPGSTAPPAHGVTSAPDTRPAPGSTAPPAHGVTSAPDTRPAPGSTAPPAHGVTSAPDTRPAPGSTAPPAHGVTSAPDTRPAPGSTAPPAHGVTSAPDTRPAPGSTAPPAHGVTSAPDTRPAPGSTAPPAHGVTSAPDTRPAPGSTAPPAHGVTSAPDTRPAPGSTAPPAHGVTSAPDTRPAPGSTAPPAHGVTSAPDTRPAPGSTAPPAHGVTSAPDTRPAPGSTAPPAHGVTSAPDTRPAPGSTAPPAHGVTSAPDTRPAPGSTAPPAHGVTSAPDTRPAPGSTAPPAHGVTSAPDTRPAPGSTAPPAHGVTSAPDTRPAPGSTAPPAHGVTSAPDTRPAPGSTAPPAHGVTSAPDTRPAPGSTAPPAHGVTSAPDTRPAPGSTAPPAHGVTSAPDTRPAPGSTAPPAHGVTSAPDTRPAPGSTAPPAHGVTSAPDTRPAPGSTAPPAHGVTSAPDTRPAPGSTAPPAHGVTSAPDTRPAPGSTAPPAHGVTSAPDTRPAPGSTAPPAHGVTSAPDTRPAPGSTAPPAHGVTSAPDTRPAPGSTAPPAHGVTSAPDTRPAPGSTAPPAHGVTSAPDTRPAPGSTAPPAHGVTSAPDTRPAPGSTAPPAHGVTSAPDTRPAPGSTAPPAHGVTSAPDTRPAPGSTAPPAHGVTSAPDTRPAPGSTAPPAHGVTSAPDNRPALGSTAPPVHNVTSASGSASGSASTLVHNGTSARATTTPASKSTPFSIPSHHSDTPTTLASHSTKTDASSTHHSSVPPLTSSNHSTSPQLSTGVSFFFLSFHISNLQFNSSLEDPSTDYYQELQRDISEMFLQIYKQGGFLGLSNIKFRPGSVVVQLTLAFREGTINVHDVETQFNQYKTEAASRYNLTISDVSVSDVPFPFSAQSGAGVPGWGIALLVLVCVLVALAIVYLIALAVCQCRRKNYGQLDIFPARDTYHPMSEYPTYHTHGRYVPPSSTDRSPYEKVSAGNGGSSLSYTNPAVAAASANL

SEQ ID NO: 10270 - protein, 1264 aa, Homo sapiens
MTPGTQSPFFLLLLLTVLTATTAPKPATVVTGSGHASSTPGGEKETSATQRSSVPSSTEKNAVSMTSSVLSSHSPGSGSSTTQGQDVTLAPATEPASGSAATWGQDVTSVPVTRPALGSTTPPAHDVTSAPDNKPAPGSTAPPAHGVTSAPDTRPAPGSTAPPAHGVTSAPDTRPAPGSTAPPAHGVTSAPDTRPAPGSTAPPAHGVTSAPDTRPAPGSTAPPAHGVTSAPDTRPAPGSTAPPAHGVTSAPDTRPAPGSTAPPAHGVTSAPDTRPAPGSTAPPAHGVTSAPDTRPAPGSTAPPAHGVTSAPDTRPAPGSTAPPAHGVTSAPDTRPAPGSTAPPAHGVTSAPDTRPAPGSTAPPAHGVTSAPDTRPAPGSTAPPAHGVTSAPDTRPAPGSTAPPAHGVTSAPDTRPAPGSTAPPAHGVTSAPDTRPAPGSTAPPAHGVTSAPDTRPAPGSTAPPAHGVTSAPDTRPAPGSTAPPAHGVTSAPDTRPAPGSTAPPAHGVTSAPDTRPAPGSTAPPAHGVTSAPDTRPAPGSTAPPAHGVTSAPDTRPAPGSTAPPAHGVTSAPDTRPAPGSTAPPAHGVTSAPDTRPAPGSTAPPAHGVTSAPDTRPAPGSTAPPAHGVTSAPDTRPAPGSTAPPAHGVTSAPDTRPAPGSTAPPAHGVTSAPDTRPAPGSTAPPAHGVTSAPDTRPAPGSTAPPAHGVTSAPDTRPAPGSTAPPAHGVTSAPDTRPAPGSTAPPAHGVTSAPDTRPAPGSTAPPAHGVTSAPDTRPAPGSTAPPAHGVTSAPDTRPAPGSTAPPAHGVTSAPDTRPAPGSTAPPAHGVTSAPDTRPAPGSTAPPAHGVTSAPDTRPAPGSTAPPAHGVTSAPDTRPAPGSTAPPAHGVTSAPDTRPAPGSTAPPAHGVTSAPDTRPAPGSTAPPAHGVTSAPDTRPAPGSTAPPAHGVTSAPDNRPALGSTAPPVHNVTSASGSASGSASTLVHNGTSARATTTPASKSTPFSIPSHHSDTPTTLASHSTKTDASSTHHSSVPPLTSSNHSTSPQLSTGVSFFFLSFHISNLQFNSSLEDPSTDYYQELQRDISEMFLQIYKQGGFLGLSNIKFRPGSVVVQLTLAFREGTINVHDVETQFNQYKTEAASRYNLTISDVSVSDVPFPFSAQSGAGVPGWGIALLVLVCVLVALAIVYLIALAVCQCRRKNYGQLDIFPARDTYHPMSEYPTYHTHGRYVPPSSTDRSPYEKVSAGNGGSSLSYTNPAVAAASANL

SEQ ID NO: 10271 - protein, 650 aa, Homo sapiens
SSTPGGEKETSATQRSSVPSSTEKNAVSMTSSVLSSHSPGSGSSTTQGQDVTLAPATEPASGSAATWGQDVTSVPVTRPALGSTTPPAHDVTSAPDNKPAPGSTAPPAHGVTSAPDTRPAPGSTAPQAHGVTSAPDTRPAPGSTHGVTSAPDTRPAPGSTAPPAHGVTSAPDTRPAPGSTAPPAHGVTSAPDTRPAPGSTAPPAHGVTSAPDTRPAPGSTAPPAHGVTSAPDTRPAPGSTAPPAHGVTSAPDTRPAPGSTAPPAHGVTSAPDTRPAPGSTAPPAHGVTSAPDTRRAPGSTPAPGSTAPPAHGVTSAPDTRPAPGSTAPPAHGVTSAPDNRPALGSTAPPVHNVTSASGSASGSASTLVHNGTSARATTTPASKSTPFSIPSHHSDTPTTLASHSTKTDASSTHHSTVPPLTSSNHSTSPQLSTGVSFFFLSFHISNLQFNSSLEDPSTDYYQELQRDISEMFLQIYKQGGFLGLSNIKFRPGSVVVQLTLAFREGTINVHDVETQFNQYKTEAASRYNLTISDVSVSDVPFPFSAQSGAGVPGWGIALLVLVCVLVALAIVYLIALAVCQCRRKNYGQLDIFPARDTYHPMSEYPTYHTHGRYVPPSSTDRSPYEKVSAGNGGSSLSYTNPAVAATSANL

SEQ ID NO: 10272 - protein, 419 aa, Homo sapiens
MELAALCRWGLLLALLPPGAASTQVCTGTDMKLRLPASPETHLDMLRHLYQGCQVVQGNLELTYLPTNASLSFLQDIQEVQGYVLIAHNQVRQVPLQRLRIVRGTQLFEDNYALAVLDNGDPLNNTTPVTGASPGGLRELQLRSLTEILKGGVLIQRNPQLCYQDTILWKDIFHKNNQLALTLIDTNRSRACHPCSPMCKGSRCWGESSEDCQSLTRTVCAGGCARCKGPLPTDCCHEQCAAGCTGPKHSDCLACLHFNHSGICELHCPALVTYNTDTFESMPNPEGRYTFGASCVTACPYNYLSTDVGSCTLVCPLHNQEVTAEDGTQRCEKCSKPCARGTHSLPPRPAAVPVPLRMQPGPAHPVLSFLRPSWDLVSAFYSLPLAPLSPTSVPISPVSVGRGPDPDAHVAVDLSRYEG

SEQ ID NO: 10273 - protein, 137 aa, Homo sapiens
MGAGPSLLLAALLLLLSGDGAVRCDTPANCTYLDLLGTWVFQVGSSGSQRDVNCSVMGPQEKKVVVYLQKLDTAYDDLGNSGHFTIIYNQGFEIVLNDYKWFAFFKDVTDFISHLFMQLGTVGIYDLPHLRNKLVIK

SEQ ID NO: 10274 - protein, 308 aa, Homo sapiens
MWKRWLALALALVAVAWVRAEEELRSKSKICANVFCGAGRECAVTEKGEPTCLCIEQCKPHKRPVCGSNGKTYLNHCELHRDACLTGSKIQVDYDGHCKEKKSVSPSASPVVCYQSNRDELRRRIIQWLEAEIIPDGWFSKGSNYSEILDKYFKNFDNGDSRLDSSEFLKFVEQNETAINITTYPDQENNKLLRGLCVDALIELSDENADWKLSFQEFLKCLNPSFNPPEKKCALEDETYADGAETEVDCNRCVCACGNWVCTAMTCDGKNQKGAQTQTEEEMTRYVQELQKHQETAEKTKRVSTKEI

SEQ ID NO: 10275 - protein, 252 aa, Homo sapiens
MAQLCGLRRSRAFLALLGSLLLSGVLAADRERSIHDFCLVSKVVGRCRASMPRWWYNVTDGSCQLFVYGGCDGNSNNYLTKEECLKKCATVTENATGDLATSRNAADSSVPSAPRRQDSEDHSSDMFNYEEYCTANAVTGPCRASFPRWYFDVERNSCNNFIYGGCRGNKNSYRSEEACMLRCFRQQENPPLPLGSKVVVLAGLFVMVLILFLGASMVYLIRVARRNQERALRTVWSSGDDKEQLVKNTYVL

SEQ ID NO: 10276 - protein, 748 aa, Homo sapiens
MVLLRVLILLLSWAAGMGGQYGNPLNKYIRHYEGLSYNVDSLHQKHQRAKRAVSHEDQFLRLDFHAHGRHFNLRMKRDTSLFSDEFKVETSNKVLDYDTSHIYTGHIYGEEGSFSHGSVIDGRFEGFIQTRGGTFYVEPAERYIKDRTLPFHSVIYHEDDINYPHKYGPQGGCADHSVFERMRKYQMTGVEEVTQIPQEEHAANGPELLRKKRTTSAEKNTCQLYIQTDHLFFKYYGTREAVIAQISSHVKAIDTIYQTTDFSGIRNISFMVKRIRINTTADEKDPTNPFRFPNIGVEKFLELNSEQNHDDYCLAYVFTDRDFDDGVLGLAWVGAPSGSSGGICEKSKLYSDGKKKSLNTGIITVQNYGSHVPPKVSHITFAHEVGHNFGSPHDSGTECTPGESKNLGQKENGNYIMYARATSGDKLNNNKFSLCSIRNISQVLEKKRNNCFVESGQPICGNGMVEQGEECDCGYSDQCKDECCFDANQPEGRKCKLKPGKQCSPSQGPCCTAQCAFKSKSEKCRDDSDCAREGICNGFTALCPASDPKPNFTDCNRHTQVCINGQCAGSICEKYGLEECTCASSDGKDDKELCHVCCMKKMDPSTCASTGSVQWSRHFSGRTITLQPGSPCNDFRGYCDVFMRCRLVDADGPLARLKKAIFSPELYENIAEWIVAHWWAVLLMGIALIMLMAGFIKICSVHTPSSNPKLPPPKPLPGTLKRRRPPQPIQQPQRQRPRESYQMGHMRR

SEQ ID NO: 10277 - protein, 981 aa, Homo sapiens
MLRRPAPALAPAARLLLAGLLCGGGVWAARVNKHKPWLEPTYHGIVTENDNTVLLDPPLIALDKDAPLRFAESFEVTVTKEGEICGFKIHGQNVPFDAVVVDKSTGEGVIRSKEKLDCELQKDYSFTIQAYDCGKGPDGTNVKKSHKATVHIQVNDVNEYAPVFKEKSYKATVIEGKQYDSILRVEAVDADCSPQFSQICSYEIITPDVPFTVDKDGYIKNTEKLNYGKEHQYKLTVTAYDCGKKRATEDVLVKISIKPTCTPGWQGWNNRIEYEPGTGALAVFPNIHLETCDEPVASVQATVELETSHIGKGCDRDTYSEKSLHRLCGAAAGTAELLPSPSGSLNWTMGLPTDNGHDSDQVFEFNGTQAVRIPDGVVSVSPKEPFTISVWMRHGPFGRKKETILCSSDKTDMNRHHYSLYVHGCRLIFLFRQDPSEEKKYRPAEFHWKLNQVCDEEWHHYVLNVEFPSVTLYVDGTSHEPFSVTEDYPLHPSKIETQLVVGACWQEFSGVENDNETEPVTVASAGGDLHMTQFFRGNLAGLTLRSGKLADKKVIDCLYTCKEGLDLQVLEDSGRGVQIQAHPSQLVLTLEGEDLGELDKAMQHISYLNSRQFPTPGIRRLKITSTIKCFNEATCISVPPVDGYVMVLQPEEPKISLSGVHHFARAASEFESSEGVFLFPELRIISTITREVEPEGDGAEDPTVQESLVSEEIVHDLDTCEVTVEGEELNHEQESLEVDMARLQQKGIEVSSSELGMTFTGVDTMASYEEVLHLLRYRNWHARSLLDRKFKLICSELNGRYISNEFKVEVNVIHTANPMEHANHMAAQPQFVHPEHRSFVDLSGHNLANPHPFAVVPSTATVVIVVCVSFLVFMIILGVFRIRAAHRRTMRDQDTGKENEMDWDDSALTITVNPMETYEDQHSSEEEEEEEEEEESEDGEEEDDITSAESESSEEEEGEQGDPQNATRQQQLEWDDSTLSY

SEQ ID NO: 10278 - protein, 228 aa, Homo sapiens
MLHVEMLTLVFLVLWMCVFSQDPGSKAVADRYAVYWNSSNPRFQRGDYHIDVCINDYLDVFCPHYEDSVPEDKTERYVLYMVNFDGYSACDHTSKGFKRWECNRPHSPNGPLKFSEKFQLFTPFSLGFEFRPGREYFYISSAIPDNGRRSCLKLKVFVRPTNSCMKTIGVHDRVFDVNDKVENSLEPADDTVHESAEPSRGENAAQTPRIPSRLLAILLFLLAMLLTL

SEQ ID NO: 10279 - protein, 1439 aa, Homo sapiens [sequence omitted]

SEQ ID NO: 10280 - protein, 1440 aa, Homo sapiens [sequence omitted]

SEQ ID NO: 10281 - protein, 819 aa, Homo sapiens
MGSGARFPSGTLRVRWLLLLGLVGPVLGAARPGFQQTSHLSSYEIITPWRLTRERREAPRPYSKQVSYVIQAEGKEHIIHLERNKDLLPEDFVVYTYNKEGTLITDHPNIQNHCHYRGYVEGVHNSSIALSDCFGLRGLLHLENASYGIEPLQNSSHFEHIIYRMDDVYKEPLKCGVSNKDIEKETAKDEEEEPPSMTQLLRRRRAVLPQTRYVELFIVVDKERYDMMGRNQTAVREEMILLANYLDSMYIMLNIRIVLVGLEIWTNGNLINIVGGAGDVLGNFVQWREKFLITRRRHDSAQLVLKKGFGGTAGMAFVGTVCSRSHAGGINVFGQITVETFASIVAHELGHNLGMNHDDGRDCSCGAKSCIMNSGASGSRNFSSCSAEDFEKLTLNKGGNCLLNIPKPDEAYSAPSCGNKLVDAGEECDCGTPKECELDPCCEGSTCKLKSFAECAYGDCCKDCRFLPGGTLCRGKTSECDVPEYCNGSSQFCQPDVFIQNGYPCQNNKAYCYNGMCQYYDAQCQVIFGSKAKAAPKDCFIEVNSKGDRFGNCGFSGNEYKKCATGNALCGKLQCENVQEIPVFGIVPAIIQTPSRGTKCWGVDFQLGSDVPDPGMVNEGTKCGAGKICRNFQCVDASVLNYDCDVQKKCHGHGVCNSNKNCHCENGWAPPNCETKGYGGSVDSGPTYNEMNTALRDGLLVFFFLIVPLIVCAIFIFIKRDQLWRSYFRKKRSQTYESDGKNQANPSRQPGSVPRHVSPVTPPREVPIYANRFAVPTYAAKQPQQFPSRPPPPQPKVSSQGNLIPARPAPAPPLYSSLT

SEQ ID NO: 10282 - protein, 258 aa, Homo sapiens
MRPAALRGALLGCLCLALLCLGGADKRLRDNHEWKKLIMVQHWPETVCEKIQNDCRDPPDYWTIHGLWQVPDKSEGCNRSWPFNLEEIKDLLPEMRAYWPDVIHSFPNRSRFWKHEWEKHGTCAAQVDALNSQKKYFGRSLELYRELDLNSVLLKLGIKPSINYYQVADFKDALARVYGVIPKIQCLPPSQDEEVQTIGQIELCLTKQDQQLQNCTEPGEQPSPKQEVWLANGAAESRGLRVCEDGPVFYPPPKKTKH

SEQ ID NO: 10283 - protein, 282 aa, Homo sapiens
MERPSLRALLLGAAGLLLLLLPLSSSSSSDTCGPCEPASCPPLPPLGCLLGETRDACGCCPMCARGEGEPCGGGGAGRGYCAPGMECVKSRKRRKGKAGAAAGGPGVSGVCVCKSRYPVCGSDGTTYPSGCQLRAASQRAESRGEKAITQVSKGTCEQGPSIVTPPKDIWNVTGAQVYLSCEVIGIPTPVLIWNKVKRGHYGVQRTELLPGDRDNLAIQTRGGPEKHEVTGWVLVSPLSKEDAGEYECHASNSQGQASASAKITVVDALHEIPVKKGEGAEL

SEQ ID NO: 10284 - protein, 534 aa, Homo sapiens
MARGLQVPLPRLATGLLLLLSVQPWAESGKVLVVPTDGSPWLSMREALRELHARGHQAVVLTPEVNMHIKEEKFFTLTAYAVPWTQKEFDRVTLGYTQGFFETEHLLKRYSRSMAIMNNVSLALHRCCVELLHNEALIRHLNATSFDVVLTDPVNLCGAVLAKYLSIPAVFFWRYIPCDLDFKGTQCPNPSSYIPKLLTTNSDHMTFLQRVKNMLYPLALSYICHTFSAPYASLASELFQREVSVVDLVSYASVWLFRGDFVMDYPRPIMPNMVFIGGINCANGKPLSQEFEAYINASGEHGIVVFSLGSMVSEIPEKKAMAIADALGKIPQTVLWRYTGTRPSNLANNTILVKWLPQNDLLGHPMTRAFITHAGSHGVYESICNGVPMVMMPLFGDQMDNAKRMETKGAGVTLNVLEMTSEDLENALKAVINDKSYKENIMRLSSLHKDRPVEPLDLAVFWVEFVMRHKGAPHLRPAAHDLTWYQYHSLDVIGFLLAVVLTVAFITFKCCAYGYRKCLGKKGRVKKAHKSKTH

SEQ ID NO: 10285 - protein, 533 aa, Homo sapiens
MAVESQGGRPLVLGLLLCVLGPVVSHAGKILLIPVDGSHWLSMLGAIQQLQQRGHEIVVLAPDASLYIRDGAFYTLKTYPVPFQREDVKESFVSLGHNVFENDSFLQRVIKTYKKIKKDSAMLLSGCSHLLHNKELMASLAESSFDVMLTDPFLPCSPIVAQYLSLPTVFFLHALPCSLEFEATQCPNPFSYVPRPLSSHSDHMTFLQRVKNMLIAFSQNFLCDVVYSPYATLASEFLQREVTVQDLLSSASVWLFRSDFVKDYPRPIMPNMVFVGGINCLHQNPLSQEFEAYINASGEHGIVVFSLGSMVSEIPEKKAMAIADALGKIPQTVLWRYTGTRPSNLANNTILVKWLPQNDLLGHPMTRAFITHAGSHGVYESICNGVPMVMMPLFGDQMDNAKRMETKGAGVTLNVLEMTSEDLENALKAVINDKSYKENIMRLSSLHKDRPVEPLDLAVFWVEFVMRHKGAPHLRPAAHDLTWYQYHSLDVIGFLLAVVLTVAFITFKCCAYGYRKCLGKKGRVKKAHKSKTH

SEQ ID NO: 10286 - protein, 533 aa, Homo sapiens
MATGPQVPLLWLATGVLLLLSAQPWAESGKVLVVPIDGSHWLMREAVRELHARGHQAVVLTPEVNMHIKQEKFFTLTTYAISWTQDEFDRLVLGHTQLYFETEHFLKTFSKSMAILKNSSLVFHRSCVELLHNEALIRHLNATSFDVVLIDPIYLCGAVLAKYLSIPAVFFLRNIPCDLDFKGTQCPNPSSYIPKLLTTNSDHMTFLQRVKNMLYPLALSYLCHALSAPYASLASELFQREVSVVDLLSHASVWLFRGDFVMDYPRPIMPNMVFIGGINCANRKPLSQEFEAYINASGEHGIVVFSLGSMVSEIPEKKAMAIADALGKIPQTVLWRYTGTRPSNLANNTILVKWLPQNDLLGHPMTRAFITHAGSHGVYESICNGVPMVMMPLFGDQMDNAKRMETKGAGVTLNVLEMTSEDLENALKAVINDKSYKENIMRLSSLHKDRPVEPLDLAVFWVEFVMRHKGAPHLRPAAHDLTWYQYHSLDVIGFLLAVVLTVAFITFKCCAYGYRKCLGKKGRVKKAHKSKTH

SEQ ID NO: 10287 - protein, 530 aa, Homo sapiens
MARAGWTSPVPLCVCLLLTCGFAEAGKLLVVPMDGSHWFTMQSVVEKLILRGHEVVVVMPEVSWQLERSLNCTVKTYSTSYTLEDQNREFMVFAHAQWKAQAQSIFSLLMSSSSGFLDLFFSHCRSLFNDRKLVEYLKESSFDAVFLDPFDTCGLIVAKYFSLPSVVFTRGIFCHHLEEGAQCPAPLSYVPNDLLGFSDAMTFKERVWNHIVHLEDHLFCQYLFRNALEIASEILQTPVTAYDLYSHTSIWLLRTDFVLDYPKPVMPNMIFIGGINCHQGKPLPMEFEAYINASGEHGIVVFSLGSMVSEIPEKKAMAIADALGKIPQTVLWRYTGTRPSNLANNTILVKWLPQNDLLGHPMTRAFITHAGSHGVYESICNGVPMVMMPLFGDQMDNAKRMETKGAGVTLNVLEMTSEDLENALKAVINDKSYKENIMRLSSLHKDRPVEPLDLAVFWVEFVMRHKGAPHLRPAAHDLTWYQYHSLDVIGFLLAVVLTVAFITFKCCAYGYRKCLGKKGRVKKAHKSKTH

SEQ ID NO: 10288 - protein, 530 aa, Homo sapiens
MACTGWTSPLPLCVCLLLTCGFAEAGKLLVVPMDGSHWFTMRSVVEKLILRGHEVVVVMPEVSWQLGRSLNCTVKTYSTSYTLEDLDREFKAFAHAQWKAQVRSIYSLLMGSYNDIFDLFFSNCRSLFKDKKLVEYLKESSFDAVFLDPFDNCGLIVAKYFSLPSVVFARGILCHYLEEGAQCPAPLSYVPRILLGFSDAMTFKERVRNHIMHLEEHLLCHRFFKNALEIASEILQTPVTEYDLYSHTSIWLLRTDFVLDYPKPVMPNMIFIGGINCHQGKPLPMEFEAYINASGEHGIVVFSLGSMVSEIPEKKAMAIADALGKIPQTVLWRYTGTRPSNLANNTILVKWLPQNDLLGHPMTRAFITHAGSHGVYESICNGVPMVMMPLFGDQMDNAKRMETKGAGVTLNVLEMTSEDLENALKAVINDKSYKENIMRLSSLHKDRPVEPLDLAVFWVEFVMRHKGAPHLRPAAHDLTWYQYHSLDVIGFLLAVVLTVAFITFKCCAYGYRKCLGKKGRVKKAHKSKTH

SEQ ID NO: 10289 - protein, 532 aa, Homo sapiens [sequence omitted]

SEQ ID NO: 10290 - protein, 532 aa, Homo sapiens
MACLLRSFQRISAGVFFLALWGMVVGDKLLVVPQDGSHWLSMKDIVEVLSDRGHEIVVVVPEVNLLLKESKYYTRKIYPVPYDQEELKNRYQSFGNNHFAERSFLTAPQTEYRNNMIVIGLYFINCQSLLQDRDTLNFFKESKFDALFTDPALPCGVILAEYLGLPSVYLFRGFPCSLEHTFSRSPDPVSYIPRCYTKFSDHMTFSQRVANFLVNLLEPYLFYCLFSKYEELASAVLKRDVDIITLYQKVSVWLLRYDFVLEYPRPVMPNMVFIGGINCKKRKDLSQEFEAYINASGEHGIVVFSLGSMVSEIPEKKAMAIADALGKIPQTVLWRYTGTRPSNLANNTILVKWLPQNDLLGHPMTRAFITHAGSHGVYESICNGVPMVMMPLFGDQMDNAKRMETKGAGVTLNVLEMTSEDLENALKAVINDKSYKENIMRLSSLHKDRPVEPLDLAVFWVEFVMRHKGAPHLRPAAHDLTWYQYHSLDVIGFLLAVVLTVAFITFKCCAYGYRKCLGKKGRVKKAHKSKTH

SEQ ID NO: 10291 - protein, 530 aa, Homo sapiens
MARTGWTSPIPLCVSLLLTCGFAEAGKLLVVPMDGSHWFTMQSVVEKLILRGHEVVVVMPEVSWQLGKSLNCTVKTYSTSYTLEDLDREFMDFADAQWKAQVRSLFSLFLSSSNGFFNLFFSHCRSLFNDRKLVEYLKESSFDAVFLDPFDACGLIVAKYFSLPSVVFARGIACHYLEEGAQCPAPLSYVPRILLGFSDAMTFKERVRNHIMHLEEHLFCQYFSKNALEIASEILQTPVTAYDLYSHTSIWLLRTDFVLDYPKPVMPNMIFIGGINCHQGKPLPMEFEAYINASGEHGIVVFSLGSMVSEIPEKKAMAIADALGKIPQTVLWRYTGTRPSNLANNTILVKWLPQNDLLGHPMTRAFITHAGSHGVYESICNGVPMVMMPLFGDQMDNAKRMETKGAGVTLNVLEMTSEDLENALKAVINDKSYKENIMRLSSLHKDRPVEPLDLAVFWVEFVMRHKGAPHLRPAAHDLTWYQYHSLDVIGFLLAVVLTVAFITFKCCAYGYRKCLGKKGRVKKAHKSKTH

SEQ ID NO: 10292 - protein, 534 aa, Homo sapiens
MATGLQVPLPWLATGLLLLLSVQPWAESGKVLVVPIDGSHWLSMREVLRELHARGHQAVVLTPEVNMHIKEENFFTLTTYAISWTQDEFDRHVLGHTQLYFETEHFLKKFFRSMAMLNNMSLVYHRSCVELLHNEALIRHLNATSFDVVLTDPVNLCAAVLAKYLSIPTVFFLRNIPCDLDFKGTQCPNPSSYIPRLLTTNSDHMTFMQRVKNMLYPLALSYICHAFSAPYASLASELFQREVSVVDILSHASVWLFRGDFVMDYPRPIMPNMVFIGGINCANRKPLSQEFEAYINASGEHGIVVFSLGSMVSEIPEKKAMAIADALGKIPQTVLWRYTGTRPSNLANNTILVKWLPQNDLLGHPMTRAFITHAGSHGVYESICNGVPMVMMPLFGDQMDNAKRMETKGAGVTLNVLEMTSEDLENALKAVINDKSYKENIMRLSSLHKDRPVEPLDLAVFWVEFVMRHKGAPHLRPAAHDLTWYQYHSLDVIGFLLAVVLTVAFITFKCCAYGYRKCLGKKGRVKKAHKSKTH

SEQ ID NO: 10293 - protein, 530 aa, Homo sapiens
MARAGWTGLLPLYVCLLLTCGFAKAGKLLVVPMDGSHWFTMQSVVEKLILRGHEVVVVMPEVSWQLGRSLNCTVKTYSTSYTLEDQDREFMVFADARWTAPLRSAFSLLTSSSNGIFDLFFSNCRSLFNDRKLVEYLKESCFDAVFLDPFDACGLIVAKYFSLPSVVFARGIFCHYLEEGAQCPAPLSYVPRLLLGFSDAMTFKERVWNHIMHLEEHLFCPYFFKNVLEIASEILQTPVTAYDLYSHTSIWLLRTDFVLEYPKPVMPNMIFIGGINCHQGKPVPMEFEAYINASGEHGIVVFSLGSMVSEIPEKKAMAIADALGKIPQTVLWRYTGTRPSNLANNTILVKWLPQNDLLGHPMTRAFITHAGSHGVYESICNGVPMVMMPLFGDQMDNAKRMETKGAGVTLNVLEMTSEDLENALKAVINDKSYKENIMRLSSLHKDRPVEPLDLAVFWVEFVMRHKGAPHLRPAAHDLTWYQYHSLDVIGFLLAVVLTVAFITFKCCAYGYRKCLGKKGRVKKAHKSKTH

SEQ ID NO: 10294 - protein, 505 aa, Homo sapiens
MAAENSKQFWKRSAKLPGSIQPVYGAQHPPLDPRLTKNFIKERSKVNTVPLKNKKASSFHEFARNTSDAWDIGDDEEEDFSSPSFQTLNSKVALATAAQVLENHSKLRVKPERSQSTTSDVPANYKVIKSSSDAQLSRNSSDTCLRNPLHKQQSLPLRPIIPLVARISDQNASGAPPMTVREKTRLEKFRQLLSSQNTDLDELRKCSWPGVPREVRPITWRLLSGYLPANTERRKLTLQRKREEYFGFIEQYYDSRNEEHHQDTYRQIHIDIPRTNPLIPLFQQPLVQEIFERILFIWAIRHPASGYVQGINDLVTPFFVVFLSEYVEEDVENFDVTNLSQDMLRSIEADSFWCMSKLLDGIQDNYTFAQPGIQKKVKALEELVSRIDEQVHNHFRRYEVEYLQFAFRWMNNLLMRELPLRCTIRLWDTYQSEPEGFSHFHLYVCAAFLIKWRKEILDEEDFQGLLMLLQNLPTIHWGNEEIGLLLAEAYRLKYMFADAPNHYRR

SEQ ID NO: 10295 - protein, 302 aa, Homo sapiens
MCAERLGQFMTLALVLATFDPARGTDATNPPEGPQDRSSQQKGRLSLQNTAEIQHCLVNAGDVGCGVFECFENNSCEIRGLHGICMTFLHNAGKFDAQGKSFIKDALKCKAHALRHRFGCISRKCPAIREMVSQLQRECYLKHDLCAAAQENTRVIVEMIHFKDLLLHEPYVDLVNLLLTCGEEVKEAITHSVQVQCEQNWGSLCSILSFCTSAIQKPPTAPPERQPQVDRTKLSRAHHGEAGHHLPEPSSRETGRGAKGERGSKSHPNAHARGRVGGLGAQGPSGSSEWEDEQSEYSDIRR

SEQ ID NO: 10296 - protein, 205 aa, Homo sapiens
MEFLWAPLLGLCCSLAAADRHTVFWNSSNPKFRNEDYTIHVQLNDYVDIICPHYEDHSVADAAMEQYILYLVEHEEYQLCQPQSKDQVRWQCNRPSAKHGPEKLSEKFQRFTPFTLGKEFKEGHSYYYISKPIHQHEDRCLRLKVTVSGKITHSPQAHVNPQEKRLAADDPEVRVLHSIGHSAAPRLFPLAWTVLLLPLLLLQTP

SEQ ID NO: 10297 - protein, 183 aa, Homo sapiens
MEFLWAPLLGLCCSLAAADRHTVFWNSSNPKFRNEDYTIHVQLNDYVDIICPHYEDHSVADAAMEQYILYLVEHEEYQLCQPQSKDQVRWQCNRPSAKHGPEKLSEKFQRFTPFTLGKEFKEGHSYYYISHSPQAHDNPQEKRLAADDPEVRVLHSIGHSAAPRLFPLAWTVLLLPLLLLQTP

SEQ ID NO: 10298 - protein, 879 aa, Homo sapiens
  VARIANT 160, 253: Xaa = Any Amino Acid
MRLHLLLLLALCGAGTTAAELSYSLRGNWSICNGNGSLELPGAVPGCVHSALFQQGLIQDSYYRFNDLNYRWVSLDNWTYSKEFKIPFEISKWQKVNLILEGVDTVSKILFNEVTIGETDNMFNRYSFDITNVVRDVNSIELRFQSAVLYAAQQSKAHTXYQVPPDCPPLVQKGECHVNFVRKEQCSFSWDWGPSFPTQGIWKDVRIEAYNICHLNYFTFSPIYDKSAQEWNLEIESTFDVVSSKPVGGQVIXAIPKLQTQQTYSIELQPGKRIVELFVNISKNITVETWWPHGHGNQTGYNMTVLFELDGGLNIEKSAKVYFRTVELIEEPIKGSPGLSFYFKINGFPIFLKGSNWIPADSFQDRVTSELLRLLLQSVVDANMNTLRVWGGGIYEQDEFYELCDELGIMVWQDFMFACALYPTDQGFLDSVTAEVAYQIKRLKSHPSIIIWSGNNENEEALMMNWYHISFTDRPIYIKDYVTLYVKNIRELVLAGDKSRPFITSSPTNGAETVAEAWVSQNPNSNYFGDVHFYDYISDCWNWKVFPKARFASEYGYQSWPSFSTLEKVSSTEDWSFNSKFSLHRQHHEGGNKQMLYQAGLHFKLPQSTDPLRTFKDTIYLTQVMQAQCVKTETEFYRRSRSEIVDQQGHTMGALYWQLNDIWQAPSWASLEYGGKWKMLHYFAQNFFAPLLPVGFENENTFYIYGVSDLHSDYSMTLSVRVHTWSSLEPVCSRVTERFVMKGGEAVCLYEEPVSELLRRCGNCTRESCVVSFYLSADHELLSPTNYHFLSSPKEAVGLCKAQITAIISQQGDIFVFDLETSAVAPFVWLDVGSIPGRFSDNGFLMTEKTRTILFYPWEPTSKNELEQSFHVTSLTDIY

SEQ ID NO: 10299 - protein, 339 aa, Homo sapiens [sequence omitted]

SEQ ID NO: 10300 - protein, 243 aa, Homo sapiens
MRPQGPAASPQRLRGLLLLLLLQLPAPSSASEIPKGKQKAQLRQREVVDLYNGMCLQGPAGVPGRDGSPGANGIPGTPGIPGRDGFKGEKGECLRESFEESWTPNYKQCSWSSLNYGIDLGKIAECTFTKMRSNSALRVLFSGSLRLKCRNACCQRWYFTFNGAECSGPLPIEAIIYLDQGSPEMNSTINIHRTSSVEGLCEGIGAGLVDVAIWVGTCSDYPKGDASTGWNSVSRIIIEELPK

SEQ ID NO: 10301 - protein, 232 aa, Homo sapiens
MWPPGRSITVKLREKTVSRKLEMNGPSAFQGLICGKYNGMCLQGPAGVPGRDGSPGANGIPGTPGIPGRDGFKGEKGECLRESFEESWTPNYKQCSWSSLNYGIDLGKIAECTFTKMRSNSALRVLFSGSLRLKCRNACCQRWYFTFNGAECSGPLPIEAIIYLDQGSPEMNSTINIHRTSSVEGLCEGIGAGLVDVAIWVGTCSDYPKGDASTGWNSVSRIIIEELPIYML

SEQ ID NO: 10302 - protein, 398 aa, Homo sapiens
MLRLYVLVMGVSAFTLQPAAHTGAARSCRFRGRHYKREFRLEGEPVALRCPQVPYWLWASVSPRINLTWHKNDSARTVPGEEETRMWAQDGALWLLPALQEDSGTYVCTTRNASYCDKMSIELRVFENTDAFLPFISYPQILTLSTSGVLVCPDLSEFTRDKTDVKIQWYKDSLLLDKDNEKFLSVRGTTHLLVHDVALEDAGYYRCVLTFAHEGQQYNITRSIELRIKKKKEETIPVIISPLKTISASLGSRLTIPCKVFLGTGTPLTTMLWWTANDTHIESAYPGGRVTEGPRQEYSENNENYIEVPLIFDPVTREDLHMDFKCVVHNTLSFQTLRTTVKEASSTFSWGIVLAPLSLAFLVLGGIWMHRRCKHRTGKADGLTVLWPHHQDFQSYPK

SEQ ID NO: 10303 - protein, 771 aa, Homo sapiens [sequence omitted]

SEQ ID NO: 10304 - protein, 456 aa, Homo sapiens
MRKKWKMGGMKYIFSLLFFLLLEGGKTEQVKHSETYCMFQDKKYRVGERWHPYLEPYGLVYCVNCICSENGNVLCSRVRCPNVHCLSPVHIPHLCCPRCPDSLPPVNNKVTSKSCEYNGTTYQHGELFVAEGLFQNRQPNQCTQCSCSEGNVYCGLKTCPKLTCAFPVSVPDSCCRVCRGDGELSWEHSDGDIFRQPANREARHSYHRSHYDPPPSRQAGGLSRFPGARSHRGALMDSQQASGTIVQIVINNKHKHGQVCVSNGKTYSHGESWHPNLRAFGIVECVLCTCNVTKQECKKIHCPNRYPCKYPQKIDGKCCKVCPGKKAKELPGQSFDNKGYFCGEETMPVYESVFMEDGETTRKIALETERPPQVEVHVWTIRKGILQHFHIEKISKRMFEELPHFKLVTRTTLSQWKIFTEGEAQISQMCSSRVCRTELEDLVKVLYLERSEKGHC

SEQ ID NO: 10305 - protein, 383 aa, Homo sapiens
MAGIPGLLFLLFFLLCAVGQVSPYSAPWKPTWPAYRLPVVLPQSTLNLAKPDFGAEAKLEVSSSCGPQCHKGTPLPTYEEAKQYLSYETLYANGSRTETQVGIYILSSSGDGAQHRDSGSSGKSRRKRQIYGYDSRFSIFGKDFLLNYPFSTSVKLSTGCTGTLVAEKHVLTAAHCIHDGKTYVKGTQKLRVGFLKPKFKDGGRGANDSTSAMPEQMKFQWIRVKRTHVPKGWIKGNANDIGMDYDYALLELKKPHKRKFMKIGVSPPAKQLPGGRIHFSGYDNDRPGNLVYRFCDVKDETYDLLYQQCDAQPGASGSGVYVRMWKRQQQKWERKIIGIFSGHQWVDMNGSPQDFNVAVRITPLKYAQICYWIKGNYLDCREG

SEQ ID NO: 10306 - protein, 706 aa, Homo sapiens
MEMFTFLLTCIFLPLLRGHSLFTCEPITVPRCMKMAYNMTFFPNLMGHYDQSIAAVEMEHFLPLANLECSPNIETFLCKAFVPTCIEQIHVVPPCRKLCEKVYSDCKKLIDTFGIRWPEELECDRLQYCDETVPVTFDPHTEFLGPQKKTEQVQRDIGFWCPRHLKTSGGQGYKFLGIDQCAPPCPNMYFKSDELEFAKSFIGTVSIFCLCATLFTFLTFLIDVRRFRYPERPIIYYSVCYSIVSLMYFIGFLLGDSTACNKADEKLELGDTVVLGSQNKACTVLFMLLYFFTMAGTVWWVILTITWFLAAGRKWSCEAIEQKAVWFHAVAWGTPGFLTVMLLAMNKVEGDNISGVCFVGLYDLDASRYFVLLPLCLCVFVGLSLLLAGIISLNHVRQVIQHDGRNQEKLKKFMIRIGVFSGLYLVPLVTLLGCYVYEQVNRITWEITWVSDHCRQYHIPCPYQAKAKARPELALFMIKYLMTLIVGISAVFWVGSKKTCTEWAGFFKRNRKRDPISESRRVLQESCEFFLKHNSKVKHKKKHYKPSSHKLKVISKSMGTSTGATANHGTSAVAITSHDYLGQETLTEIQTSPETSMREVKADGASTPRLREQDCGEPASPAASISRLSGEQVDGKGQAGSVSESARSEGRISPKSDITDTGLAQSNNLQVPSSSEPSSLKGSTSLLVHPVSGVRKEQGGGCHSDT

SEQ ID NO: 10307 - protein, 706 aa, Homo sapiens
MEMFTFLLTCIFLPLLRGHSLFTCEPITVPRCMKMAYNMTFFPNLMGHYDQSIAAVEMEHFLPLANLECSPNIETFLCKAFVPTCIEQIHVVPPCRKLCEKVYSDCKKLIDTFGIRWPEELECDRLQYCDETVPVTFDPHTEFLGPQKKTEQVQRDIGFWCPRHLKTSGGQGYKFLGIDQCAPPCPNMYFKSDELEFAKSFIGTVSIFCLCATLFTFLTFLIDVRRFRYPERPIIYYSVCYSIVSLMYFIGFLLGDSTACNKADEKLELGDTVVLGSQNKACTVLFMLLYFFTMAGTVWWVILTITWFLAAGRKWSCEAIEQKAVWFHAVAWGTPGFLTVMLLALNKVEGDNISGVCFVGLYDLDASRYFVLLPLCLCVFVGLSLLLAGIISLNHVRQVIQHDGRNQEKLKKFMIRIGVFSGLYLVPLVTLLGCYVYEQVNRITWEITWVSDHCRQYHIPCPYQAKAKARPELALFMIKYLMTLIVGISAVFWVGSKKTCTEWAGFFKRNRKRDPISESRRVLQESCEFFLKHNSKVKHKKKHYKPSSHKLKVISKSMGTSTGATANHGTSAVAITSHDYLGQETLTEIQTSPETSMREVKADGASTPRLREQDCGEPASPAASISRLSGEQVDGKGQAGSVSESARSEGRISPKSDITDTGLAQSNNLQVPSSSEPSSLKGSTSLLVHPVSGVRKEQGGGCHSDT

SEQ ID NO: 10308 - protein, 228 aa, Homo sapiens
MGQCGITSSKTVLVFLNLIFWGAAGILCYVGAYVFITYDDYDHFFEDVYTLIPAVVIIAVGALLFIIGLIGCCATIRESRCGLATVENEVDRSIQKVYKTYNGTNPDAASRAIDYVQRQLHCCGIHNYSDWENTDWFKETKNQSVPLSCCRETASNCNGSLAHPSDLYAEGCEALVVKKLQEIMMHVIWAALAFAAIQLLGMLCACIVLCRRSRDPAYELLITGGTYA

SEQ ID NO: 10309 - protein, 253 aa, Homo sapiens
MGQCGITSSKTVLVFLNLIFWGAAGILCYVGAYVFITYDDYDHFFEDVYTLIPAVVIIAVGALLFIIGLIGCCATIRESRCGLATFVIILLLVFVTEVVVVVLGYVYRAKVENEVDRSIQKVYKTYNGTNPDAASRAIDYVQRQLHCCGIHNYSDWENTDWFKETKNQSVPLSCCRETASNCNGSLAHPSDLYAEGCEALVVKKLQEIMMHVIWAALAFAAIQLLGMLCACIVLCRRSRDPAYELLITGGTYA

SEQ ID NO: 10310 - protein, 193 aa, Homo sapiens
MPEEGSGCSVRRRPYGCVLRAALVPLVAGLVICLVVCIQRFAQAQQQLPLESLGWDVAELQLNHTGPQQDPRLYWQGGPALGRSFLHGPELDKGQLRIHRDGIYMVHIQVTLAICSSTTASRHHPTTLAVGICSPASRSISLLRLSFHQGCTIASQRLTPLARGDTLCTNLTGTLLPSRNTDETFFGVQWVRP

SEQ ID NO: 10311 - protein, 417 aa, Homo sapiens
MRSLLLGTLCLLAVALAAEVKKPVEAAAPGTAEKLSSKATTLAEPSTGLAFSLYQAMAKDQAVENILVSPVVVASSLGLVSLGGKATTASQAKAVLSAEQLRDEEVHAGLGELLRSLSNSTARNVTWKLGSRLYGPSSVSFADDFVRSSKQHYNCEHSKINFPDKRSALQSINEWAAQTTDGKLPEVTKDVERTDGALLVNAMFFKPHWDEKFHHKMVDNRGFMVTRSYTVGVTMMHRTGLYNYYDDEKEKLQLVEMPLAHKLSSLIILMPHHVEPLERLEKLLTKEQLKIWMGKMQKKAVAISLPKGVVEVTHDLQKHLAGLGLTEAIDKNKADLSRMSGKKDLYLASVFHATAFELDTDGNPFDQDIYGREELRSPKLFYADHPFIFLVRDTQSGSLLFIGRLVRLKGDKMRDEL

SEQ ID NO: 10312 - protein, 418 aa, Homo sapiens
MRSLLLLSAFCLLEAALAAEVKKPAAAAAPGTAEKLSPKAATLAERSAGLAFSLYQAMAKDQAVENILVSPVVVASSLGLVSLGGKATTASQAKAVLSAEQLRDEEVHAGLGELLRSLSNSTARNVTWKLGSRLYGPSSVSFADDFVRSSKQHYNCEHSKINFRDKRSALQSINEWAAQTTDGKLPEVTKDVERTDGALLVNAMFFKPHWDEKFHHKMVDNRGFMVTRSYTVGVMMMHRTGLYNYYDDEKEKLQIVEMPLAHKLSSLIILMPHHVEPLERLEKLLTKEQLKIWMGKMQKKAVAISLPKGVVEVTHDLQKHLAGLGLTEAIDKNKADLSRMSGKKDLYLASVFHATAFELDTDGNPFDQDIYGREELRSPKLFYADHPFIFLVRDTQSGSLLFIGRLVRPKGDKMRDEL

SEQ ID NO: 10313 - protein, 1114 aa, Homo sapiens
MLRGTMTAWRGMRPEVTLACLLLATAGCFADLNEVPQVTVQPASTVQKPGGTVILGCVVEPPRMNVTWRLNGKELNGSDDALGVLITHGTLVITALNNHTVGRYQCVARMPAGAVASVPATVTLANLQDFKLDVQHVIEVDEGNTAVIACHLPESHPKAQVRYSVKQEWLEASRGNYLIMPSGNLQIVNASQEDEGMYKCAAYNPVTQEVKTSGSSDRLRVRRSTAEAARIIYPPEAQTIIVTKGQSLILECVASGIPPPRVTWAKDGSSVTGYNKTRFLLSNLLIDTTSEEDSGTYRCMADNGVGQPGAAVILYNVQVFEPPEVTMELSQLVIPWGQSAKLTCEVRGNPPPSVLWLRNAVPLISSQRLRLSRRALRVLSMGPEDEGVYQCMAENEVGSAHAVVQLRTSRPSITPRLWQDAELATGTPPVSPSKLGNPEQMLRGQPALPRPPTSVGPASPQCPGEKGQGAPAEAPIILSSPRTSKTDSYELVWRPRHEGSGRAPILYYVVKHRKVTNSSDDWTISGIPANQHRLTLTRLDPGSLYEVEMAAYNCAGEGQTAMVTFRTGRRPKPEIMASKEQQIQRDDPGASPQSSSQPDHGRLSPPEAPDRPTISTASETSVYVTWIPRGNGGFPIQSFRVEYKKLKKVGDWILATSAIPPSRLSVEITGLEKGTSYKFRVRALNMLGESEPSAPSRPYVVSGYSGRVYERPVAGPYITFTDAVNETTIMLKWMYIPASNNNTPIHGFYIYYRPTDSDNDSDYKKDMVEGDKYWHSISHLQPETSYDIKMQCFNEGGESEFSNVMICETKARKSSGQPGRLPPPTLAPPQPPLPETIERPVGTGAMVARSSDLPYLIVGVVLGSIVLIIVTFIPFCLWRAWSKQKHTTDLGFPRSALPPSCPYTMVPLGGLPGHQASGQPYLSGISGRACANGIHMNRGCPSAAVGYPGMKPQQHCPGELQQQSDTSSLLRQTHLGNGYDPQSHQITRGPKSSPDEGSFLYTLPDDSTHQLLQPHHDCCQRQEQPAAVGQSGVRRAPDSPVLEAVWDPPFHSGPPCCLGLVPVEEVDSPDSCQVSGGDWCPQHPVGAYVGQEPGMQLSPGPLVRVSFETPPLTI

SEQ ID NO: 10314 - protein, 253 aa, Homo sapiens
MDNRFATAFVIACVLSLISTIYMAASIGTDFWYEYRSPVQENSSDLNKSIWDEFISDEADEKTYNDALFRYNGTVGLWRRCITIPKNMHWYSPPERTESFDVVTKCVSFTLTEQFMEKFVDPGNHNSGIDLLRTYLWRCQFLLPFVSLGLMCFGALIGLCACICRSLYPTIATGILHLLAGLCTLGSVSCYVAGIELLHQKLELPDNVSGEFGWSFCLACVSAPLQFMASALFIWAAHTNRKEYTLMKAYRVA

SEQ ID NO: 10315 - protein, 431 aa, Homo sapiens [sequence omitted]

SEQ ID NO: 10316 - protein, 431 aa, Homo sapiens
MHVRSLRAAAPHSFVALWAPLFLLRSALADFSLDNEVHSSFIHRRLRSQERREMQREILSILGLPHRPRPHLQGKHNSAPMFMLDLYNAMAVEEGGGPGGQGFSYPYKAVFSTQGPPLASLQDSHFLTDADMVMSFVNLVEHDKEFFHPRYHHREFRFDLSKIPEGEAVTAAEFRIYKDYIRERFDNETFRISVYQVLQEHLGRESDLFLLDSRTLWASEEGWLVFDITATSNHWVVNPRHNLGLQLSVETLDGQSINPKLAGLIGRHGPQNKQPFMVAFFKATEVHFRSIRSTGSKQRSQNRSKTPKNQEALRMANVAENSSSDQRQACKKHELYVSFRDLGWQDWIIAPEGYAAYYCEGECAFPLNSYMNATNHAIVQTLVHFINPETVPKPCCAPTQLNAISVLYFDDSSNVILKKYRNMVVRACGCH

SEQ ID NO: 10317 - protein, 412 aa, Homo sapiens [sequence omitted]

SEQ ID NO: 10318 - protein, 629 aa, Homo sapiens
MGCKVLLNIGQQMLRRKVVDCSREETRLSRCLNTFDLVALGVGSTLGAGVYVLAGAVARENAGPAIVISFLIAALASVLAGLCYGEFGARVPKTGSAYLYSYVTVGELWAFITGWNLILSYIIGTSSVARAWSATFDELIGRPIGEFSRTHMTLNAPGVLAENPDIFAVIIILILTGLLTLGVKESAMVNKIFTCINVLVLGFIMVSGFVKGSVKNWQLTEEDFGNTSGRLCLNNDTKEGKPGVGGFMPFGFSGVLSGAATCFYAFVGFDCIATTGEEVKNPQKAIPVGIVASLLICFIAYFGVSAALTLMMPYFCLDNNSPLPDAFKHVGWEGAKYAVAVGSLCALSASLLGSMFPMPRVIYAMAEDGLLFKFLANVNDRTKTPIIATLASGAVAAVMAFLFDLKDLVDLMSIGTLLAYSLVAACVLVLRYQPEQPNLVYQMASTSDELDPADQNELASTNDSQLGFLPEAEMFSLKTILSPKNMEPSKISGLIVNISTSLIAVLIITFCIVTVLGREALTKGALWAVFLLAGSALLCAVVTGVIWRQPESKTKLSFKVPFLPVLPILSIFVNVYLMMQLDQGTWVRFAVWMLIGFIIYFGYGLWHSEEASLDADQARTPDGNLDQCK

SEQ ID NO: 10319 - protein, 1023 aa, Homo sapiens
MCARMAGRTTAAPRGPYGPWLCLLVALALDVVRVDCGQAPLDPVYLPAALELLDAPEHFRVQQVGHYPPANSSLSSRSETFLLLQPWPRAQPLLRASYPPFATQQVVPPRVTEPHQRPVPWDVRAVSVEAAVTPAEPYARVLFHLKGQDWPPGSGSLPCARLHATHPAGTAHQACRFQPSLGACVVELELPSHWFSQASTTRAELAYTLEPAAEGPGGCGSGEENDPGEQALPVGGVELRPADPPQYQEVPLDEAVTLRVPDMPVRPGQLFSATLLLRHNFTASLLTLRIKVKKGLHVTAARPAQPTLWTAKLDRFKGSRHHTTLITCHRAGLTEPDSSPLELSEFLWVDFVVENSTGGGVAVTRPVTWQLEYPGQAPEAEKDKMVWEILVSERDIRALIPLAKAEELVNTAPLTGVPQHVPVRLVTVDGGGALVEVTEHVGCESANTQVLQVSEACDAVFVAGKESRGARGVRVDFWWRRLRASLRLTVWAPLLPLRIELTDTTLEQVRGWRVPGPAEGPAEPAAEASDEAERRARGCHLQYQRAGVRFLAPFAAHPLDGGRRLTHLLGPDWLLDVSHLVAPHARVLDSRVASLEGGRVVVGREPGVTSIEVRSPLSDSILGEQALAVTDDKVSVLELRVQPVMGISLTLSRGTAHPGEVTATCWAQSALPAPKQEVALSLWLSFSDHTVAPAELYDRRDLGLSVSAEEPGAILPAEEQGAQLGVVVSGAGAEGLPLHVALHPPEPCRRGRHRVPLASGTAWLGLPPASTPAPALPSSPAWSPPATEATMGGKRQVAGSVGGNTGVRGKFERAEEEARKEETEAREEEEEEEEEMVPAPQHVTELELGMYALLGVFCVAIFIFLVNGVVFVLRYQRKEPPDSATDPTSPQPHNWVWLGTDQEELSRQLDRQSPGPPKGEGSCPCESGGGGEAPTLAPGPPGGTTSSSSTLARKEAGGRRKRVEFVTFAPAPPAQSPEEPVGAPAVQSILVAGEEDIRWVCEDMGLKDPEELRNYMERIRGSS

SEQ ID NO: 10320 - protein, 435 aa, Homo sapiens
VVRGEGTFTALFSLPCPQLLCPSMAPGSAPASSGAVIISPSYASSVDCGQAPLDPVYLPAALELLDAPEHFRVQQVGHYPPANSSLSSRSETFLLLQPWPRAQPLLRASYPPFATQQVVPPRVTEPHQRPVPWDVRAVSVEAAVTPAEPYARVLFHLKGQDWPPGSGSLPCARLHATHPAGTAHQACRFQPSLGACVVELELPSHWFSQASTTRAELAYTLEPAAEGPGGCGSGEENDPGEQALPVGGVELRPADPPQYQEVPLDEAVTLRVPDMPVRPGQLFSATLLLRHNFTASLLTLRIKVKKGLHVTAARPAQPTLWTAKLDRFKGSRHHTTLITCHRAGLTEPDSSPLELSEFLWVDFVVENSTGGGVAVTRPVTWQLEYPGQAPEAEKDKMVWEILVSERDIRALIPLAKVRRPPSLPGKAGGQVPGAP

SEQ ID NO: 10321 - protein, 1024 aa, Homo sapiens
MCARMAGRTTAAPRGPYGPWLCLLVALALDVVRVDCGQAPLDPVYLPAALELLDAPEHFRVQQVGHYPPANSSLSSRSETFLLLQPWPRAQPLLRASYPPFATQQVVPPRVTEPHQRPVPWDVRAVSVEAAVTPAEPYARVLFHLKGQDWPPGSGSLPCARLHATHPAGTAHQACRFQPSLGACVVELELPSHWFSQASTTRAELAYTLEPAAEGPGGCGSGEENDPGEQALPVGGVELRPADPPQYQEVPLDEAVTLRVPDMPVRPGQLFSATLLLRHNFTASLLTLRIKVKKGLHVTAARPAQPTLWTAKLDRFKGSRHHTTLITCHRAGLTEPDSSSPLELSEFLWVDFVVENSTGGGVAVTRPVTWQLEYPGQAPEAEKDKMVWEILVSERDIRALIPLAKAEELVNTAPLTGVPQHVPVRLVTVDGGGALVEVTEHVGCESANTQVLQVSEACDAVFVAGKESRGARGVRVDFWWRRLRASLRLTVWAPLLPLRIELTDTTLEQVRGWRVPGPAEGPAEPAAEASDEAERRARGCHLQYQRAGVRFLAPFAAHPLDGGRRLTHLLGPDWLLDVSHLVAPHARVLDSRVASLEGGRVVVGREPGVTSIEVRSPLSDSILGEQALAVTDDKVSVLELRVQPVMGISLTLSRGTAHPGEVTATCWAQSALPAPKQEVALSLWLSFSDHTVAPAELYDRRDLGLSVSAEEPGAILPAEEQGAQLGVVVSGAGAEGLPLHVALHPPEPCRRGRHRVPLASGTAWLGLPPASTPAPALPSSPAWSPPATEATMGGKRQVAGSVGGNTGVRGKFERAEEEARKEETEAREEEEEEEEEMVPAPQHVTELELGMYALLGVFCVAIFIFLVNGVVFVLRYQRKEPPDSATDPTSPQPHNWVWLGTDQEELSRQLDRQSPGPPKGEGSCPCESGGGGEAPTLAPGPPGGTTSSSSTLARKEAGGRRKRVEFVTFAPAPPAQSPEEPVGAPAVQSILVAGEEDIRWVCEDMGLKDPEELRNYMERIRGSS

SEQ ID NO: 10322 - protein, 307 aa, Homo sapiens
VVSHQGRQRQLHSASTQIRWEPSPAMASLGQILFWSIISIIIILAGAIALIIGFGISGRHSITVTTVASAGNIGEDGILSCTFEPDIKLSDIVIQWLKEGVLGLVHEFKEGKDELSEQDEMFRGRTAVFADQVIVGNASLRLKNVQLTDAGTYKCYIITSKGKGNANLEYKTGAFSMPEVNVDYNASSETLRCEAPRWFPQPTVVWASQVDQGANFSEVSNTSFELNSENVTMKVVSVLYNVTINNTYSCMIENDIAKATGDIKVTESEIKRRSHLQLLNSKASLCVSSFFAISWALLPLSPYLMLK

SEQ ID NO: 10323 - protein, 837 aa, Homo sapiens
MLRTAMGLRSWLAAPWGALPPRPPLLLLLLLLLLLQPPPPTWALSPRISLPLGSEERPFLRFEAEHISNYTALLLSRDGRTLYVGAREALFALSSNLSFLPGGEYQELLWGADAEKKQQCSFKGKDPQRDCQNYIKILLPLSGSHLFTCGTAAFSPMCTYINMENFTLARDEKGNVLLEDGKGRCPFDPNFKSTALVVDGELYTGTVSSFQGNDPAISRSQSLRPTKTESSLNWLQDPAFVASAYIPESLGSLQGDDDKIYFFFSETGQEFEFFENTIVSRIARICKGDEGGERVLQQRWTSFLKAQLLCSRPDDGFPFNVLQDVFTLSPSPQDWRDTLFYGVFTSQWHRGTTEGSAVCVFTMKDVQRVFSGLYKEVNRETQQWYTVTHPVPTPRPGACITNSARERKINSSLQLPDRVLNFLKDHFLMDGQVRSRMLLLQPQARYQRVAVHRVPGLHHTYDVLFLGTGDGRLHKAVSVGPRVHIIEELQIFSSGQPVQNLLLDTHRGLLYAASHSGVVQVPMANCSLYRSCGDCLLARDPYCAWSGSSCKHVSLYQPQLATRPWIQDIEGASAKDLCSASSVVSPSFVPTGEKPCEQVQFQPNTVNTLACPLLSNLATRLWLRNGAPVNASASCHVLPTGDLLLVGTQQLGEFQCWSLEEGFQQLVASYCPEVVEDGVADQTDEGGSVPVIISTSRVSAPAGGKASWGADRSYWKEFLVMCTLFVLAVLLPVLFLLYRHRNSMKVFLKQGECASVHPKTCPVVLPPETRPLNGLGPPSTPLDHRGYQSLSDSPPGSRVFTESEKRPLSIQDSFVEVSPVCPRPRVRLGSEIRDSVV

SEQ ID NO: 10324 - protein, 895 aa, Homo sapiens
MRMSVGLSLLLPLWGRTFLLLLSVVMAQSHWPSEPSEAVRDWENQLEASMHSVLSDLHEAVPTVVGIPDGTAVVGRSFRVTIPTDLIASSGDIIKVSAAGKEALPSWLHWDSQSHTLEGLPLDTDKGVHYISVSATRLGANGSHIPQTSSVFSIEVYPEDHSDLQSVRTASPDPGEVVSSACAADEPVTVLTVILDADLTKMTPKQRIDLLHRMRSFSEVELHNMKLVPVVNNRLFDMSAFMAGPGNPKKVVENGALLSWKLGCSLNQNSVPDIHGVEAPAREGAMSAQLGYPVVGWHIANKKPPLPKRVRRQIHATPTPVTAIGPPTTAIQEPPSRIVPTPTSPAIAPPTETMAPPVRDPVPGKPTVTIRTRGAIIQTPTLGPIQPTRVSEAGTTVPGQIRPTMTIPGYVEPTAVATPPTTTTKKPRVSTPKPATPSTDSTTTTTRRPTKKPRTPRPVPRVTTKVSITRLETASPPTRIRTTTSGVPRGGEPNQRPELKNHIDRVDAWVGTYFEVKIPSDTFYDHEDTTTDKLKLTLKLREQQLVGEKSWVQFNSNSQLMYGLPDSSHVGKHEYFMHATDKGGLSAVDAFEIHVHRRPQGDRAPARFKAKFVGDPALVLNDIHKKIALVKKLAFAFGDRNCSTITLQNITRGSIVVEWTNNTLPLEPCPKEQIAGLSRRIAEDDGKPRPAFSNALEPDFKATSITVTGSGSCRHLQFIPVVPPRRVPSEAPPTEVPDRDPEKSSEDDVYLHTVIPAVVVAAILLIAGIIAMICYRKKRKGKLTLEDQATFIKKGVPIIFADELDDSKPPPSSSMPLILQEEKAPLPPPEYPNQSVPETTPLNQDTMGEYTPLRDEDPNAPPYQPPPPFTVPMEGKGSRPKNMTPYRSPPPYVPP

SEQ ID NO: 10325 - protein, 1496 aa, Homo sapiens
MMANWAEARPLLILIVLLGQFVSIKAQEEDEDEGYGEEIACTQNGQMYLNRDIWKPAPCQICVCDNGAILCDKIECQDVLDCADPVTPPGECCPVCSQTPGGGNTNFGRGRKGQKGEPGLVPVVTGIRGRPGPAGPPGSQGPRGERGPKGRPGPRGPQGIDGEPGVPGQPGAPGPPGHPSHPGPDGLSRPFSAQMAGLDEKSGLGSQVGLMPGSVGPVGPRGPQGLQGQQGGAGPTGPPGEPGDPGPMGPIGSRGPEGPPGKPGEDGEPGRNGNPGEVGFAGSPGARGFPGAPGLPGLKGHRGHKGLEGPKGEVGAPGSKGEAGPTGPMGAMGPLGPRGMPGERGRLGPQGAPGQRGAHGMPGKPGPMGPLGIPGSSGFPGNPGMKGEAGPTGARGPEGPQGQRGETGPPGPVGSPGLPGAIGTDGTPGPKGPTGSPGTSGPPGSAGPPGSPGPQGSTGPQGNSGLPGDPGFKGEAGPKGEPGPHGIQGPIGPPGEEGKRGPRGDPGTLGPPGPVGERGAPGNRGFPGSDGLPGPKGAQGERGPVGSSGPKGSQGDPGRPGEPGLPGARGLTGNPGVQGPEGKLGPLGAPGEDGRPGPPGSIGIKGQPGTMGLPGPKGSNGDPGKPGEAGNPGVPGQRGAPGKDGKVGPYGPPGPPGLRGERGEQGPPGPTGFQGHPGPPGPPGEGGKPGDQGVPGGPGAVGPLGPRGERGNPGERGEPGITGLPGEKGMAGGHGPDGPKGSPGPSGTPGDTGPPGLQGMPGERGIAGTPGPKGDRGGIGEKGAEGTAGNDGAGGLPGPLGPPGPAGLLGEKGEPGPRGLVGPPGSRGNPGSRGENGPTGAVGFAGPQGSDGQPGVKGEPGEPGQKGDAGSPGPQGLAGSPGPHGPNGVPGLKGGRGTQGPPGATGFPGSAGRVGPPGPAGAPGPAGPLGEPGKEGPPGPRGDPGSHGRVGVRGPAGPPGGPGDKGDPGEDGQPGPDGPPGPAGTTGQRGIVGMPGQRGERGMPGLPGPAGTPGKVGPTGATGDKGPPGPVGPPGSNGPVGEPGPEGPAGNDGTPGRDGAVGERGDRGDPGPAGLPGSQGAPGTPGPVGAPGDAGQRGDPGSRGPIGHLGRAGKRGLPGPQGPRGDKGDHGDRGDRGQKGHRGFTGLQGLPGPPGPNGEQGSAGIPGPFGPRGPPGPVGPSGKEGNPGPLGPLGPPGVRGSVGEAGPEGPPGEPGPPGPPGPPGHLTAALGDIMGHYDESMPDPLPEFTEDQAAPDDKNKTDPGVHATLKSLSSQIETMRSPDGSKKHPARTCDDLKLCHSAKQSGEYWIDPNQGSVEDAIKVYCNMETGETCISANPSSVPRKTWWASKSPDNKPVWYGLDMNRGSQFAYGDHQSPNTAITQMTFLRLLSKEASQNITYICKNSVGYMDDQAKNLKKAVVLKGANDLDIKAEGNIRFRYIVLQDTCSKRNGNVGKTVFEYRTQNVARLPIIDLAPVDVGGTDQEFGVEIGPVCFV

SEQ ID NO: 10326 - protein, 1355 aa, Homo sapiens
MMANWAEARPLLILIVLLGQFVSIKAQEEDEDEGYGEEIACTQNGQMYLNRDIWKPAPCQICVCDNGAILCDKIECQDVLDCADPVTPPGECCPVCSQTPGGGNTNFGSQGPRGERGPKGRPGPRGPQGIDGEPGVPGQPGAPGPPGHPSHPGPDGLSRPFSAQMAGLDEKSGLGSQVGLMPGSVGPVGPRGPQGLQGQQGGAGPTGPPGEPGDPGPMVNVKEEPFNHPSQSPTFFSIKGEPGRNGNPGEVGFAGSPGARGFPGAPGLPGLKGHRGHKGLEGPKGEVGAPGSKGPRGMPGERGRLGPQGAPGPLGIPGSSGFPGNPGMKGEAGPTGARGPEGPQGQRGETGPPGPVGSPGLPGAIGTDGTPGAKGPTGSPGTSGPPGSAGPPGSPGPQGSTGPQGIRGQPGPHGIQGPIGPPGEEGKRGPRGDPGTVGPPGPVGERGAPGNRGFPGSDGLPGPKGAQGERGPVGSSGPKGSQGDPGRPGEPGLPGARGLTGNPGVQGPEGKLGPLGAPGEDGRPGPPGSIGIRGQPGSMGLPGPKGSSGDPGKPGEAGNAGVPGQRGAPGKDGEVGPSGPVGPPGERGNPGERGEPGITGLPGEKGMAGGHGPDGPKGSPGPSGTPGDTGPPGLQGMPGERGIAGTPGPKGDRGGIGEKGAEGTAGNDGARGLPGPLGPPGPAGPTGEKGEPGPRGLVGPPGSRGNPGSRGENGPTGAVGFAGPQGPDGQPGVKGEPGEPGQKGDAGSPGPQGLAGSPGPHGPNGVPGLKGGRGTQGPPGATGFPGSAGRVGPPGPAGAPGPAGPLGEPGKEGPPGLRGDPGSHGRVGDRGPAGPPGGPGDKGDPGEDGQPGPDGPPGPAGTTGQRGIVGMPGQRGERGMPGLPGPAGTPGKVGPTGATGDKGPPGPVGPPGSNGPVGEPGPEGPAGNDGTPGRDGAVGERGDRGDPGPAGLPGSQGAPGTPGPVGAPGDAGQRGDPGPQGPRGDKGDHGDRGDRGQKGHRGFTGLQGLPGPPGPNGEQGSAGIPGPFGPRGPPGPVGPSGKEGNPGPLGPIGPPGVRGSVGEAGPEGPPGEPGPPGPPGPPGHLTAALGDIMGHYDESMPDPLPEFTEDQAAPDDKNKTDPGVHATLKSLSSQIETMRSPDGSKKHPARTCDDLKLCHSAKQSGEYWIDPNQGSVEDAIKVYCNMETGETCISANPSSVPRKTWWASKSPDNKPVWYGLDMNRGSQFAYGDHQSPNTAITQMTFLRLLSKEASQNITYICKNSVGYMDDQAKNLKKAVVLKGANDLDIKAEGNIRFRYIVLQDTCSKRNGNVGKTVFEYRTQNVARLPIIDLAPVDVGGTDQEFGVEIGPVCFV

SEQ ID NO: 10327 - protein, 417 aa, Homo sapiens
MRFAWTVLLLGPLQLCALVHCAPPAAGQQQPPREPPAAPGAWRQQIQWENNGQVFSLLSLGSQYQPQRRRDPGAAVPGAANASAQQPRTPILLIRDNRTAAARTRTAGSSGVTAGRPRPTARHWFQAGYSTSRAREAGASRAENQTAPGEVPALSNLRPPSRVDGMVGDDPYNPYKYSDDNPYYNYYDTYERPRPGGRYRPGYGTGYFQYGLPDLVADPYYIQASTYVQKMSMYNLRCAAEENCLASTAYRADVRDYDHRVLLRFPQRVKNQGTSDFLPSRPRYSWEWHSCHQHYHSMDEFSHYDLLDANTQRRVAEGHKASFCLEDTSCDYGYHRRFACTAHTQGLSPGCYDTYGADIDCQWIDITDVKPGNYILKVSVNPSYLVPESDYTNNVVRCDIRYTGHHAYASGCTISPY

SEQ ID NO: 10328 - protein, 372 aa, Homo sapiens
MVWKVAVFLSVALGIGAVPIDDPEDGGKHWVVIVAGSNGWYNYRHQADACHAYQIIHRNGIPDEQIVVMMYDDIAYSEDNPTPGIVINRPNGTDVYQGVPKDYTGEDVTPQNFLAVLRGDAEAVKGIGSGKVLKSGPQDHVFIYFTDHGSTGILVFPNEDLHVKDLNETIHYMYKHKMYRKMVFYIEACESGSMMNHLPDNINVYATTAANPRESSYACYYDEKRSTYLGDWYSVNWMEDSDVEDLTKETLHKQYHLVKSHTNTSHVMQYGNKTISTMKVMQFQGMKRKASSPVPLPPVTHLDLTPSPDVPLTIMKRKLMNTNDLEESRQLTEEIQRHLDDKIVHGPRVPWSLLKSCLLEAFPSVSAPPTVC

SEQ ID NO: 10329 - protein, 433 aa, Homo sapiens
MVWKVAVFLSVALGIGAVPIDDPEDGGKHWVVIVAGSNGWYNYRHQADACHAYQIIHRNGIPDEQIVVMMYDDIAYSEDNPTPGIVINRPNGTDVYQGVPKDYTGEDVTPQNFLAVLRGDAEAVKGIGSGKVLKSGPQDHVFIYFTDHGSTGILVFPNEDLHVKDLNETIHYMYKHKMYRKMVFYIEACESGSMMNHLPDNINVYATTAANPRESSYACYYDEKRSTYLGDWYSVNWMEDSDVEDLTKETLHKQYHLVKSHTNTSHVMQYGNKTISTMKVMQFQGMKRKASSPVPLPPVTHLDLTPSPDVPLTIMKRKLMNTNDLEESRQLTEEIQRHLDARHLIEKSVRKIVSLLAASEAEVEQLLSERAPLTGHSCYPEALLHFRTHCFNWHSPTYEYALRHLYVLVNLCEKPYPLHRIKLSMDHVCLGHY

SEQ ID NO: 10330 - protein, 376 aa, Homo sapiens
MVWKVAVFLSVALGIGAVPIDDPEDGGKHWVVIVAGSNGWYNYRHQADACHAYQIIHRNGIPDEQIVVMMYDDIAYSEDNPTPGIVINRPNGTDVYQGVPKDYTGEDVTPQNFLAVLRGDAEAVKGIGSGKVLKSGPQDHVFIYFTDHGSTGILVFPNEDLHVKDLNETIHYMYKHKMYRKMVFYIEACESGSMMNHLPDNINVYATTAANPRESSYACYYDEKRSTYLGDWYSVNWMEDSDVEDLTKETLHKQYHLVKSHTNTSHVMQYGNKTISTMKVMQFQGMKRKASSPVPLPPVTHLDLTPSPDVPLTIMKRKLMNTNDLEESRQLTEEIQRHLDYEYALRHLYVLVNLCEKPYPLHRIKLSMDHVCLGHY

SEQ ID NO: 10331 - protein, 607 aa, Homo sapiens
MEAPAAGLFLLLLLGTWAPAPGSASSEAPPLINEDVKRTVDLSSHLAKVTAEVVLAHLGGGSTSRATSFLLALEPELEARLAHLGVQVKGEDEEENNLEVRETKIKGKSGRFFTVKLPVALDPGAKISVIVETVYTHVLHPYPTQITQSEKQFVVFEGNHYFYSPYPTKTQTMRVKLASRNVESYTKLGNPTRSEDLLDYGPFRDVPAYSQDTFKVHYENNSPFLTITSMTRVIEVSHWGNIAVEENVDLKHTGAVLKGPFSRYDYQRQPDSGISSIRSFKTILPAAAQDVYYRDEIGNVSTSHLLILDDSVEMEIRPRFPLFGGWKTHYIVGYNLPSYEYLYNLGDQYALKMRFVDHVFDEQVIDSLTVKIILPEGAKNIEIDSPYEISRAPDELHYTYLDTFGRPVIVAYKKNLVEQHIQDIVVHYTFNKVLMLQEPLLVVAAFYILFFTVIIYVRLDFSITKDPAAEARMKVACITEQVLTLVNKRIGLYRHFDETVNRYKQSRDISTLNSGKKSLETEHKALTSEIALLQSRLKTEGSDLCDRVSEMQKLDAQVKELVLKSAVEAERLVAGKLKKDTYIENEKLISGKRQELVTKIDHILDAL

SEQ ID NO: 10332 - protein, 950 aa, Homo sapiens
  VARIANT 397: Xaa = Any Amino Acid
MTWRMGPRFTMLLAMWLVCGSEPHPHATIRGSHGGRKVPLVSPDSSRPARFLRHTGRSRGIERSTLEEPNLQPLQRRRSVPVLRLARPTEPPARSDINGAAVRPEQRPAARGSPREMIRDEGSSARSRMLRFPSGSSSPNILASFAGKNRVWVISAPHASEGYYRLMMSLLKDDVYCELAERHIQQIVLFHQAGEEGGKVRRITSEGQILEQPLDPSLIPKLMSFLKLEKGKFGMVLLKKTLQVEERYPYPVRLEAMYEVIDQGPIRRIEKIRQKGFVQKCKASGVEGQVVAEGNDGGGGAGRPSLGSEKKKEDPRRAQVPPTRESRVKVLRKLAATAPALPQPPSTPRATTLPPAPATTVTRSTSRAVTVAARPMTTTAFPTTQRPWTPSPSHRPXTTTEVITARRPSVSENLYPPSRKDQHRERPQTTRRPSKATSLESFTNAPPTTISEPSTRAAGPGRFRDNRMDRREHGHRDPNVVPGPPKPAKEKPPKKKAQDKILSNEYEEKYDLSRPTASQLEDELQVGNVPLKKAKESKKHEKLEKPEKEKKKKMKNENADKLLKSEKQMKKSEKKSKQEKEKSKKKKGGKTEQDGYQKPTNKHFTQSPKKSVADLLGSFEGKRRLLLITAPKAENNMYVQQRDEYLESFCKMATRKISVITIFGPVNNSTMKIDHFQLDNEKPMRVVDDEDLVDQRLISELRKEYGMTYNDFFMVLTDVDLRVKQYYEVPITMKSVFDLIDTFQSRIKDMEKQKKEGIVCKEDKKQSLENFLSRFRWRRRLLVISAPNDEDWAYSQQLSALSGQACNFGLRHITILKLLGVGEEVGGVLELFPINGSSVVEREDVPAHLVKDIRNYFQVSPEYFSMLLVGKDGNVKSWYPSPMWSMVIVYDLIDSMQLRRQEMAIQQSLGMRCPEDEYAGYGYHSYHQGYQDGYQDDYRHHESYHHGYPY

SEQ ID NO: 10333 - protein, 1236 aa, Homo sapiens
MQLKIMPKKKRLSAGRVPLILFLCQMISALEVPLDPKLLEDLVQPPTITQQSPKDYIIDPRENIVIQCEAKGKPPPSFSWTRNGTHFDIDKDPLVTMKPGTGTLIINIMSEGKAETYEGVYQCTARNERGAAVSNNIVVRPSRSPLWTKEKLEPITLQSGQSLVLPCRPPIGLPPPIIFWMDNSFQRLPQSERVSQGLNGDLYFSNVLPEDTREDYICYARFNHTQTIQQKQPISVKVISVDELNDTIAANLSDTEFYGAKSSRERPPTFLTPEGNASNKEELRGNVLSLECIAEGLPTPIIYWAKEDGMLPKNRTVYKNFEKTLQIIHVSEADSGNYQCIAKNALGAIHHTISVRVKAAPYWITAPQNLVLSPGEDGTLICRANGNPKPRISWLTNGVPIEIAPDDPSRKIDGDTIIFSNVQERSSAVYQCNASNEYGYLLANAFVNVLAEPPRILTPANTLYQVIANRPALLDCAFFGSPLPTIEWFKGAKGSALHEDIYVLHENGTLEIPVAQKDSTGTYTCVARNKLGMAKNEVHLEIKDPTWIVKQPEYAVVQRGSMVSFECKVKHDHTLSLTVLWLKDNRELPSDERFTVDKDHLVVADVSDDDSGTYTCVANTTLDSVSASAVLSVVAPTPTPAPVYDVPNPPFDLELTDQLDKSVQLSWTPGDDNNSPITKFIIEYEDAMHKPGLWHHQTEVSGTQTTAQLKLSPYVNYSFRVMAVNSIGKSLPSEASEQYLTKASEPDKNPTAVEGLGSEPDNLVITWKPLNGFESNGPGLQYKVSWRQKDGDDEWTSVVVANVSKYIVSGTPTFVPYLIKVQALNDMGFAPEPAVVMGHSGEDLPMVAPGNVRVNVVNSTLAEVHWDPVPLKSIRGHLQGYRIYYWKTQSSSKRNRRHIEKKILTFQGSKTHGMLPGLEPFSHYTLNVRVVNGKGEGPASPDRVFNTPEGVPSAPSSLKIVNPTLDSLTLEWDPPSHPNGILTEYTLKYQPINSTHELGPLVDLKIPANKTRWTLKNLNFSTRYKFYFYAQTSAGSGSQITEEAVTTVDEAGILPPDVGAGKVQAVNTRISNLTAAAAETYANISWEYEGPEHVNFYVEYGVAGSKEEWRKEIVNGSRSFFGLKGLMPGTAYKVRVGAVGDSGFVSSEDVFETGPAMASRQVDIATQGWFIGLMCAVALLILILLIVCFIRRNKGGKYPVKEKEDAHADPEIQPMKEDDGTFGEYRLFSFVSSASF

SEQ ID NO: 10334 - protein, 413 aa, Homo sapiens
MAITAAHGASTAVQTGDPASKDQVTTPWVPSSALIVSSNARTSPRAVLWSMAPGGAAPCPRLPAVKTGCTAVCDLIQSKCLSKENATTDLLTKLPAHTVGDVKCDMEVSCPDGYTCCRLQSGAWGCCPFTQAVCCEDHIHCCPAGFTCDTQKGTCEQGPHQVPWMEKAPAHLSLPDPQALKRDVPCDNVSSCPSSDTCCQLTSGEWGCCPIPEAVCCSDHQHCCPQGYTCVAEGQCQRGSEIVAGLEKMPARRASLSHPRDIGCDQHTSCPVGQTCCPSLGGSWACCQLPHAVCCEDRQHCCPAGYTCNVKARSCEKEVVSAQPATFLARSPHVGVKDVECGEGHFCHDNQTCCRDNRQGWACCPYRQGVCCADRRHCCPAGFRCAARGTKCLRREAPRWDAPLRDPALRQLL

SEQ ID NO: 10335 - protein, 1184 aa, Homo sapiens
MVGTKAWVFSFLVLEVTSVLGRQTMLTQSVRRVQPGKKNPSIFAKPADTLESPGEWTTLFNIDYPGGKGDYERLDAIRFYYGDRVCARPLRLEARTTDWTPAGSTGQVVHGSPREGFWCLNREQRPGQNCSNYTVRFLCPPGSLRRDTERIWSPWSPWSKCSAACGQTGVQTRTRICLAEMVSLCSEASEEGQHCMGQDCTACDLTCPMGQVNADCDACMCQDFMLHGAVSLPGGAPASGAAIYLLTKTPKLLTQTDSDGRFRIPGLCPDGKSILKITKVKFAPIVLTMPKTSLKAATIKAEFVRAETPYMVMNPETKARRAGQSVSLCCKATGKPRPDKYFWYHNDTLLDPSLYKHESKLVLRKLQQHQAGEYFCKAQSDAGAVKSKVAQLIVTASDETPCNPVPESYLIRLPHDCFQNATNSFYYDVGRCPVKTCAGQQDNGIRCRDAVQNCCGISKTEEREIQCSGYTLPTKVAKECSCQRCTETRSIVRGRVSAADNGEPMRFGHVYMGNSRVSMTGYKGTFTLHVPQDTERLVLTFVDRLQKFVNTTKVLPFNKKGSAVFHEIKMLRRKEPITLEAMETNIIPLGEVVGEDPMAELEIPSRSFYRQNGEPYIGKVKASVTFLDPRNISTATAAQTDLNFINDEGDTFPLRTYGMFSVDFRDEVTSEPLNAGKVKVHLDSTQVKMPEHISTVKLWSLNPDTGLWEEEGDFKFENQRRNKREDRTFLVGNLEIRERRLFNLDVPESRRCFVKVRAYRSERFLPSEQIQGVVISVINLEPRTGFLSNPRAWGRFDSVITGPNGACVPAFCDDQSPDAYSAYVLASLAGEELQAVESSPKFNPNAIGVPQPYLNKLNYRRTDHEDPRVKKTAFQISMAKPRPNSAEESNGPIYAFENLRACEEAPPSAAHFRFYQIEGDRYDYNTVPFNEDDPMSWTEDYLAWWPKPMEFRACYIKVKIVGPLEVNVRSRNMGGTHRRTVGKLYGIRDVRSTRDRDQPNVSAACLEFKCSGMLYDQDRVDRTLVKVIPQGSCRRASVNPMLHEYLVNHLPLAVNNDTSEYTMLAPLDPLGHNYGIYTVTDQDPRTAKEIALGRCFDGTSDGSSRIMKSNVGVALTFNCVERQVGRQSAFQYLQSTPAQSPAAGTVQGRVPSRRQQRASRGGQRQSGVVASLRFPRVAQQPLIN

SEQ ID NO: 10336 - protein, 381 aa, Homo sapiens
MLLSIGMLMLSATQVYTILTVQLFAFLNLLPVEADILAYNFENASQTFDDLPARFGYRLPAEGLKGFLINSKPENACEPIVPPPVKDNSSGTFIVLIRRLDCNFDIKVLNAQRAGYKAAIVHNVDSDDLISMGSNDIEVLKKIDIPSVFIGESSANSLKDEFTYEKGGHLILVPEFSLPLEYYLIPFLIIVGICLILIVIFMITKFVQDRHRARRNRLRKDQLKKLPVHKFKKGDEYDVCAICLDEYEDGDKLRILPCSHAYHCKCVDPWLTKTKKTCPVCKQKVVPSQGDSDSDTDSSQEENEVTEHTPLLRPLASVSAQSFGALSESRSHQNMTESSDYEEDDNEDTDSSDAENEINEHDVVVQLQPNGERDYNIANTV

SEQ ID NO: 10337 - protein, 140 aa, Homo sapiens
MLLSIGMLMLSATQVYTILTVQLFAFLNLLPVEADILAYNFENASQTFDDLPARFGYRLPAEGLKGFLINSKPENACEPIVPPPVKDNSSGTFIVLIRRLDCNFDIKVLNAQRAGYKAAIVHNVDSDDLISMGSNDSKYS

SEQ ID NO: 10338 - protein, 738 aa, Homo sapiens
NNLDGICDAGKPKGKRIFILCGENFLKKKLPSSNKGVILIFMRTVVLTMKASVIEMFLVLLVTGVHSNKETAKKIKRPKFTVPQINCDVKAGKIIDPEFIVKCPAGCQDPKYHVYGTDVYASYSSVCGAAVHSGVLDNSGGKILVRKVAGQSGYKGSYSNGVQSLSLPRWRESFIVLESKPKKGVTYPSALTYSSSKSPAAQAGKCSRETTKAYQRPPIPGTTAQPVTLMQLLAVTVAVATPTTLPRPSPSAASTTSIPRPQSVGHRSQEMDLWSTATYTSSQNRPRADPGIQRQDPSGAAFQKPVGADVSLGEMDSWKPGSVLLDEGLVPKEELSTQSLEPVSLGDPNCKIDLSFLIDGSTSIGKRRFRIQKQLLADVAQALDIGPAGPLMGVVQYGDNPATHFNLKTHTNSRDLKTAIEKITQRGGLSNVGRAISFVTKNFFSKANGNRSGAPNVVVVMVDGWPTDKVEEASRLARESGINIFFITIEGAAENEKQYVVEPNFANKAVCRTNGFYSLHVQSWFGLHKTLQPLVKRVCDTDRLACSKTCLNSADIGFVIDGSSSVGTGNFRTVLQFVTNLTKEFEISDTDTRIGAVQYTYEQRLEFGFDKYSSKPDILNAIKRVGYWSGGTSTGAAINFALEQLFKKSKPNKRKLMILITDGRSYDDVRIPAMAAHLKGVITYAIGVAWAAQEELEVIATHPARDHSFFVDEFDNLHQYVPRIIQNICTEFNSQPRN

SEQ ID NO: 10339 - protein, 701 aa, Homo sapiens
NNLDGICDAGKPKGKRIFILCGENFLKKKLPSSNKGVILIFMRTVVLTMKASVIEMFLVLLVTGVHSNKETAKKIKRPKFTVPQINCDVKAGKIIDPEFIVKCPAGCQDPKYHVYGTDVYASYSSVCGAAVHSGVLDNSGGKILVRKVAGQSGYKGSYSNGVQSLSLPRWRESFIVLESKPKKGVTYPSALTYSSSKSPAAQAGKCSRETTKAYQRPPIPGTTAQPVTLMQLLAVTVAVATPTTLPRPSPSAASTTSIPRPQSVGHRSQEMDLWSTATYTSSQNRPRADPGLVPKEELSTQSLEPVSLGDPNCKIDLSFLIDGSTSIGKRRFRIQKQLLADVAQALDIGPAGPLMGVVQYGDNPATHFNLKTHTNSRDLKTAIEKITQRGGLSNVGRAISFVTKNFFSKANGNRSGAPNVVVVMVDGWPTDKVEEASRLARESGINIFFITIEGAAENEKQYVVEPNFANKAVCRTNGFYSLHVQSWFGLHKTLQPLVKRVCDTDRLACSKTCLNSADIGFVIDGSSSVGTGNFRTVLQFVTNLTKEFEISDTDTRIGAVQYTYEQRLEFGFDKYSSKPDILNAIKRVGYWSGGTSTGAAINFALEQLFKKSKPNKRKLMILITDGRSYDDVRIPAMAAHLKGVITYAIGVAWAAQEELEVIATHPARDHSFFVDEFDNLHQYVPRIIQNICTEFNSQPRN

SEQ ID NO: 10340 - protein, 433 aa, Homo sapiens
SILKIHAREIFDSRGNPTVEVDLFTSKGLFRAAVPSGASTGIYEALELRDNDKTRYMGKGVSKAVEHINKTIAPALVSKKLNVTEQEKIDKLMIEMDGTENKSKFGANAILGVSLAVCKAGAVEKGVPLYRHIADLAGNSEVILPVPAFNVINGGSHAGNKLAMQEFMILPVGAANFREAMRIGAEVYHNLKNVIKEKYGKDATNVGDEGGFAPNILENKEGLELLKTAIGKAGYTDKVVIGMDVAASEFFRSGKYDLDFKSPDDPSRYISPDQLADLYKSFIKDYPVVSIEDPFDQDDWGAWQKFTASAGIQVVGDDLTVTNPKRIAKAVNEKSCNCLLLKVNQIGSVTESLQACKLAQANGWGVMVSHRSGETEDTFIADLVVGLCTGQIKTGAPCRSERLAKYNQLLRIEEELGSKAKFAGRNFRNPLAK

SEQ ID NO: 10341 - protein, 1056 aa, Homo sapiens
MALRRLGAALLLLPLLAAVEETLMDSTTATAELGWMVHPPSGWEEVSGYDENMNTIRTYQVCNVFESSQNNWLRTKFIRRRGAHRIHVEMKFSVRDCSSIPSVPGSCKETFNLYYYEADFDSATKTFPNWMENPWVKVDTIAADESFSQVDLGGRVMKINTEVRSFGPVSRSGFYLAFQDYGGCMSLIAVRVFYRKCPRIIQNGAIFQETLSGAESTSLVAARGSCIANAEEVDVPIKLYCNGDGEWLVPIGRCMCKAGFEAVENGTVCRGCPSGTFKANQGDEACTHCPINSRTTSEGATNCVCRNGYYRADLDPLDMPCTTIPSAPQAVISSVNETSLMLEWTPPRDSGGREDLVYNIICKSCGSGRGACTRCGDNVQYAPRQLGLTEPRIYISDLLAHTQYTFEIQAVNGVTDQSPFSPQFASVNITTNQAAPSAVSIMHQVSRTVDSITLSWSQPDQPNGVILDYELQYYEKELSEYNATAIKSPTNTVTVQGLKAGAIYVFQVRARTVAGYGRYSGKMYFQTMTEAEYQTSIQEKLPLIIGSSAAGLVFLIAVVVIAIVCNRRRGFERADSEYTDKLQHYTSGHMTPGMKIYIDPFTYEDPNEAVREFAKEIDISCVKIEQVIGAGEFGEVCSGHLKLPGKREIFVAIKTLKSGYTEKQRRDFLSEASIMGQFDHPNVIHLEGVVTKSTPVMIITEFMENGSLDSFLRQNDGQFTVIQLVGMLRGIAAGMKYLADMNYVHRDLAARNILVNSNLVCKVSDFGLSRFLEDDTSDPTYTSALGGKIPIRWTAPEAIQYRKFTSASDVWSYGIVMWEVMSYGERPYWDMTNQDVINAIEQDYRLPPPMDCPSALHQLMLDCWQKDRNHRPKFGQIVNTLDKMIRNPNSLKAMAPLSSGINLPLLDRTIPDYTSFNTVDEWLEAIKMGQYKESFANAGFTSFDVVSQMMMEDILRVGVTLAGHQKKILNSIQVMRAQMNQIQSVEGQPLARRPRATGRTKRCQPRDVTKKTCNSNDGKKKGMGKKKTDPGRGREIQGIFFKEDSHKESNDCSCGG

SEQ ID NO: 10342 - protein, 986 aa, Homo sapiens
MALRRLGAALLLLPLLAAVEETLMDSTTATAELGWMVHPPSGWEEVSGYDENMNTIRTYQVCNVFESSQNNWLRTKFIRRRGAHRIHVEMKFSVRDCSSIPSVPGSCKETFNLYYYEADFDSATKTFPNWMENPWVKVDTIAADESFSQVDLGGRVMKINTEVRSFGPVSRSGFYLAFQDYGGCMSLIAVRVFYRKCPRIIQNGAIFQETLSGAESTSLVAARGSCIANAEEVDVPIKLYCNGDGEWLVPIGRCMCKAGFEAVENGTVCRGCPSGTFKANQGDEACTHCPINSRTTSEGATNCVCRNGYYRADLDPLDMPCTTIPSAPQAVISSVNETSLMLEWTPPRDSGGREDLVYNIICKSCGSGRGACTRCGDNVQYAPRQLGLTEPRIYISDLLAHTQYTFEIQAVNGVTDQSPFSPQFASVNITTNQAAPSAVSIMHQVSRTVDSITLSWSQPDQPNGVILDYELQYYEKELSEYNATAIKSPTNTVTVQGLKAGAIYVFQVRARTVAGYGRYSGKMYFQTMTEAEYQTSIQEKLPLIIGSSAAGLVFLIAVVVIAIVCNRRGFERADSEYTDKLQHYTSGHMTPGMKIYIDPFTYEDPNEAVREFAKEIDISCVKIEQVIGAGEFGEVCSGHLKLPGKREIFVAIKTLKSGYTEKQRRDFLSEASIMGQFDHPNVIHLEGVVTKSTPVMIITEFMENGSLDSFLRQNDGQFTVIQLVGMLRGIAAGMKYLADMNYVHRDLAARNILVNSNLVCKVSDFGLSRFLEDDTSDPTYTSALGGKIPIRWTAPEAIQYRKFTSASDVWSYGIVMWEVMSYGERPYWDMTNQDVINAIEQDYRLPPPMDCPSALHQLMLDCWQKDRNHRPKFGQIVNTLDKMIRNPNSLKAMAPLSSGINLPLLDRTIPDYTSFNTVDEWLEAIKMGQYKESFANAGFTSFDVVSQMMMEDILRLGVTLAGHQKKILNSIQVMRAQMNQIQSVEV

SEQ ID NO: 10343 - protein, 1055 aa, Homo sapiens
MALRRLGAALLLLPLLAAVEETLMDSTTATAELGWMVHPPSGWEEVSGYDENMNTIRTYQVCNVFESSQNNWLRTKFIRRRGAHRIHVEMKFSVRDCSSIPSVPGSCKETFNLYYYEADFDSATKTFPNWMENPWVKVDTIAADESFSQVDLGGRVMKINTEVRSFGPVSRSGFYLAFQDYGGCMSLIAVRVFYRKCPRIIQNGAIFQETLSGAESTSLVAARGSCIANAEEVDVPIKLYCNGDGEWLVPIGRCMCKAGFEAVENGTVCRGCPSGTFKANQGDEACTHCPINSRTTSEGATNCVCRNGYYRADLDPLDMPCTTIPSAPQAVISSVNETSLMLEWTPPRDSGGREDLVYNIICKSCGSGRGACTRCGDNVQYAPRQLGLTEPRIYISDLLAHTQYTFEIQAVNGVTDQSPFSPQFASVNITTNQAAPSAVSIMHQVSRTVDSITLSWSQPDQPNGVILDYELQYYEKELSEYNATAIKSPTNTVTVQGLKAGAIYVFQVRARTVAGYGRYSGKMYFQTMTEAEYQTSIQEKLPLIIGSSAAGLVFLIAVVVIAIVCNRRGFERADSEYTDKLQHYTSGHMTPGMKIYIDPFTYEDPNEAVREFAKEIDISCVKIEQVIGAGEFGEVCSGHLKLPGKREIFVAIKTLKSGYTEKQRRDFLSEASIMGQFDHPNVIHLEGVVTKSTPVMIITEFMENGSLDSFLRQNDGQFTVIQLVGMLRGIAAGMKYLADMNYVHRDLAARNILVNSNLVCKVSDFGLSRFLEDDTSDPTYTSALGGKIPIRWTAPEAIQYRKFTSASDVWSYGIVMWEVMSYGERPYWDMTNQDVINAIEQDYRLPPPMDCPSALHQLMLDCWQKDRNHRPKFGQIVNTLDKMIRNPNSLKAMAPLSSGINLPLLDRTIPDYTSFNTVDEWLEAIKMGQYKESFANAGFTSFDVVSQMMMEDILRLGVTLAGHQKKILNSIQVMRAQMNQIQSVEGQPLARRPRATGRTKRCQPRDVTKKTCNSNDGKKKGMGKKKTDPGRGREIQGIFFKEDSHKESNDCSCGG

SEQ ID NO: 10344 - protein, 226 aa, Homo sapiens
MFIMGLGDPIPEELYEMLSDHSIRSFDDLQRLLHGDPGEEDGAELDLNMTRSHSGGELESLARGRRSLGSLTIAEPAMIAECKTRTEVFEISRRLIDRTNANFLVWPPCVEVQRCSGCCNNRNVQCRPTQVQLRPVQVRKIEIVRKKPIFKKATVTLEDHLACKCETVAAARPVTRSPGGSQEQRAKTPQTRVTIRTVRVRRPPKGKHRKFKHTHDKTALKETLGA

SEQ ID NO: 10345 - protein, 241 aa, Homo sapiens
MNRCWALFLSLCCYLRLVSAEGDPIPEELYEMLSDHSIRSFDDLQRLLHGDPGEEDGAELDLNMTRSHSGGELESLARGRRSLGSLTIAEPAMIAECKTRTEVFEISRRLIDRTNANFLVWPPCVEVQRCSGCCNNRNVQCRPTQVQLRPVQVRKIEIVRKKPIFKKATVTLEDHLACKCETVAAARPVTRSPGGSQEQRAKTPQTRVTIRTVRVRRPPKGKHRKFKHTHDKTALKETLGA

SEQ ID NO: 10346 - protein, 424 aa, Homo sapiens
MRAPGCGRLVLPLLLLAAAALAEGDAKGLKEGETPGNFMEDEQWLSSISQYSGKIKHWNRFRDEVEDDYIKSWEDNQQGDEALDTTKDPCQKVKCSRHKVCIAQGYQRAMCISRKKLEHRIKQPTVKLHGNKDSICKPCHMAQLASVCGSDGHTYSSVCKLEQQACLSSKQLAVRCEGPCPCPTEQAATSTADGKPETCTGQDLADLGDRLRDWFQLLHENSKQNGSASSVAGPASGLDKSLGASCKDSIGWMFSKLDTSADLFLDQTELAAINLDKYEVCIRPFFNSCDTYKDGRVSTAEWCFCFWREKPPCLAELERIQIQEAAKKKPGIFIPSCDEDGYYRKMQCDQSSGDCWCVDQLGLELTGTRTHGSPDCDDIVGFSGDFGSGVGWEDEEEKETEEAGEEAEEEEGEAGEADDGGYIW

SEQ ID NO: 10347 - protein, 1091 aa, Homo sapiens
MAAAGQLCLLYLSAGLLSRLGAAFNLDTREDNVIRKYGDPGSLFGFSLAMHWQLQPEDKRLLLVGAPRGEALPLQRANRTGGLYSCDITARGPCTRIEFDNDADPTSESKEDQWMGVTVQSQGPGGKVVTCAHRYEKRQHVNTKQESRDIFGRCYVLSQNLRIEDDMDGGDWSFCDGRLRGHEKFGSCQQGVAATFTKDFHYIVFGAPGTYNWKGIVRVEQKNNTFFDMNIFEDGPYEVGGETEHDESLVPVPANSYLGFSLDSGKGIVSKDEITFVSGAPRANHSGAVVLLKRDMKSAHLLPEHIFDGEGLASSFGYDVAVVDLNKDGWQDIVIGAPQYFDRDGEVGGAVYVYMNQQGRWNNVKPIRLNGTKDSMFGIAVKNIGDINQDGYPDIAVGAPYDDLGKVFIYHGSANGINTKPTQVLKGISPYFGYSIAGNMDLDRNSYPDVAVGSLSDSVTIFRSRPVINIQKTITVTPNRIDLRQKTACGAPSGICLQVKSCFEYTANPAGYNPSISIVGTLEAEKERRKSGLSSRVQFRNQGSEPKYTQELTLKRQKQKVCMEETLWLQDNIRDKLRPIPITASVEIQEPSSRRRVNSLPEVLPILNSDEPKTAHIDVHFLKEGCGDDNVCNSNLKLEYKFCTREGNQDKFSYLPIQKGVPELVLKDQKDIALEITVTNSPSNPRNPTKDGDDAHEAKLIATFPDTLTYSAYRELRAFPEKQLSCVANQNGSQADCELGNPFKRNSNVTFYLVLSTTEVTFDTPDLDINLKLETTSNQDNLAPITAKAKVVIELLLSVSGVAKPSQVYFGGTVVGEQAMKSEDEVGSLIEYEFRVINLGKPLTNLGTATLNIQWPKEISNGKWLLYLVKVESKGLEKVTCEPQKEINSLNLTESHNSRKKREITEKQIDDNRKFSLFAERKYQTLNCSVNVNCVNIRCPLRGLDSKASLILRSRLWNSTFLEEYSKLNYLDILMRAFIDVTAAAENIRLPNAGTQVRVTVFPSKTVAQYSGVPWWIILVAILAGILMLALLVFILWKCGFFKRSRYDDSVPRYHAVRIRKEEREIKDEKYIDNLEKKQWITKWNRNESYS

SEQ ID NO: 10348 - protein, 1130 aa, Homo sapiens
MAAAGQLCLLYLSAGLLSRLGAAFNLDTREDNVIRKYGDPGSLFGFSLAMHWQLQPEDKRLLLVGAPRGEALPLQRANRTGGLYSCDITARGPCTRIEFDNDADPTSESKEDQWMGVTVQSQGPGGKVVTCAHRYEKRQHVNTKQESRDIFGRCYVLSQNLRIEDDMDGGDWSFCDGRLRGHEKFGSCQQGVAATFTKDFHYIVFGAPGTYNWKGIVRVEQKNNTFFDMNIFEDGPYEVGGETEHDESLVPVPANSYLGLLFLTSVSYTDPDQFVYKTRPPREQPDTFPDVMMNSYLGFSLDSGKGIVSKDEITFVSGAPRANHSGAVVLLKRDMKSAHLLPEHIFDGEGLASSFGYDVAVVDLNKDGWQDIVIGAPQYFDRDGEVGGAVYVYMNQQGRWNNVKPIRLNGTKDSMFGIAVKNIGDINQDGYPDIAVGAPYDDLGKVFIYHGSANGINTKPTQVLKGISPYFGYSIAGNMDLDRNSYPDVAVGSLSDSVTIFRSRPVINIQKTITVTPNRIDLRQKTACGAPSGICLQVKSCFEYTANPAGYNPSISIVGTLEAEKERRKSGLSSRVQFRNQGSEPKYTQELTLKRQKQKVCMEETLWLQDNIRDKLRPIPITASVEIQEPSSRRRVNSLPEVLPILNSDEPKTAHIDVHFLKEGCGDDNVCNSNLKLEYKFCTREGNQDKFSYLPIQKGVPELVLKDQKDIALEITVTNSPSNPRNPTKDGDDAHEAKLIATFPDTLTYSAYRELRAFPEKQLSCVANQNGSQADCELGNPFKRNSNVTFYLVLSTTEVTFDTPDLDINLKLETTSNQDNLAPITAKAKVVIELLLSVSGVAKPSQVYFGGTVVGEQAMKSEDEVGSLIEYEFRVINLGKPLTNLGTATLNIQWPKEISNGKWLLYLVKVESKGLEKVTCEPQKEINSLNLTESHNSRKKREITEKQIDDNRKFSLFAERKYQTLNCSVNVNCVNIRCPLRGLDSKASLILRSRLWNSTFLEEYSKLNYLDILMRAFIDVTAAAENIRLPNAGTQVRVTVFPSKTVAQYSGVPWWIILVAILAGILMLALLVFILWKCGFFKRSRYDDSVPRYHAVRIRKEEREIKDEKYIDNLEKKQWITKWNRNESYS

SEQ ID NO: 10349 - protein, 1073 aa, Homo sapiens
MAAAGQLCLLYLSAGLLSRLGAAFNLDTREDNVIRKYGDPGSLFGFSLAMHWQLQPEDKRLLLVGAPRGEALPLQRANRTGGLYSCDITARGPCTRIEFDNDADPTSESKEDQWMGVTVQSQGPGGKVVTCAHRYEKRQHVNTKQESRDIFGRCYVLSQNLRIEDDMDGGDWSFCDGRLRGHEKFGSCQQGVAATFTKDFHYIVFGAPGTYNWKGIVRVEQKNNTFFDMNIFEDGPYEVGGETEHDESLVPVPANSYLGFSLDSGKGIVSKDEITFVSGAPRANHSGAVVLLKRDMKSAHLLPEHIFDGEGLASSFGYDVAVVDLNKDGWQDIVIGAPQYFDRDGEVGGAVYVYMNQQGRWNNVKPIRLNGTKDSMFGIAVKNIGDINQDGYPDIAVGAPYDDLGKVFIYHGSANGINTKPTQVLKGISPYFGYSIAGNMDLDRNSYPDVAVGSLSDSVTIFRSRPVINIQKTITVTPNRIDLRQKTACGAPSGICLQVKSCFEYTANPAGYNPSISIVGTLEAEKERRKSGLSSRVQFRNQGSEPKYTQELTLKRQKQKVCMEETLWLQDNIRDKLRPIPITASVEIQEPSSRRRVNSLPEVLPILNSDEPKTAHIDVHFLKEGCGDDNVCNSNLKLEYKFCTREGNQDKFSYLPIQKGVPELVLKDQKDIALEITVTNSPSNPRNPTKDGDDAHEAKLIATFPDTLTYSAYRELRAFPEKQLSCVANQNGSQADCELGNPFKRNSNVTFYLVLSTTEVTFDTPDLDINLKLETTSNQDNLAPITAKAKVVIELLLSVSGVAKPSQVYFGGTVVGEQAMKSEDEVGSLIEYEFRVINLGKPLTNLGTATLNIQWPKEISNGKWLLYLVKVESKGLEKVTCEPQKEINSLNLTESHNSRKKREITEKQIDDNRKFSLFAERKYQTLNCSVNVNCVNIRCPLRGLDSKASLILRSRLWNSTFLEEYSKLNYLDILMRAFIDVTAAAENIRLPNAGTQVRVTVFPSKTVAQYSGVPWWIILVAILAGILMLALLVFILWKCGFFKRNKKDHYDATYHKAEIHAQPSDKERLTSDA

SEQ ID NO: 10350 - protein, 1112 aa, Homo sapiens
MAAAGQLCLLYLSAGLLSRLGAAFNLDTREDNVIRKYGDPGSLFGFSLAMHWQLQPEDKRLLLVGAPRGEALPLQRANRTGGLYSCDITARGPCTRIEFDNDADPTSESKEDQWMGVTVQSQGPGGKVVTCAHRYEKRQHVNTKQESRDIFGRCYVLSQNLRIEDDMDGGDWSFCDGRLRGHEKFGSCQQGVAATFTKDFHYIVFGAPGTYNWKGIVRVEQKNNTFFDMNIFEDGPYEVGGETEHDESLVPVPANSYLGLLFLTSVSYTDPDQFVYKTRPPREQPDTFPDVMMNSYLGFSLDSGKGIVSKDEITFVSGAPRANHSGAVVLLKRDMKSAHLLPEHIFDGEGLASSFGYDVAVVDLNKDGWQDIVIGAPQYFDRDGEVGGAVYVYMNQQGRWNNVKPIRLNGTKDSMFGIAVKNIGDINQDGYPDIAVGAPYDDLGKVFIYHGSANGINTKPTQVLKGISPYFGYSIAGNMDLDRNSYPDVAVGSLSDSVTIFRSRPVINIQKTITVTPNRIDLRQKTACGAPSGICLQVKSCFEYTANPAGYNPSISIVGTLEAEKERRKSGLSSRVQFRNQGSEPKYTQELTLKRQKQKVCMEETLWLQDNIRDKLRPIPITASVEIQEPSSRRRVNSLPEVLPILNSDEPKTAHIDVHFLKEGCGDDNVCNSNLKLEYKFCTREGNQDKFSYLPIQKGVPELVLKDQKDIALEITVTNSPSNPRNPTKDGDDAHEAKLIATFPDTLTYSAYRELRAFPEKQLSCVANQNGSQADCELGNPFKRNSNVTFYLVLSTTEVTFDTPDLDINLKLETTSNQDNLAPITAKAKVVIELLLSVSGVAKPSQVYFGGTVVGEQAMKSEDEVGSLIEYEFRVINLGKPLTNLGTATLNIQWPKEISNGKWLLYLVKVESKGLEKVTCEPQKEINSLNLTESHNSRKKREITEKQIDDNRKFSLFAERKYQTLNCSVNVNCVNIRCPLRGLDSKASLILRSRLWNSTFLEEYSKLNYLDILMRAFIDVTAAAENIRLPNAGTQVRVTVFPSKTVAQYSGVPWWIILVAILAGILMLALLVFILWKCGFFKRNKKDHYDATYHKAEIHAQPSDKERLTSDA

SEQ ID NO: 10351 - protein, 191 aa, Homo sapiens [sequence omitted]

SEQ ID NO: 10352 - protein, 155 aa, Homo sapiens
VALHSTLLGSHFSTNHVALRDTGNQLIVTMSCLTKEDTGWYWCGIQRDFARDDMDFTELIVTDDKGTLANDFWSGKDLSGNKTRSCKAPKVVRKADRSRTSILIICILITGLGIISVISHLTKRRRSQRNRRVGNTLKPFSRVLTPKEMAPTEQM

SEQ ID NO: 10353 - protein, 2861 aa, Homo sapiens
MKAMDVLPILKEKVAYLSGGRDKRGGPILTFPARSNHDRIRQEDLRRLISYLACIPSEEVCKRGFTVIVDMRGSKWDSIKPLLKILQESFPCCIHVALIIKPDNFWQKQRTNFGSSKFEFETNMVSLEGLTKVVDPSQLTPEFDGCLEYNHEEWIEIRVAFEDYISNATHMLSRLEELQDILAKKELPQDLEGARNMIEEHSQLKKKVIKAPIEDLDLEGQKLLQRIQSSESFPKKNSGSGNADLQNLLPKVSTMLDRLHSTRQHLHQMWHVRKLKLDQCFQLRLFEQDAEKMFDWITHNKGLFLNSYTEIGTSHPHAMELQTQHNHFAMNCMNVYVNINRIMSVANRLVESGHYASQQIRQIASQLEQEWKAFAAALDERSTLLDMSSIFHQKAEKYMSNVDSWCKACGEVDLPSELQDLEDAIHHHQGIYEHITLAYSEVSQDGKSLLDKLQRPLTPGSSDSLTASANYSKAVHHVLDVIHEVLHHQRHVRTIWQHRKVRLHQRLQLCVFQQEVQQVLDWIENHGEAFLSKHTGVGKSLHRARALQKRHEDFEEVAQNTYTNADKLLEAAEQLAQTGECDPEEIYQAAHQLEDRIQDFVRRVEQRKILLDMSVSFHTHVKELWTWLEELQKELLDDVYAESVEAVQDLIKRFGQQQQTTLQVTVNVIKEGEDLIQQLRDSAISSNKTPHNSSINHIETVLQQLDEAQSQMEELFQERKIKLELFLHVRIFERDAIDIISDLESWNDELSQQMNDFDTEDLTIAEQRLQHHADKALTMNNLTFDVIHQGQDLLQYVNEVQASGVELLCDRDVDMATRVQDLLEFLHEKQQELDLAAEQHRKHLEQCVQLRHLQAEVKQVLGWIRNGESMLNAGLITASSLQEAEQLQREHEQFQHAIEKTHQSALQVQQKAEAMLQANHYDMDMIRDCAEKVASHWQQLMLKMEDRLKLVNASVAFYKTSEQVCSVLESLEQEYKREEDWCGGADKLGPNSETDHVTPMISKHLEQKEAFLKACTLARRNADVFLKYLHRNSVNMPGMVTHIKAPEQQVKNILNELFQRENRVLHYWTMRKRRLDQCQQYVVFERSAKQALEWIHDNGEFYLSTHTSTGSSIQHTQELLKEHEEFQITAKQTKERVKLLIQLADGFCEKGHAHAAEIKKCVTAVDKRYRDFSLRMEKYRTSLEKALGISSDSNKSSKSLQLDIIPASIPGSEVKLRDAAHELNEEKRKSARRKEFIMAELIQTEKAYVRDLRECMDTYLWEMTSGVEEIPPGIVNKELIIFGNMQEIYEFHNNIFLKELEKYEQLPEDVGHCFVTWADKFQMYVTYCKNKPDSTQLILEHAGSYFDEIQQRHGLANSISSYLIKPVQRITKYQLLLKELLTCCEEGKGEIKDGLEVMLSVPKRANDAMHLSMLEGFDENIESQGELILQESFQVWDPKTLIRKGRERHLFLFEMSLVFSKEVKDSSGRSKYLYKSKLFTSELGVTEHVEGDPCKFALWVGRTPTSDNKIVLKASSIENKQDWIKHIREVIQERTIHLKGALKEPIHIPKTAPATRQKGRRDGEDLDSQGDGSSQPDTISIASRTSQNTLDSDKLSGGCELTVVIHDFTACNSNELTIRRGQTVEVLERPHDKPDWCLVRTTDRSPAAEGLVPCGSLCIAHSRSSMEMEGIFNHKDSLSVSSNDASPPASVASLQPHMIGAQSSPGPKRPGNTLRKWLTSPVRRLSSGKADGHVKKLAHKHKKSREVRKSADAGSQKDSDDSAATPQDETVEERGRNEGLSSGTLSKSSSSGMQSCGEEEGEEGADAVPLPPPMAIQQHSLLQPDSQDDKASSRLLVRPTSSETPSAAELVSAIEELVKSKMALEDRPSSLLVDQGDSSSPSFNPSDNSLLSSSSPIDEMEERKSSSLKRRHYVLQELVETERDYVRDLGYVVEGYMALMKEDGVPDDMKGKDKIVFGNIHQIYDWHRDFFLGELEKCLEDPEKLGSLFVKHERRLHMYIAYCQNKPKSEHIVSEYIDTFFEDLKQRLGHRLQLTDLLIKPVQRIMKYQLLLKDFLKYSKKASLDTSELERAVEVMCIVPRRCNDMMNVGRLQGFDGKIVAQGKLLLQDTFLVTDQDAGLLPRCRERRIFLFEQIVIFSEPLDKKKGFSMPGFLFKNSIKVSCLCLEENVENDPCKFALTSRTGDVVETFILHSSSPSVRQTWIHEINQILENQRNFLNALTSPIEYQRNHSGGGGGGGSGAAAGVGAAAAAGPPVAAAATVAAPAAAAAPPARAGAGPPGSPSLSDTTPPCWSPLQPRARQRQTRCQSESSSSSNISTMLVTHDYTAVKEDEINVYQGEVVQILASNQQNMFLVFRAATDQCPAAEGWIPGFVLGHTSAVIVENPDGTLKKSTSWHTALRLRKKSEKKDKDGKREGKLENGYRKSREGLSNKVSVKLLNPNYIYDVPPEFVIPLSEVTCETGETVVLRCRVCGRPKASITWKGPEHNTLNNDGHYSISYSDLGEATLKIVGVTTEDDGIYTCIAVNDMGSASSSASLRVLGPGMDGIMVTWKDNFDSFYSEVAELGRGRFSVVKKCDQKGTKRAVATKFVNKKLMKRDQVTHELGILQSLQHPLLVGLLDTFETPTSYILVLEMADQGRLLDCVVRWGSLTEGKIRAHLGEVLEAVRYLHNCRIAHLDLKPENILVDESLAKPTIKLADFGDAVQLNTTYYIHQLLGNPEFAAPEIILGNPVSLTSDTWSVGVLTYVLLSGVSPFLDDSVEETCLNICRLDFSFPDDYFKGVSQKAKEFVCFLLQEDPAKRPSAALALQEQWLQAGNGRSTGVLDTSRLTSFIERRKHQNDVRPIRSIKNFLQSRLLPRV

SEQ ID NO: 10354 - protein, 727 aa, Homo sapiens [sequence omitted]

SEQ ID NO: 10355 - protein, 412 aa, Homo sapiens
MGLHLRPYRVGLLPDGLLFLLLLLMLLADPALPAGRHPPVVLVPGDLGNQLEAKLDKPTVVHYLCSKKTESYFTIWLNLELLLPVIIDCWIDNIRLVYNKTSRATQFPDGVDVRVPGFGKTFSLEFLDPSKSSVGSYFHTMVESLVGWGYTRGEDVRGAPYDWRRAPNENGPYFLALREMIEEMYQLYGGPVVLVAHSMGNMYTLYFLQRQPQAWKDKYIRAFVSLGAPWGGVAKTLRVLASGDNNRIPVIGPLKIREQQRSAVSTSWLLPYNYTWSPEKVFVQTPTINYTLRDYRKFFQDIGFEDGWLMRQDTEGLVEATMPPGVQLHCLYGTGVPTPDSFYYESFPDRDPKICFGDGDGTVNLKSALQCQAWQSRQEHQVLLQELPGSEHIEMLANATTLAYLKRVLLGP

SEQ ID NO: 10356 - protein, 412 aa, Homo sapiens [sequence omitted]

SEQ ID NO: 10357 - protein, 201 aa, Homo sapiens
MRLLPLLRTVLWAAFLGSPLRGGSSLRHVVYWNSSNPRLLRGDAVVELGLNDYLDIVCPHYEGPGPPEGPETFALYMVDWPGYESCQAEGPRAYKRWVCSLPFGHVQFSEKIQRFTPFSLGFEFLPGETYYYISVPTPESSGQCLRLQVSVCCKERKSESAHPVGSPGESGTSGWRGGDTPSPLCLLLLLLLLILRLLRIL

SEQ ID NO: 10358 - protein, 192 aa, Homo sapiens
MRLLPLLRTVLWAAFLGSPLRGGSSLRHVVYWNSSNPRLLRGDAVVELGLNDYLDIVCPHYEGPGPPEGPETFALYMVDWPGYESCQAEGPRAYKRWVCSLPFGHVQFSEKIQRFTPFSLGFEFLPGETYYYISVPTPESSGQCLRLQVSVCCKERNLPSHPKEPESSQDPLEEEGSLLPALGVPIQTDKME

SEQ ID NO: 10359 - protein, 214 aa, Homo sapiens
MRLLPLLRTVLWAAFLGSPLRGGSSLRHVVYWNSSNPRLLRGDAVVELGLNDYLDIVCPHYEGPGPPEGPETFALYMVDWPGYESCQAEGPRAYKRWVCSLPFGHVQFSEKIQRFTPFSLGFEFLPGETYYYISVPTPESSGQCLRLQVSVCCKERRPSLSSQGARVLPRSPGGGGIPAACTGGANSDRQDGALMGEIRGSEVTLAGACPLITG

SEQ ID NO: 10360 - protein, 207 aa, Homo sapiens
MRLLPLLRTVLWAAFLGSPLRGGSSLRHVVYWNSSNPRLLRGDAVVELGLNDYLDIVCPHYEGPGPPEGPETFALYMVDWPGYESCQAEGPRAYKRWVCSLPFGHVQFSEKIQRFTPFSLGFEFLPGETYYYISVPTPESSGQCLRLQVSVCCKERRARVLPRSPGGGGIPAACTGGANSDRQDGALMGEIRGSEVTLAGACPLITG

SEQ ID NO: 10361 - protein, 996 aa, Homo sapiens
MEKRLGVKPNPASWILSGYYWQTSAKWLRSLYLFYTCFCFSVLWLSTDASESRCQQGKTQFGVGLRSGGENHLWLLEGTPSLQSCWAACCQDSACHVFWWLEGMCIQADCSRPQSCRAFRTHSSNSMLVFLKKFQTADDLGFLPEDDVPHLLGLGWNWASWRQSPPRAALRPAVSSSDQQSLIRKLQKRGSPSDVVTPIVTQHSKVNDSNELGGLTTSGSAEVHKAITISSPLTTDLTAELSGGPKNVSVQPEISEGLATTPSTQQVKSSEKTQIAVPQPVAPSYSYATPTPQASFQSTSAPYPVIKELVVSAGESVQITLPKNEVQLNAYVLQEPPKGETYTYDWQLITHPRDYSGEMEGKHSQILKLSKLTPGLYEFKVIVEGQNAHGEGYVNVTVKPEPRKNRPPIAIVSPQFQEISLPTTSTVIDGSQSTDDDKIVQYHWEELKGPLREEKISEDTAILKLSKLVPGNYTFSLTVVDSDGATNSTTANLTVNKAVDYPPVANAGPNQVITLPQNSITLFGNQSTDDHGITSYEWSLSPSSKGKVVEMQGVRTPTLQLSAMQEGDYTYQLTVTDTIGQQATAQVTVIVQPENNKPPQADAGPDKELTLPVDSTTLDGSKSSDDQKIISYLWEKTQGPDGVQLENANSSVATVTGLQVGTYVFTLTVKDERNLQSQSSVNVIVKEEINKPPIAKITGNVVITLPTSTAELDGSKSSDDKGIVSYLWTRDEGSPAAGEVLNHSDHHPILFLSNLVEGTYTFHLKVTDAKGESDTDRTTVEVKPDPRKNNLVEIILDINVSQLTERLKGMFIRQIGVLLGVLDSDIIVQKIQPYTEQSTKMVFFVQNEPPHQIFKGHEVAAMLKSELRKQKADFLIFRALEVNTVTCQLNCSDHGHCDSFTKRCICDPFWMENFIKVQLRDGDSNCEWSVLYVIIATFVIVVALGILSWTVICCCKRQKGKPKRKSKYKILDATDQESLELKPTSRAGRGPGCQSF

SEQ ID NO: 10362 - protein, 1049 aa, Homo sapiens [sequence omitted]

SEQ ID NO: 10363 - protein, 577 aa, Homo sapiens
MEGSGGGAGERAPLLGARRAAAAAAAAGAFAGRRAACGAVLLTELLERAAFYGITSNLVLFLNGAPFCWEGAQASEALLLFMGLTYLGSPFGGWLADARLGRARAILLSLALYLLGMLAFPLLAAPATRAALCGSARLLNCTAPGPDAAARCCSPATFAGLVLVGLGVATVKANITPFGADQVKDRGPEATRRFFNWFYWSINLGAILSLGGIAYIQQNVSFVTGYAIPTVCVGLAFVVFLCGQSVFITKPPDGSAFTDMFKILTYSCCSQKRSGERQSNGEGIGVFQQSSKQSLFDSCKMSHGGPFTEEKVEDVKALVKIVPVFLALIPYWTVYFQMQTTYVLQSLHLRIPEISNITTTPHTLPAAWLTMFDAVLILLLIPLKDKLVDPILRRHGLLPSSLKRIAVGMFFVMCSAFAAGILESKRLNLVKEKTINQTIGNVVYHAADLSLWWQVPQYLLIGISEIFASIAGLEFAYSAAPKSMQSAIMGLFFFFSGVGSFVGSGLLALVSIKAIGWMSSHTDFGNINGCYLNYYFFLLAAIQGATLLLFLIISVKYDHHRDHQRSRANGVPTSRRA

SEQ ID NO: 10364 - protein, 204 aa, Homo sapiens
MVCGGFACSKNCLCALNLLYTLVSLLLIGIAAWGIGFGLISSLRVVGVVIAVGIFLFLIALVGLIGAVKHHQVLLFFYMIILLLVFIVQFSVSCACLALNQEQQGQLLEVGWNNTASARNDIQRNLNCCGFRSVNPNDTCLASCVKSDHSCSPCAPIIGEYAGEVLRFVGGIGLFFSFTEILGVWLTYRYRNQKDPRANPSAFL

SEQ ID NO: 10365 - protein, 755 aa, Homo sapiens
MARKLSVILILTFALSVTNPLHELKAAAFPQTTEKISPNWESGINVDLAISTRQYHLQQLFYRYGENNSLSVEGFRKLLQNIGIDKIKRIHIHHDHDHHSDHEHHSDHERHSDHEHHSEHEHHSDHDHHSHHNHAASGKNKRKALCPDHDSDSSGKDPRNSQGKGAHRPEHASGRRNVKDSVSASEVTSTVYNTVSEGTHFLETIETPRPGKLFPKDVSSSTPPSVTSKSRVSRLAGRKTNESVSEPRKGFMYSRNTNENPQECFNASKLLTSHGMGIQVPLNATEFNYLCPAIINQIDARSCLIHTSEKKAEIPPKTYSLQIAWVGGFIAISIISFLSLLGVILVPLMNRVFFKFLLSFLVALAVGTLSGDAFLHLLPHSHASHHHSHSHEEPAMEMKRGPLFSHLSSQNIEESAYFDSTWKGLTALGGLYFMFLVEHVLTLIKQFKDKKKKNQKKPENDDDVEIKKQLSKYESQLSTNEEKVDTDDRTEGYLRADSQEPSHFDSQQPAVLEEEEVMIAHAHPQEVYNEYVPRGCKNKCHSHFHDTLGQSDDLIHHHHDYHHILHHHHHQNHHPHSHSQRYSREELKDAGVATLAWMVIMGDGLHNFSDGLAIGAAFTEGLSSGLSTSVAVFCHELPHELGDFAVLLKAGMTVKQAVLYNALSAMLAYLGMATGIFIGHYAENVSMWIFALTAGLFMYVALVDMVPEMLHNDASDHGCSRWGYFFLQNAGMLLGFGIMLLISIFEHKIVFRINF

SEQ ID NO: 10366 - protein, 904 aa, Homo sapiens
MEWGSESAAVRRHRVGVERREGAAAAPPPEREARAQEPLVDGCSGGGRTRKRSPGGSGGASRGAGTGLSEVRAALGLALYLIALRTLVQLSLQQLVLRGAAGHRGEFDALQARDYLEHITSIGPRTTGSPENEILTVHYLLEQIKLIEVQSNSLHKISVDVQRPTGSFSIDFLGGFTSYYDNITNVVVKLEPRDGAQHAVLANCHFDSVANSPGASDDAVSCSVMLEVLRVLSTSSEALHHAVIFLFNGAEENVLQASHGFITQHPWASLIRAFINLEAAGVGGKELVFQTGPENPWLVQAYVSAAKHPFASVVAQEVFQSGIIPSDTDFRIYRDFGNIPGIDLAFIENGYIYHTKYDTADRILTDSIQRAGDNILAVLKHLATSDMLAAASKYRHGNMVFFDVLGLFVIAYPSRIGSIINYMVVMGVVLYLGKKFLQPKHKTGNYKKDFLCGLGITLISWFTSLVTVLIIAVFISLIGQSLSWYNHFYVSVCLYGTATVAKIILIHTLAKRFYYMNASAQYLGEVFFDISLFVHCCFLVTLTYQGLCSAFISAVWVAFPLLTKLCVHKDFKQHGAQGKFIAFYLLGMFIPYLYALYLIWAVFEMFTPILGRSGSEIPPDVVLASILAGCTMILSSYFINFIYLAKSTKKTMLTLTLVCAITFLLVCSGTFFPYSSNPANPKPKRVFLQHMTRTFHDLEGNAVKRDSGIWINGFDYTGISHITPHIPEINDSIRAHCEENAPLCGFPWYLPVHFLIRKNWYLPAPEVSPRNPPHFRLISKEQTPWDSIKLTFEATGPSHMSFYVRAHKGSTLSQWSLGNGTPVTSKGGDYFVFYSHGLQASAWQFWIEVQVSEEHPEGMVTVAIAAHYLSGEDKRSPQLDALKEKFPDWTFPSAWVCTYDLFVF

SEQ ID NO: 10367 - protein, 425 aa, Homo sapiens
MNKMPAGEQECEYNKEGKYYSKGVKLVRKKKKIPGYRWGDIKINIIGEKDDLPIHFCDKCDLPIKIYGRIIPCKHAFCYHCANLYDKVGYKVCPRCRYPVLRIEAHKRGSVFMCSIVQQCKRTYLSQKSLQAHIKRRHKRARKQVTSASLEKVRPHIAPPQTEISDIPKRLQDRDHLSYIPPEQHTMVSLPSVQHMLQEQHNQPHKDIQAPPPELSLSLPFPIQWETVSIFTRKHGNLTVDHIQNNSDSGAKKPTPPDYYPECQSQPAVSSPHHIIPQKQHYAPPPSPSSPVNHQMPYPPQDVVTPNSVRSQVPALTTTYDPSSGYIIVKVPPDMNSPPLRAPQSQNGNPSASEFASHHYNLNILPQFTENQETLSPQFTQTDAMDHRRWPAWKRLSPCPPTRSPPPSTLHGRSHHSHQRRHRRY

SEQ ID NO: 10368 - protein, 157 aa, Homo sapiens
MLRGTMTAWRGMRPEVTLACLLLATAGCFADLNEVPQVTVQPASTVQKPGGTVILGCVVEPPRMNVTWRLNGKELNGSDDALGVLITHGTLVITALNNHTVGRYQCVARMPAGAVASVPATVTLASESAPLPPCHGAVPPHLSHPEAPTIHAASCYS

SEQ ID NO: 10369 - protein, 504 aa, Homo sapiens
MTPSPLLLLLLPPLLLGAFPPAAAARGPPKMADKVVPRQVARLGRTVRLQCPVEGDPPPLTMWTKDGRTIHSGWSRFRVLPQGLKVKQVEREDAGVYVCKATNGFGSLSVNYTLVVLDDISPGKESLGPDSSSGGQEDPASQQWARPRFTQPSKMRRRVIARPVGSSVRLKCVASGHPRPDITWMKDDQALTRPEAAEPRKKKWTLSLKNLRPEDSGKYTCRVSNRAGAINATYKVDVIQRTRSKPVLTGTHPVNTTVDFGGTTSFQCKVRSDVKPVIQWLKRVEYGAEGRHNSTIDVGGQKFVVLPTGDVWSRPDGSYLNKLLITRARQDDAGMYICLGANTMGYSFRSAFLTVLPDPKPPGPPVASSSSATSLPWPVVIGIPAGAVFILGTLLLWLCQAQKKPCTPAPAPPLPGHRPPGTARDRSGDKDLPSLAALSAGPGVGLCEEHGSPAAPQHLLGPGPVAGPKLYPKLYTDIHTHTHTHSHTHSHVEGKVHQHIHYQC

SEQ ID NO: 10370 - protein, 401 aa, Homo sapiens [sequence omitted]

SEQ ID NO: 10371 - protein, 471 aa, Homo sapiens
MMAAMATARVRMGPRCAQALWRMPWLPVFLSLAAAAAAAAAEQQVPLVLWSSDRDLWAPAADTHEGHITSDLQLSTYLDPALELGPRNVLLFLQDKLSIEDFTAYGGVFGNKQDSAFSNLENALDLAPSSLVLPAVDWYAVSTLTTYLQEKLGASPLHVDLATLRELKLNASLPALLLIRLPYTASSGLMAPREVLTGNDEVIGQVLSTLKSEDVPYTAALTAVRPSRVARDVAVVAGGLGRQLLQKQPVSPVIHPPVSYNDTAPRILFWAQNFSVAYKDQWEDLTPLTFGVQELNLTGSFWNDSFARQLSLTYERLFGTTVTFKFILANRLYPVSARHWFTMERLEVHSNGSVAYFNASQVTGPSIYSFHCEYVSSLSKKGSLLVARTQPSPWQMMLQDFQIQAFNVMGEQFSYASDCASFFSPGIWMGLLTSLFMLFIFTYGLHMILSLKTMDRFDDHKGPTISLTQIV

SEQ ID NO: 10372 - protein, 308 aa, Homo sapiens
MSWCNELRLPALKQHSIGRGLESHITMCIPPSYADLGKAARDIFNKGFGFGLVKLDVKTKSCSGVEFSTSGSSNTDTGKVTGTLETKYKWCEYGLTFTEKWNTDNTLGTEIAIEDQICQGLKLTFDTTFSPNTGKKSGKIKSSYKRECINLGCDVDFDFAGPAIHGSAVFGYEGWLAGYQMTFDSAKSKLTRNNFAVGYRTGDFQLHTNVNDGTEFGGSIYQKVCEDLDTSVNLAWTSGTNCTRFGIAAKYQLDPTASISAKVNNSSLIGVGYTQTLRPGVKLTLSALVDGKSINAGGHKVGLALEEA

SEQ ID NO: 10373 - protein, 347 aa, Homo sapiens [sequence omitted]

SEQ ID NO: 10374 - protein, 321 aa, Homo sapiens [sequence omitted]

SEQ ID NO: 10375 - protein, 332 aa, Homo sapiens
MATHGQTCARPMCIPPSYADLGKAARDIFNKGFGFGLVKLDVKTKSCSGVEFSTSGSSNTDTGKVTGTLETKYKWCEYGLTFTEKWNTDNTLGTEIAIEDQICQGLKLTFDTTFSPNTGKKSGKIKSSYKRECINLGCDVDFDFAGPAIHGSAVFGYEGWLAGYQMTFDSAKSKLTRNNFAVGYRTGDFQLHTNVNDGTEFGGSIYQKVCEDLDTSVNLAWTSGTNCTRFGIAAKYQLDPTASISAKVNNSSLIGVGYTQTLRPGVKLTLSALVDGKSINAGGHKVGSPWSWRLNPAERNLWEWISEDLALIYFHCDQQQAFFPPEDDQNKG

SEQ ID NO: 10376 - protein, 407 aa, Homo sapiens
MRRNLRLGPSSGADAQGQGAPRPGLAAPRMLLPPASQASRGSGSTGCSLMAQEVDTAQGAEMRRGAGAARGRASWCWALALLWLAVVPGWSRVSGIPSRRHWPVPYKRFDFRPKPDPYCQAKYTFCPTGSPIPVMEGDDDIEVFRLQAPVWEFKYGDLLGHLKIMHDAIGFRSTLTGKNYTMEWYELFQLGNCTFPHLRPEMDAPFWCNQGAACFFEGIDDVHWKENGTLVQVATISGNMFNQMAKWVKQDNETGIYYETWNVKASPEKGAETWFDSYDCSKFVLRTFNKLAEFGAEFKNIETNYTRIFLYSGEPTYLGNETSVFGPTGNKTLGLAIKRFYYPFKPHLPTKEFLLSLLQIFDAVIVHKQFYLFYNFEYWFLPMKFPFIKITYEEIPLPIRNKTLSGL

SEQ ID NO: 10377 - protein, 1298 aa, Homo sapiens
MFDVINSGRVQLEFSWVSEDTSKAVSFAKPDHQGSAQKDQLSQGTMHTGSTLDSTMDHWAEGSPQPFSVEPSSGIVPVGKIQKFKVKFSPLDIGDFESNLFCQIPNLPPGEQGPVLVAKGRSTLPICHFDLKDSDYISGHQRNPELRGSSGGALDPNTRVIEFTTVGIGGKNLRTFTILNPTNSTYSFCWISEEIESLQNPAAFTCLTEKGFIHPEKKAEIVFQFTPFHLGITESSWTFLIPEHNITVPFLLVGKTTEPLISLNKSHLNFSSLLIGREARETVQIINKEEQGFDFSFQDNSRYSEGFSNSLLVCPMEGWIPPLSRFPIDIFFTPKQEGDVNFNLICNVEKKVHPVTLNVKAEGYTMNVEIKCKDRTGSITLLTPNQTNIINFYEVELNECVQCEFNFINTGKFTFSFQAQLCGSKTLLQYLEFSPIDSTVDVGQSVHATLSFQPLKKCVLTDLELIIKISHGPTFMCNISGCAVSPAIHFSFTSYNFGTCFIYQAGMPPYKQTLVITNKEETPMSIDCLYTNTTHLEVNSRVDVVKPGNTLEIPITFYPRESINYQELIPFEINGLSQQTVEIKGKGTKMKILVLDPANRIVKLGAVLPGQVVKRTVSIMNNSLAQLTFNQSILFTIPELQEPKVLTLAPFHNITLKPKEVCKLEVIFAPKKRVPPFSEEVFMECMGLLRPLFLLSGCCQALEISLDQEHIPFGPVVYQTQATRRILMMNTGDVGARFKWDIKKFEPHFSISPEEGYITSGMEVSFEVTYHPTEVGKESLCKNILCYIQGGSPLSLTLSGVCVGPPAVKEVVNFTCQVRSKHTQTILLSNRTNQTWNLHPIFEGEHWEGPEFITLEAHQQNKPYEITYRPRTMNLENRKHQGTLFFPLPDGTGWLYALHGTSELPKAVANIYREVPCKTPYTELLPITNWLNKPQRFRVIVEILKPEKPDLSITMKGLDYIDVLSGSKKDYKLNFFSHKEGTYAAKVIFRNEVTNEFLYYNVSFRVIPSGIIKTIEMVTPVRQVASASIKLENPLPYSVTFSTECRMPDIALPSQFVVPANSEGTFSFEFQPLKAGETFGRLTLHNTDLGYYQYELYLKATPALPEKPVHFQTVLGSSQIILVKFINYTRQRTEYYCRTDCTDFHAEKLINAAPGGQGGTEASVEVLFEPSHLGETKGILILSSLAGGEYIIPLFGMALPPKPQGPFSIRAGYSIIIPFKNVFYHMVTFSIIVDNPAFTIRAGESVRPKKINNITVSFEGNPSGSKTPITTKLTVSCPPGEGSETGVKWVYYLKGITL

SEQ ID NO: 10378 - protein, 377 aa, Homo sapiens
MSEVKSRKKSGPKGAPAAEPGKRSEGGKTPVARSSGGGGWADPRTCLSLLSLGTCLGLAWFVFQQSEKFAKVENQYQLLKLETNEFQQLQSKISLISEKLESTESILQEATSSMSLMTQFEQEVSNLQDIMHDIQNNEEVLTQRMQSLNEKFQNITDFWKRSLEEMNINTDIFKSEAKHIHSQVTVQINSAEQEIKLLTERLKDLEDSTLRNIRTVKRQEEEDLLRVEEQLGSDTKAIEKLEEEQHALFARDEDLTNKLSDYEPKVEECKTHLPTIESAIHSVLRVSQDLIETEKKMEDLTMQMFNMEDDMLKAVSEIMEMQKTLEGIQYDNSILKMQNELDILKEKVHDFIAYSSTGEKGTLKEYNIENKGIGGDF

SEQ ID NO: 10379 - protein, 845 aa, Homo sapiens
MLSGVWFLSVLTVAGILQTESRKTAKDICKIRCLCEEKENVLNINCENKGFTTVSLLQPPQYRIYQLFLNGNLLTRLYPNEFVNYSNAVTLHLGNNGLQEIRTGAFSGLKTLKRLHLNNNKLEILREDTFLGLESLEYLQADYNYISAIEAGAFSKLNKLKVLILNDNLLLSLPSNVFRFVLLTHLDLRGNRLKVMPFAGVLEHIGGIMEIQLEENPWNCTCDLLPLKAWLDTITVFVGEIVCETPFRLHGKDVTQLTRQDLCPRKSASDSSQRGSHADTHVQRLSPTMNPALNPTRAPKASRPPKMRNRPTPRVTVSKDRQSFGPIMVYQTKSPVPLTCPSSCVCTSQSSDNGLNVNCQERKFTNISDLQPKPTSPKKLYLTGNYLQTVYKNDLLEYSSLDLLHLGNNRIAVIQEGAFTNLTSLRRLYLNGNYLEVLYPSMFDGLQSLQYLYLEYNVIKEIKPLTFDALINLQLLFLNNNLLRSLPDNIFGGTALTRLNLRNNHFSHLPVKGVLDQLPAFIQIDLQENPWDCTCDIMGLKDWTEHANSPVIINEVTCESPAKHAGEILKFLGREAICPDSPNLSDGTVLSMNHNTDTPRSLSVSPSSYPELHTEVPLSVLILGLLVVFILSVCFGAGLFVFVLKRRKGVPSVPRNTNNLDVSSFQLQYGSYNTETHDKTDGHVYNYIPPPVGQMCQNPIYMQKEGDPVAYYRNLQEFSYSNLEEKKEEPATPAYTISATELLEKQATPREPELLYQNIAERVKELPSAGLVHYNFCTLPKRQFAPSYESRRQNQDRINKTVLYGTPRKCFVGQSKPNHPLLQAKPQSEPDYLEVLEKQTAISQL

SEQ ID NO: 10380 - protein, 263 aa, Homo sapiens
MRPGAPGPLWPLPWGALAWAVGFVSSMGSGNPAPGGVCWLQQGQEATCSLVLQTDVTRAECCASGNIDTAWSNLTHPGNKINLLGFLGLVHCLPCKDSCDGVECGPGKACRMLGGRPRCECAPDCSGLPARLQVCGSDGATYRDECELRAARCRGHPDLSVMYRGRCRKSCEHVVCPRPQSCVVDQTGSAHCVVCRAAPCPVPSSPGQELCGNNNVTYISSCHMRQATCFLGRSIGVRHAGSCAGTPEEPPGGESAEEEENFV

SEQ ID NO: 10381 - protein, 605 aa, Homo sapiens
MGRLLRAARLPPLLSPLLLLLVGGAFLGACVAGSDEPGPEGLTSTSLLDLLLPTGLEPLDSEEPSETMGLGAGLGAPGSGFPSEENEESRILQPPQYFWEEEEELNDSSLDLGPTADYVFPDLTEKAGSIEDTSQAQELPNLPSPLPKMNLVEPPWHMPPREEEEEEEEEEEREKEEVEKQEEEEEEELLPVNGSQEEAKPQVRDFSLTSSSQTPGATKSRHEDSGDQASSGVEVESSMGPSLLLPSVTPTTVTPGDQDSTSQEAEATVLPAAGLGVEFEAPQEASEEATAGAAGLSGQHEEVPALPSFPQTTAPSGAEHPDEDPLGSRTSASSPLAPGDMELTPSSATLGQEDLNQQLLEGQAAEAQSRIPWDSTQVICKDWSNLAGKNYIILNMTENIDCEVFRQHRGPQLLALVEEVLPRHGSGHHGAWHISLSKPSEKEQHLLMTLVGEQGVVPTQDVLSMLGDIRRSLEEIGIQNYSTTSSCQARASQVRSDYGTLFVVLVVIGAICIIIIALGLLYNCWQRRLPKLKHVSHGEELRFVENGCHDNPTLDVASDSQSEMQEKHPSLNGGGALNGPGSWGALMGGKRDPEDSDVFEEDTHL

SEQ ID NO: 10382 - protein, 388 aa, Homo sapiens
MGRARRFQWPLLLLWAAAAGPGAGQEVQTENVTVAEGGVAEITCRLHQYDGSIVVIQNPARQTLFFNGTRALKDERFQLEEFSPRRVRIRLSDARLEDEGGYFCQLYTEDTHHQIATLTVLVAPENPVVEVREQAVEGGEVELSCLVPRSRPAATLRWYRDRKELKGVSSSQENGKVWSVASTVRFRVDRKDDGGIIICEAQNQALPSGHSKQTQYVLDVQYSPTARIHASQAVVREGDTLVLTCAVTGNPRPNQIRWNRGNESLPERAEAVGETLTLPGLVSADNGTYTCEASNKHGHARALYVLVVYDPGAVVEAQTSVPYAIVGGILALLVFLIICVLVGMVWCSVRQKGSYLTHEASGLDEQGEAREAFLNGSDGHKRKEEFFI

SEQ ID NO: 10383 - protein, 836 aa, Homo sapiens [sequence omitted]

SEQ ID NO: 10384 - protein, 343 aa, Homo sapiens
MAGLNCGVSIALLGVLLLGAARLPRGAEAFEIALPRESNITVLIKLGTPTLLAKPCYIVISKRHITMLSIKSGERIVFTFSCQSPENHFVIEIQKNIDCMSGPCPFGEVQLQPSTSLLPTLNRTFIWDVKAHKSIGLELQFSIPRLRQIGPGESCPDGVTHSISGRIDATVVRIGTFCSNGTVSRIKMQEGVKMALHLPWFHPRNVSGFSIANRSSIKRLCIIESVFEGEGSATLMSANYPEGFPEDELMTWQFVVPAHLRASVSFLNFNLSNCERKEERVEYYIPGSTTNPEVFKLEDKQPGNMAGNFNLSLQGCDQDAQSPGILRLQFQVLVQHPQNESSE

SEQ ID NO: 10385 - protein, 317 aa, Homo sapiens
MVRARHQPGGLCLLLLLLCQFMEDRSAQAGNCWLRQAKNGRCQVLYKTELSKEECCSTGRLSTSWTEEDVNDNTLFKWMIFNGGAPNCIPCKETCENVDCGPGKKCRMNKKNKPRCVCAPDCSNITWKGPVCGLDGKTYRNECALLKARCKEQPELEVQYQGRCKKTCRDVFCPGSSTCVVDQTNNAYCVTCNRICPEPASSEQYLCGNDGVTYSSACHLRKATCLLGRSIGLAYEGKCIKAKSCEDIQCTGGKKCLWDFKVGRGRCSLCDELCPDSKSDEPVCASDNATYASECAMKEAACSSGVLLEVKHSGSCN

SEQ ID NO: 10386 - protein, 338 aa, Homo sapiens
MVRARHQPGGLCLLLLLLCQFMEDRSAQAGNCWLRQAKNGRCQVLYKTELSKEECCSTGRLSTSWTEEDVNDNTLFKWMIFNGGAPNCIPCKETCENVDCGPGKKCRMNKKNKPRCVCAPDCSNITWKGPVCGLDGKTYRNECALLKARCKEQPELEVQYQGRCKKTCRDVFCPGSSTCVVDQTNNAYCVTCNRICPEPASSEQYLCGNDGVTYSSACHLRKATCLLGRSIGLAYEGKCIKAKSCEDIQCTGGKKCLWDFKVGRGRCSLCDELCPDSKSDEPVCASDNATYASECAMKEAACSSGVLLEVKHSGSCNEEEEEDEDQDYSFPISSILEW

SEQ ID NO: 10387 - protein, 344 aa, Homo sapiens
MVRARHQPGGLCLLLLLLCQFMEDRSAQAGNCWLRQAKNGRCQVLYKTELSKEECCSTGRLSTSWTEEDVNDNTLFKWMIFNGGAPNCIPCKETCENVDCGPGKKCRMNKKNKPRCVCAPDCSNITWKGPVCGLDGKTYRNECALLKARCKEQPELEVQYQGRCKKTCRDVFCPGSSTCVVDQTNNAYCVTCNRICPEPASSEQYLCGNDGVTYSSACHLRKATCLLGRSIGLAYEGKCIKAKSCEDIQCTGGKKCLWDFKVGRGRCSLCDELCPDSKSDEPVCASDNATYASECAMKEAACSSGVLLEVKHSGSCNSISEDTEEEEEDEDQDYSFPISSILEW

SEQ ID NO: 10388 - protein, 1086 aa, Homo sapiens
MAAAGQLCLLYLSAGLLSRLGAAFNLDTREDNVIRKYGDPGSLFGFSLAMHWQLQPEDKRLLLVGAPRGEALPLQRANRTGGLYSCDITARGPCTRIEFDNDADPTSESKEDQWMGVTVQSQGPGGKVVTCAHRYEKRQHVNTKQESRDIFGRCYVLSQNLRIEDDMDGGDWSFCDGRLRGHEKFGSCQQGVAATFTKDFHYIVFGAPGTYNWKGLLFLTSVSYTDPDQFVYKTRPPREQPDTFPDVMMNSYLGFSLDSGKGIVSKDEITFVSGAPRANHSGAVVLLKRDMKSAHLLPEHIFDGEGLASSFGYDVAVVDLNKDGWQDIVIGAPQYFDRDGEVGGAVYVYMNQQGRWNNVKPIRLNGTKDSMFGIAVKNIGDINQDGYPDIAVGAPYDDLGKVFIYHGSANGINTKPTQVLKGISPYFGYSIAGNMDLDRNSYPDVAVGSLSDSVTIFRSRPVINIQKTITVTPNRIDLRQKTACGAPSGICLQVKSCFEYTANPAGYNPSISIVGTLEAEKERRKSGLSSRVQFRNQGSEPKYTQELTLKRQKQKVCMEETLWLQDNIRDKLRPIPITASVEIQEPSSRRRVNSLPEVLPILNSDEPKTAHIDVHFLKEGCGDDNVCNSNLKLEYKFCTREGNQDKFSYLPIQKGVPELVLKDQKDIALEITVTNSPSNPRNPTKDGDDAHEAKLIATFPDTLTYSAYRELRAFPEKQLSCVANQNGSQADCELGNPFKRNSNVTFYLVLSTTEVTFDTPDLDINLKLETTSNQDNLAPITAKAKVVIELLLSVSGVAKPSQVYFGGTVVGEQAMKSEDEVGSLIEYEFRVINLGKPLTNLGTATLNIQWPKEISNGKWLLYLVKVESKGLEKVTCEPQKEINSLNLTESHNSRKKREITEKQIDDNRKFSLFAERKYQTLNCSVNVNCVNIRCPLRGLDSKASLILRSRLWNSTFLEEYSKLNYLDILMRAFIDVTAAAENIRLPNAGTQVRVTVFPSKTVAQYSGVPWWIILVAILAGILMLALLVFILWKCGFFKRSRYDDSVPRYHAVRIRKEEREIKDEKYIDNLEKKQWITKWNRNESYS

SEQ ID NO: 10389 - protein, 1068 aa, Homo sapiens
MAAAGQLCLLYLSAGLLSRLGAAFNLDTREDNVIRKYGDPGSLFGFSLAMHWQLQPEDKRLLLVGAPRGEALPLQRANRTGGLYSCDITARGPCTRIEFDNDADPTSESKEDQWMGVTVQSQGPGGKVVTCAHRYEKRQHVNTKQESRDIFGRCYVLSQNLRIEDDMDGGDWSFCDGRLRGHEKFGSCQQGVAATFTKDFHYIVFGAPGTYNWKGLLFLTSVSYTDPDQFVYKTRPPREQPDTFPDVMMNSYLGFSLDSGKGIVSKDEITFVSGAPRANHSGAVVLLKRDMKSAHLLPEHIFDGEGLASSFGYDVAVVDLNKDGWQDIVIGAPQYFDRDGEVGGAVYVYMNQQGRWNNVKPIRLNGTKDSMFGIAVKNIGDINQDGYPDIAVGAPYDDLGKVFIYHGSANGINTKPTQVLKGISPYFGYSIAGNMDLDRNSYPDVAVGSLSDSVTIFRSRPVINIQKTITVTPNRIDLRQKTACGAPSGICLQVKSCFEYTANPAGYNPSISIVGTLEAEKERRKSGLSSRVQFRNQGSEPKYTQELTLKRQKQKVCMEETLWLQDNIRDKLRPIPITASVEIQEPSSRRRVNSLPEVLPILNSDEPKTAHIDVHFLKEGCGDDNVCNSNLKLEYKFCTREGNQDKFSYLPIQKGVPELVLKDQKDIALEITVTNSPSNPRNPTKDGDDAHEAKLIATFPDTLTYSAYRELRAFPEKQLSCVANQNGSQADCELGNPFKRNSNVTFYLVLSTTEVTFDTPDLDINLKLETTSNQDNLAPITAKAKVVIELLLSVSGVAKPSQVYFGGTVVGEQAMKSEDEVGSLIEYEFRVINLGKPLTNLGTATLNIQWPKEISNGKWLLYLVKVESKGLEKVTCEPQKEINSLNLTESHNSRKKREITEKQIDDNRKFSLFAERKYQTLNCSVNVNCVNIRCPLRGLDSKASLILRSRLWNSTFLEEYSKLNYLDILMRAFIDVTAAAENIRLPNAGTQVRVTVFPSKTVAQYSGVPWWIILVAILAGILMLALLVFILWKCGFFKRNKKDHYDATYHKAEIHAQPSDKERLTSDA

SEQ ID NO: 10390 - protein, 219 aa, Homo sapiens [sequence omitted]

SEQ ID NO: 10391 - protein, 633 aa, Homo sapiens
MRLEKSTVRRDLEQGPFPEGLAPEDVAPEPCDPLASADLDKKRHAELKMDQALLLIHNELLWTNLTVYWKSECCYHCLFQVLVNVPQSPKAGKPSAAAASVSTQHGSILQLNDTLEEKEVCRLEYRFGEFGNYSLLVKNIHNGVSEIACDLAVNEDPVDSNLPVSIAFLIGLAVIIVISFLRLLLSLDDFNNWISKAISSRETDRLINSELGSPSRTDPLDGDVQPATWRLSALPPRLRSVDTFRGIALILMVFVNYGGGKYWYFKHASWNGLTVADLVFPWFVFIMGSSIFLSMTSILQRGCSKFRLLGKIAWRSFLLICIGIIIVNPNYCLGPLSWDKVRIPGVLQRLGVTYFVVAVLELLFAKPVPEHCASERSCLSLRDITSSWPQWLLILVLEGLWLGLTFLLPVPGCPTGYLGPGGIGDFGKYPNCTGGAAGYIDRLLLGDDHLYQHPSSAVLYHTEVAYDPEGILGTINSIVMAFLGVQAGKILLYYKARTKDILIRFTAWCCILGLISVALTKVSENEGFIPVNKNLWSLSYVTTLSSFAFFILLVLYPVVDVKGLWTGTPFFYPGMNSILVYVGHEVFENYFPFQWKLKDNQSHKEHLTQNIVATALWVLIAYILYRKKIFWKI

SEQ ID NO: 10392 - protein, 314 aa, Homo sapiens
MEFTDRNYTLVTEFILLGFPTRPELQIVLFLMFLTLYAIILIGNIGLMLLIRIDPHLQTPMYFFLSNLSFVDLCYFSDIVPKMLVNFLSENKSISYYGCALQFYFFCTFADTESFILAAMAYDRYVAICNPLLYTVVMSRGICMRLIVLSYLGGNMSSLVHTSFAFILKYCDKNVINHFFCDLPPLLKLSCTDTTINEWLLSTYGSSVEIICFIIIIISYFFILLSVLKIRSFSGRKKTFSTCASHLTSVTIYQGTLLFIYSRPSYLYSPNTDKIISVFYTIFIPVLNPLIYSLRNKDVKDAAEKVLRSKVDSS

SEQ ID NO: 10393 - protein, 968 aa, Homo sapiens
MVLGCELSGSTRVVVGVEALLTGASSPLPGVGPANKHKPWIEAEYQGIVMENDNTVLLNPPLFALDKDAPLRYAGEICGFRLHGSGVPFEAVILDKATGEGLIRAKEPVDCEAQKEHTFTIQAYDCGEGPDGANTKKSHKATVHVRVNDVNEFAPVFVERLYRAAVTEGKLYDRILRVEAIDGDCSPQYSQICYYEILTPNTPFLIDNDGNIENTEKLQYSGERLYKFTVTAYDCGKKRAADDAEVEIQVKPTCKPSWQGWNKRIEYAPGAGSLALFPGIRLETCDEPLWNIQATIELQTSHVAKGCDRDNYSERALRKLCGAATGEVDLLPMPGPNANWTAGLSVHYSQDSSLIYWFNGTQAVQVPLGGPSGLGSGPQDSLSDHFTLSFWMKHGVTPNKGKKEEETIVCNTVQNEDGFSHYSLTVHGCRIAFLYWPLLESARPVKFLWKLEQVCDDEWHHYALNLEFPTVTLYTDGISFDPALIHDNGLIHPPRREPALMIGACWTEEKNKEKEKGDNSTDTTQGDPLSIHHYFHGYLAGFSVRSGRLESREVIECLYACREGLDYRDFESLGKGMKVHVNPSQSLLTLEGDDVETFNHALQHVAYMNTLRFATPGVRPLRLTTAVKCFSEESCVSIPEVEGYVVVLQPDAPQILLSGTAHFARPAVDFEGTNGVPLFPDLQITCSISHQVEAKKDESWQGTVTDTRMSDEIVHNLDGCEISLVGDDLDPERESLLLDTTSLQQRGLELTNTSAYLTIAGVESITVYEEILRQARYRLRHGAALYTRKFRLSCSEMNGRYSSNEFIVEVNVLHSMNRVAHPSHVLSSQQFLHRGHQPPPEMAGHSLASSHRNSMIPSAATLIIVVCVGFLVLMVVLGLVRIHSLHRRVSGAGGPPGASSDPKDPDLFWDDSALTIIVNPMESYQNRQSCVTGAVGGQQEDEDSSDSEVADSPSSDERRIIETPPHRY

SEQ ID NO: 10394 - protein, 956 aa, Homo sapiens
MTLLLLPLLLASLLASCSCNKANKHKPWIEAEYQGIVMENDNTVLLNPPLFALDKDAPLRYAGEICGFRLHGSGVPFEAVILDKATGEGLIRAKEPVDCEAQKEHTFTIQAYDCGEGPDGANTKKSHKATVHVRVNDVNEFAPVFVERLYRAAVTEGKLYDRILRVEAIDGDCSPQYSQICYYEILTPNTPFLIDNDGNIENTEKLQYSGERLYKFTVTAYDCGKKRAADDAEVEIQVKPTCKPSWQGWNKRIEYAPGAGSLALFPGIRLETCDEPLWNIQATIELQTSHVAKGCDRDNYSERALRKLCGAATGEVDLLPMPGPNANWTAGLSVHYSQDSSLIYWFNGTQAVQVPLGGPSGLGSGPQDSLSDHFTLSFWMKHGVTPNKGKKEEETIVCNTVQNEDGFSHYSLTVHGCRIAFLYWPLLESARPVKFLWKLEQVCDDEWHHYALNLEFPTVTLYTDGISFDPALIHDNGLIHPPRREPALMIGACWTEEKNKEKEKGDNSTDTTQGDPLSIHHYFHGYLAGFSVRSGRLESREVIECLYACREGLDYRDFESLGKGMKVHVNPSQSLLTLEGDDVETFNHALQHVAYMNTLRFATPGVRPLRLTTAVKCFSEESCVSIPEVEGYVVVLQPDAPQILLSGTAHFARPAVDFEGTNGVPLFPDLQITCSISHQVEAKKDESWQGTVTDTRMSDEIVHNLDGCEISLVGDDLDPERESLLLDTTSLQQRGLELTNTSAYLTIAGVESITVYEEILRQARYRLRHGAALYTRKFRLSCSEMNGRYSSNEFIVEVNVLHSMNRVAHPSHVLSSQQFLHRGHQPPPEMAGHSLASSHRNSMIPSAATLIIVVCVGFLVLMVVLGLVRIHSLHRRVSGAGGPPGASSDPKDPDLFWDDSALTIIVNPMESYQNRQSCVTGAVGGQQEDEDSSDSEVADSPSSDERRIIETPPHRY

SEQ ID NO: 10395 - protein, 216 aa, Homo sapiens
MLRLSERNMKVLLAAALIAGSVFFLLLPGPSAADEKKKGPKVTVKVYFDLRIGDEDVGRVIFGLFGKTVPKTVDNFVALATGEKGFGYKNSKFHRVIKDFMIQGGDFTRGDGTGGKSIYGERFPDENFKLKHYGPGWVSMANAGKDTNGSQFFITTVKTAWLDGKHVVFGKVLEGMEVVRKVESTKTDSRDKPLKDVIIADCGKIEVEKPFAIAKE

SEQ ID NO: 10396 - protein, 745 aa, Homo sapiens
MLTMGRLQLVVLGLTCCWAVASAAKLGAVYTEGGFVEGVNKKLGLLGDSVDIFKGIPFAAPTKALENPQPHPGWQGTLKAKNFKKRCLQATITQDSTYGDEDCLYLNIWVPQGRKQVSRDLPVMIWIYGGAFLMGSGHGANFLNNYLYDGEEIATRGNVIVVTFNYRVGPLGFLSTGDANLPGNYGLRDQHMAIAWVKRNIAAFGGDPNNITLFGESAGGASVSLQTLSPYNKGLIRRAISQSGVALSPWVIQKNPLFWAKKVAEKVGCPVGDAARMAQCLKVTDPRALTLAYKVPLAGLEYPMLHYVGFVPVIDGDFIPADPINLYANAADIDYIAGTNNMDGHIFASIDMPAINKGNKKVTEEDFYKLVSEFTITKGLRGAKTTFDVYTESWAQDPSQENKKKTVVDFETDVLFLVPTEIALAQHRANAKSAKTYAYLFSHPSRMPVYPKWVGADHADDIQYVFGKPFATPTGYRPQDRTVSKAMIAYWTNFAKTGDPNMGDSAVPTHWEPYTTENSGYLEITKKMGSSSMKRSLRTNFLRYWTLTYLALPTVTDQEATPVPPTGDSEATPVPPTGDSETAPVPPTGDSGAPPVPPTGDSGAPPVPPTGDSGAPPVPPTGDSGAPPVPPTGDSGAPPVPPTGDSGAPPVPPTGDSGAPPVPPTGDAGPPPVPPTGDSGAPPVPPTGDSGAPPVTPTGDSETAPVPPTGDSGAPPVPPTGDSEAAPVPPTDDSKEAQMPAVIRF

SEQ ID NO: 10397 - protein, 676 aa, Homo sapiens
MGRLQLVVLGLTCCWAVASAAKLGAVYTEGGFVEGVNKKLGLLGDSVDIFKGIPFAAPTKALENPQPHPGWQGTLKAKNFKKRCLQATITQDSTYGDEDCLYLNIWVPQGRKQVSRDLPVMIWIYGGAFLMGSGHGANFLNNYLYDGEEIATRGNVIVVTFNYRVGPLGFLSTGDANLPGNYGLRDQHMAIAWVKRNIAAFGGDPNNITLFGESAGGASVSLQTLSPYNKGLIRRAISQSGVALSPWVIQKNPLFWAKKVAEKVGCPVGDAARMAQCLKVTDPRALTLAYKVPLAGLEYPMLHYVGFVPVIDGDFIPADPINLYANAADIDYIAGTNNMDGHIFASIDMPAINKGNKKVTEEDFYKLVSEFTITKGLRGAKTTFDVYTESWAQDPSQENKKKTVVDFETDVLFLVPTEIALAQHRANAKDPNMGDSAVPTHWEPYTTENSGYLEITKKMGSSSMKRSLRTNFLRYWTLTYLALPTVTDQEATPVPPTGDSEATPVPPTGDSETAPVPPTGDSGAPPVPPTGDSGAPPVPPTGDSGAPPVPPTGDSGAPPVPPTGDSGAPPVPPTGDSGAPPVPPTGDSGAPPVPPTGDAGPPPVPPTGDSGAPPVPPTGDSGAPPVTPTGDSETAPVPPTGDSGAPPVPPTGDSEAAPVPPTDDSKEAQMPAVIRF

SEQ ID NO: 10398 - protein, 401 aa, Homo sapiens
MPVQLSEHPEWNESMHSLRISVGGLPVLASMTKAADPRFRPRWKVILTFFVGAAILWLLCSHRPAPGRPPTHNAHNWRLGQAPANWYNDTYPLSPPQRTPAGIRYRIAVIADLDTESRAQEENTWFSYLKKGYLTLSDSGDKVAVEWDKDHGVLESHLAEKGRGMELSDLIVFNGKLYSVDDRTGVVYQIEGSKAVPWVILSDGDGTVEKGFKAEWLAVKDERLYVGGLGKEWTTTTGDVVNENPEWVKVVGYKGSVDHENWVSNYNALRAAAGIQPPGYLIHESACWSDTLQRWFFLPRRASQERYSEKDDERKGANLLLSASPDFGDIAVSHVGAVVPTHGFSSFKFIPNTDDQIIVALKSEEDSGRVASYIMAFTLDGRFLLPETKIGSVKYEGIEFI

SEQ ID NO: 10399 - protein, 245 aa, Homo sapiens
MPVQLSEHPEWNESMHSLRISVGGLPVLASMTKAADPRFRPRWKVILTFFVGAAILWLLCSHRPAPGRPPTHNAHNWRLGQAPANWYNDTYPLSPPQRTPAGIRYRIAVIADLDTESRAQEENTWFSYLKKGYLTLSDSGDKVAVEWDKDHGVLESHLAEKGRGMELSDLIVFNGKLYSVDDRTGVVYQIEGSKAVPWVILSDGDGTVEKGFKAEWLAVREIVRKRWRLVKQVSHVGVLGQWIQR

SEQ ID NO: 10400 - protein, 1555 aa, Homo sapiens
MGCKGDASGACAAGALPVTGVCYKMGVLVVLTVLWLFSSVKADSKAITTSLTTKWFSTPLLLEASEFLAEDSQEKFWNFVEASQNIGSSDHDGTDYSYYHAILEAAFQFLSPLQQNLFKFCLSLRSYSATIQAFQQIAADEPPPEGCNSFFSVHGKKTCESDTLEALLLTASERPKPLLFKGDHRYPSSNPESPVVIFYSEIGSEEFSNFHRQLISKSNAGKINYVFRHYIFNPRKEPVYLSGYGVELAIKSTEYKAKDDTQVKGTEVNTTVIGENDPIDEVQGFLFGKLRDLHPDLEGQLKELRKHLVESTNEMAPLKVWQLQDLSFQTAARILASPVELALVVMKDLSQNFPTKARAITKTAVSSELRTEVEENQKYFKGTLGLQPGDSALFINGLHMDLDTQDIFSLFDVLRNEARVMEGLHRLGIEGLSLHNVLKLNIQPSEADYAVDIRSPAISWVNNLEVDSRYNSWPSSLQELLRPTFPGVIRQIRKNLHNMVFIVDPAHETTAELMNTAEMFLSNHIPLRIGFIFVVNDSEDVDGMQDAGVAVLRAYNYVAQEVDDYHAFQTLTHIYNKVRTGEKVKVEHVVSVLEKKYPYVEVNSILGIDSAYDRNRKEARGYYEQTGVGPLPVVLFNGMPFEREQLDPDELETITMHKILETTTFFQRAVYLGELPHDQDVVEYIMNQPNVVPRINSRILTAERDYLDLTASNNFFVDDYARFTILDSQGKTAAVANSMNYLTKKGMSSKEIYDDSFIRPVTFWIVGDFDSPSGRQLLYDAIKHQKSSNNVRISMINNPAKEISYENTQISRAIWAALQTQTSNAAKNFITKMAKEGAAEALAAGADIAEFSVGGMDFSLFKEVFESSKMDFILSHAVYCRDVLKLKKGQRAVISNGRIIGPLEDSELFNQDDFHLLENIILKTSGQKIKSHIQQLRVEEDVASDLVMKVDALLSAQPKGDPRIEYQFFEDRHSAIKLRPKEGETYFDVVAVVDPVTREAQRLAPLLLVLAQLINMNLRVFMNCQSKLSDMPLKSFYRYVLEPEISFTSDNSFAKGPIAKFLDMPQSPLFTLNLNTPESWMVESVRTPYDLDNIYLEEVDSVVAAEYELEYLLLEGHCYDITTGQPPRGLQFTLGTSANPVIVDTIVMANLGYFQLKANPGAWILRLRKGRSEDIYRIYSHDGTDSPPDADEVVIVLNNFKSKIIKVKVQKKADMVNEDLLSDGTSENESGFWDSFKWGFTGQKTEEVKQDKDDIINIFSVASGHLYERFLRIMMLSVLKNTKTPVKFWFLKNYLSPTFKEFIPYMANEYNFQYELVQYKWPRWLHQQTEKQRIIWGYKILFLDVLFPLVVDKFLFVDADQIVRTDLKELRDFNLDGAPYGYTPFCDSRREMDGYRFWKSGYWASHLAGRKYHISALYVVDLKKFRKIAAGDRLRGQYQGLSQDPNSLSNLDQDLPNNMIHQVPIKSLPQEWLWCETWCDDASKKRAKTIDLCNNPMTKEPKLEAAVRIVPEWQDYDQEIKQLQIRFQKEKETGALYKEKTKEPSREGPQKREEL

SEQ ID NO: 10401 - protein, 227 aa, Homo sapiens
YILPPTRPTDKPLRLPLQGVYKIGGIGTVPVGRVETGVLKPGMVVTFAPVNVTTEVKSVEMHHEALSEALPRDNVGFNVKNVSVKDVRRGNVAGDSKNDLPMEAAGFTAQVIILNHLGQISAGYAPVLDCHTAHIACKFAELKEKIAVLAKSRKTAEFLKSGDAAIVDMVPSKPMCVESFSDYPPLGRFAVRDMRQTVAVGVIKAVDKKAAGAGKVTKSAQKAQKAK

SEQ ID NO: 10402 - protein, 462 aa, Homo sapiens
MGKEKTHINIVVIGHVDSGKSTTTGHLIYKCGGIDKRTIEKFEKEAAEMGKGSFKYAWVLDKLKAERERGITIDISLWKFETSKYYVTIIDAPGHRDFIKNMITGTSQADCAVLIVAAGVGEFEAGISKNGQTREHALLAYTLGVKQLIVGVNKMDSTEPPYSQKRYEEIVKEVSTYIKKIGYNPDTVAFVPISGWNGDNMLEPSANMPWFKGWKVTRKDGNASGTTLLEALDCILPPTRPTDKPLRLPLQDVYKIGGIGTVPVGRVETGVLKPGMVVTFAPVNVTTEVKSVEMHHEALSEALPGDNVGFNVKNVSVKDVRRGNVAGDSKNDPPMEAAGFTAQVIILNHPGQISAGYAPVLDCHTAHIACKFAELKEKIDRRSGKKLEDGPKFLKSGDAAIVDMVPGKPMCVESFSDYPPLGRFAVRDMRQTVAVGVIKAVDKKAAGAGKVTKSAQKAQKAK

SEQ ID NO: 10403 - protein, 998 aa, Homo sapiens [sequence omitted]

SEQ ID NO: 10404 - protein, 998 aa, Homo sapiens
MARARPPPPPSPPPGLLPLLPPLLLLPLLLLPAGCRALEETLMDTKWVTSELAWTSHPESGWEEVSGYDEAMNPIRTYQVCNVRESSQNNWLRTGFIWRRDVQRVYVELKFTVRDCNSIPNIPGSCKETFNLFYYEADSDVASASSPFWMENPYVKVDTIAPDESFSRLDAGRVNTKVRSFGPLSKAGFYLAFQDQGACMSLISVRAFYKKCASTTAGFALFPETLTGAEPTSLVIAPGTCIPNAVEVSVPLKLYCNGDGEWMVPVGACTCATGHEPAAKESQCRPCPPGSYKAKQGEGPCLPCPPNSRTTSPAASICTCHNNFYRADSDSADSACTTVPSPPRGVISNVNETSLILEWSEPRDLGGRDDLLYNVICKKCHGAGGASACSRCDDNVEFVPRQLGLTERRVHISHLLAHTRYTFEVQAVNGVSGKSPLPPRYAAVNITTNQAAPSEVPTLRLHSSSGSSLTLSWAPPERPNGVILDYEMKYFEKSEGIASTVTSQMNSVQLDGLRPDARYVVQVRARTVAGYGQYSRPAEFETTSERGSGAQQLQEQLPLIVGSATAGLVFVVAVVVIAIVCLRKQRHGSDSEYTEKLQQYIAPGMKVYIDPFTYEDPNEAVREFAKEIDVSCVKIEEVIGAGEFGEVCRGRLKQPGRREVFVAIKTLKVGYTERQRRDFLSEASIMGQFDHPNIIRLEGVVTKSRPVMILTEFMENCALDSFLRLNDGQFTVIQLVGMLRGIAAGMKYLSEMNYVHRDLAARNILVNSNLVCKVSDFGLSRFLEDDPSDPTYTSSLGGKIPIRWTAPEAIAYRKFTSASDVWSYGIVMWEVMSYGERPYWDMSNQDVINAVEQDYRLPPPMDCPTALHQLMLDCWVRDRNLRPKFSQIVNTLDKLIRNAASLKVIASAQSGMSQPLLDRTVPDYTTFTTVGDWLDAIKMGRYKESFVSAGFASFDLVAQMTAEDLLRIGVTLAGHQKKILSSIQDMRLQMNQTLPVQV

SEQ ID NO: 10405 - protein, 225 aa, Homo sapiens
MHMFDDLPHNSLTNLEALHQEPLHIPLQNLSNCPVSLLILFPVTMDRKSPCTYGRAICPLVPWFPFLSDLAPFSMPYLFSPSQLGIIFSSILTCSSVSSLDRKNHSRPHSSLQLFPISLLLREQSPLKNFSIILLVTVLHCHLTLSPFRLNFHVHHSTESTLLKNSSDLPCLWLNYYFNLSAAFYIFDHSLFLKGNYDIGSHDFILSWVSSLTSPLFLNLLCSLL

SEQ ID NO: 10406 - protein, 1011 aa, Homo sapiens
RMSQLRLLPSRLGVQAARLLAAHDVPVFGWRSRSSGPPATFPSSKGGGGSSYMEEMYFAWLENPQSVHKSWDSFFREASEEAFSGSAQPRPPSVVHESRSAVSSRTKTSKLVEDHLAVQSLIRAYQIRGHHVAQLDPLGILDADLDSFVPSDLITTIDKLAFYDLQEADLDKEFQLPTTTFIGGSENTLSLREIIRRLENTYCQHIGLEFMFINDVEQCQWIRQKFETPGVMQFSSEEKRTLLARLVRSMRFEDFLARKWSSEKRFGLEGCEVMIPALKTIIDKSSEMGIENVILGMPHRGRLNVLANVIRKDLEQIFCQFDPKLEAADEGSGDVKYHLGMYHERINRVTNRNITLSLVANPSHLEAVDPVVQGKTKAEQFYRGDAQGKKVMSILVHGDAAFAGQGVVYETFHLSDLPSYTTNGTVHVVVNNQIGFTTDPRMARSSPYPTDVARVVNAPIFHVNADDPEAVIYVCSVAAEWRNTFNKDVVVDLVCYRRRGHNEMDEPMFTQPLMYKQIHRQVPVLKKYADKLIAEGTVTLQEFEEEIAKYDRICEEAYGRSKDKKILHIKHWLDSPWPGFFNVDGEPKSMTCPATGIPEDMLTHIGSVASSVPLEDFKIHTGLSRILRGRADMTKNRTVDWALAEYMAFGSLLKEGIHVRLSGQDVERGTFSHRHHVLHDQEVDRRTCVPMNHLWPDQAPYTVCNSSLSEYGVLGFELGYAMASPNALVLWEAQFGDFHNTAQCIIDQFISTGQAKWVRHNGIVLLLPHGMEGMGPEHSSARPERFLQMSNDDSDAYPAFTKDFEVSQLYDCNWIVVNCSTPANYFHVLRRQILLPFRKPLIIFTPKSLLRHPEAKSSFDQMVSGTSFQRVIPEDGAAARAPEQVQRLIFCTGKVYYDLVKERSSQDLEEKVAITRLEQISPFPFDLIKQEAEKYPGAELAWCQEEHKNMGYYDYISPRFMTILRRARPIWYVGRDPAAAPATGNRNTHLVSLKKFLDTAFNLQAFEGKTF

SEQ ID NO: 10407 - protein, 1010 aa, Homo sapiens
MSQLRLLPSRLGVQAARLLAAHDVPVFGWRSRSSGPPATFPSSKGGGGSSYMEEMYFAWLENPQSVHKSWDSFFREASEEAFSGSAQPRPPSVVHESRSAVSSRTKTSKLVEDHLAVQSLIRAYQIRGHHVAQLDPLGILDADLDSFVPSDLITTIDKLAFYDLQEADLDKEFQLPTTTFIGGSENTLSLREIIRRLENTYCQHIGLEFMFINDVEQCQWIRQKFETPGVMQFSSEEKRTLLARLVRSMRFEDFLARKWSSEKRFGLEGCEVMIPALKTIIDKSSEMGIENVILGMPHRGRLNVLANVIRKDLEQIFCQFDPKLEAADEGSGDVKYHLGMYHERINRVTNRNITLSLVANPSHLEAVDPVVQGKTKAEQFYRGDAQGKKVMSILVHGDAAFAGQGVVYETFHLSDLPSYTTNGTVHVVVNNQIGFTTDPRMARSSPYPTDVARVVNAPIFHVNADDPEAVIYVCSVAAEWRNTFNKDVVVDLVCYRRRGHNEMDEPMFTQLLMYKQIHRQVPVLKKYADKLIAEGTVTLQEFEEEIAKYDRICEEAYGRSKDKKILHIKHWLNSPWPGFFNVDGEPKSMTCPATGIPEDMLTHIGSVASSVPLEDFKIHTGLSRILRGRADMTKNRTVDWALAEYMAFGSLLKEGIHVRLSGQDVERGTFSHRHHVLHDQEVDRRTCVPMNHLWPDQAPYTVCNSSLSEYGVLGFELGYAMASPNALVLWEAQFGDFHNTAQCIIDQFISTGQAKWVRHNGIVLLLPHGMEGMGPEHSSARPERFLQMSNDDSDAYPAFTKDFEVSQLYDCNWIVVNCSTPANYFHVLRRQILLPFRKPLIIFTPKSLLRHPEAKSSFDQMVSGTSFQRVIPEDGAAARAPEQVQRLIFCTGKVYYDLVKERSSQDLEEKVAITRLEQISPFPFDLIKQEAEKYPGAELAWCQEEHKNMGYYDYISPRFMTILRRARPIWYVGRDPAAAPATGNRNTHLVSLKKFLDTAFNLQAFEGKTF

SEQ ID NO: 10408 - protein, 301 aa, Homo sapiens
MPTPAVAAPEPATTASEQKMAVPPTYADLGKSARDVFTEGYGFGLIKLDLKTKYENGLEFTSSSSANKTTKVTGSLETKYRWTEYGLTFTEKWNTDNTLGTKITVEDQLARGLKLTFDSSFSPNTGKKNAKIKTGYKREHINLGCDMVFDIVGPSIRGALVLGYEGWLAGYQMNFETTKSRVTQSNFAIGYKTDEFQLHTNVNDGTEFGGSIYQKVNKKLETTVNLAWTAGNSNTRFGIAAKYQIDPDACFSAKVNNSSLIGLGYTQTLKPGIKLTLSALLDGKNVNAGGHKLGLGLEFQA

SEQ ID NO: 10409 - protein, 283 aa, Homo sapiens
MAVPPTYADLGKSARDVFTKGYGFGLIKLDLKTKSENGLEFTSSGSANTETTKVTGSLETKYRWTEYGLTFTEKWNTDNTLGTEITVEDQLARGLKLTFDSSFSPNTGKKNAKIKTGYKREHINLGCDMDFDIAGPSIRGALVLGYEGWLAGYQMNFETAKSRVTQSNFAVGYKTDEFQLHTNVNDGTEFGGSIYQKVNKKLETAVNLAWTAGNSNTRFGIAAKYQIDPDACFSAKVNNSSLIGLGYTQTLKPGIKLTLSALLDGKNVNAGGHKLGLGLEFQA

SEQ ID NO: 10410 - protein, 2061 aa, Homo sapiens [sequence omitted]

SEQ ID NO: 10411 - protein, 1538 aa, Homo sapiens
MERRGKYSSKLERESKRTSENEAIKRCCSPPNELGFRRGSSYSKHDSSASRYKSTLSKPIPKSDKFKNSFCCTELNEEIKQSHSFSLQTPCSKGSELRMINKNPEREKAGSPAPSNRLNDSPTLKKLDELPIFKSEFITHDSHDSIKELDSLSKVKNDQLRSFCPIELNINGSPGAESDLATFCTSKTDAVLMTSDDSVTGSELSPLVKACMLSSNGFQNISRCKEKDLDDTCMLHKKSESPFRETEPLVSPHQDKLMSMPVMTVDYSKTVVKEPVDTRVSCCKTKDSDIYCTLNDSNPSLCNSEAENIEPSVMKISSNSFMNVHLESKPVICDSRNLTDHSKFACEEYKQSIGSTSSASVNHFDDLYQPIGSSGIASSLQSLPPGIKVDSLTLLKCGENTSPVLDAVLKSKKSSEFLKHAGKETIVEVGSDLPDSGKGFASRENRRNNGLSGKCLQEAQEEGNSILPERRGRPEISLDERGEGGHVHTSDDSEVVFSSCDLNLTMEDSDGVTYALKCDSSGHAPEIVSTVHEDYSGSSESSNDESDSEDTDSDDSSIPRNRLQSVVVVPKNSTLPMEETSPCSSRSSQSYRHYSDHWEDERLESRRHLYEEKFESIASKACPQTDKFFLHKGTEKNPEISFTQSSRKQIDNRLPELSHPQSDGVDSTSHTDVKSDPLGHPNSEETVKAKIPSRQQEELPIYSSDFEDVPNKSWQQTTFQNRPDSRLGKTELSFSSSCEIPHVDGLHSSEELRNLGWDFSQEKPSTTYQQPDSSYGACGGHKYQQNAEQYGGTRDYWQGNGYWDPRSGRPPGTGVVYDRTQGQVPDSLTDDREEEENWDQQDGSHFSDQSDKFLLSLQKDKGSVQAPEISSNSIKDTLAVNEKKDFSKNLEKNDIKDRGPLKKRRQEIESDSESDGELQDRKKVRVEVEQGETSVPPGSALVGPSCVMDDFRDPQRWKECAKQGKMPCYFDLIEENVYLTERKKNKSHRDIKRMQCECTPLSKDERAQGEIACGEDCLNRLLMIECSSRCPNGDYCSNRRFQRKQHADVEVILTEKKGWGLRAAKDLPSNTFVLEYCGEVLDHKEFKARVKEYARNKNIHYYFMALKNDEIIDATQKGNCSRFMNHSCEPNCETQKWTVNGQLRVGFFTTKLVPSGSELTFDYQFQRYGKEAQKCFCGSANCRGYLGGENRVSIRAAGGKMKKERSRKKDSVDGELEALMENGEGLSDKNQVLSLSRLMVRIETLEQKLTCLELIQNTHSQSCLKSFLERHGLSLLWIWMAELGDGRESNQKLQEEIIKTLEHLPIPTKNMLEESKVLPIIQRWSQTKTAVPPLSEGDGYSSENTSRAHTPLNTPDPSTKLSTEADTDTPKKLMFRRLKIISENSMDSAISDATSELEGKDGKEDLDQLENVPVEEEEELQSQQLLPQQLPECKVDSETNIEASKLPTSEPEADAEIEPKESNGTKLEEPINEETPSQDEEEGVSDVESERSQEQPDKTVDISDLATKLLDSWKDLKEVYRIPKKSQTEKENTRNQPE

SEQ ID NO: 10412 - protein, 1735 aa, Homo sapiens
DSHIGKDEEIPDSSKISLSCKKTGSKKKSSQSEGIFLGSESDEDSVRTSSSQRSHDLKFSASIEKERDFKKSSAPLKSEDLGKPSRSKTDRDDKYFSYSKLERDTRYVSSRCRSERERRRSRSHSRSERGSRTNLSYSRSERSHYYDSDRRYHRSSPYRERTRYSRPYTDNRARESSDSEEEYKKTYSRRTSSHSSSYRDLRTSSYSKSDRDCKTETSYLEMERRGKYSSKLERESKRTSENEAIKRCCSPPNELGFRRGSSYSKHDSSASRYKSTLSKPIPKSDKFKNSFCCTELNEEIKQSHSFSLQTPCSKGSELRMINKNPEREKAGSPAPSNRLNDSPTLKKLDELPIFKSEFITHDSHDSIKELDSLSKVKNDQLRSFCPIELNINGSPGAESDLATFCTSKTDAVLMTSDDSVTGSELSPLVKACMLSSNGFQNISRCKEKDLDDTCMLHKKSESPFRETEPLVSPHQDKLMSMPVMTVDYSKTVVKEPVDTRVSCCKTKDSDIYCTLNDSNPSLCNSEAENIEPSVMKISSNSFMNVHLESKPVICDSRNLTDHSKFACEEYKQSIGSTSSASVNHFDDLYQPIGSSGIASSLQSLPPGIKVDSLTLLKCGENTSPVLDAVLKSKKSSEFLKHAGKETIVEVGSDLPDSGKGFASRENRRNNGLSGKCLQEAQEEGNSILPERRGRPEISLDERGEGGHVHTSDDSEVVFSSCDLNLTMEDSDGVTYALKCDSSGHAPEIVSTVHEDYSGSSESSNDESDSEDTDSDDSSIPRNRLQSVVVVPKNSTLPMEETSPCSSRSSQSYRHYSDHWEDERLESRRHLYEEKFESIASKACPQTDKFFLHKGTEKNPEISFTQSSRKQIDNRLPELSHPQSDGVDSTSHTDVKSDPLGHPNSEETVKAKIPSRQQEELPIYSSDFEDVPNKSWQQTTFQNRPDSRLGKTELSFSSSCEIPHVDGLHSSEELRNLGWDFSQEKPSTTYQQPDSSYGACGGHKYQQNAEQYGGTRDYWQGNGYWDPRSGRPPGTGVVYDRTQGQVPDSLTDDREEEENWDQQDGSHFSDQSDKFLLSLQKDKGSVQAPEISSNSIKDTLAVNEKKDFSKNLEKNDIKDRGPLKKRRQEIESDSESDGELQDRKKVRVEVEQGETSVPPGSALVGPSCVMDDFRDPQRWKECAKQGKMPCYFDLIEENVYLTERKKNKSHRDIKRMQCECTPLSKDERAQGEIACGEDCLNRLLMIECSSRCPNGDYCSNRRFQRKQHADVEVILTEKKGWGLRAAKDLPSIIDATQKGNCSRFMNHSCEPNCETQKWTVNGQLRVGFFTTKLVPSGSELTFDYQFQRYGKEAQKCFCGSANCRGYLGGENRVSIRAAGGKMKKERSRKKDSVDGELEALMENGEGLSDKNQVLSLSRLMVRIETLEQKLTCLELIQNTHSQSCLKSFLERHGLSLLWIWMAELGDGRESNQKLQEEIIKTLEHLPIPTKNMLEESKVLPIIQRWSQTKTAVPPLSEGDGYSSENTSRAHTPLNTPDPSTKLSTEADTDTPKKLMFRRLKIISENSMDSAISDATSELEGKDGKEDLDQLENVPVEEEEELQSQQLLPQQLPECKVDSETNIEASKLPTSEPEADAEIEPKESNGTKLEEPINEETPSQDEEEGVSDVESERSQEQPDKTVDISDLATKLLDSWKDLKLLRAARSLLTSPADHVSPFLNSISNFVLKKNENLACIL

SEQ ID NO: 10413 - protein, 662 aa, Homo sapiens
MMEPEEYRERGREMVDYICQYLSTVRERRVTPDVQPGYLRAQLPESAPEDPDSWDSIFGDIERIIMPGVVHWQSPHMHAYYPALTSWPSLLGDMLADAINCLGFTWASSPACTELEMNVMDWLAKMLGLPEHFLHHHPSSQGGGVLQSTVSESTLIALLAARKNKILEMKTSEPDADESCLNARLVAYASDQAHSSVEKAGLISLVKMKFLPVDDNFSLRGEALQKAIEEDKQRGLVPVFVCATLGTTGVCAFDCLSELGPICAREGLWLHIDAAYAGTAFLCPEFRGFLKGIEYADSFTFNPSKWMMVHFDCTGFWVKDKYKLQQTFSVNPIYLRHANSGVATDFMHWQIPLSRRFRSVKLWFVIRSFGVKNLQAHVRHGTEMAKYFESLVRNDPSFEIPAKRHLGLVVFRLKGPNCLTENVLKEIAKAGRLFLIPATIQDKLIIRFTVTSQFTTRDDILRDWNLIRDAATLILSQHCTSQPSPRVGNLISQIRGARAWACGTSLQSVSGAGDDPVQARKIIKQPQRVGAGPMKRENGLHLETLLDPVDDCFSEEAPDATKHKLSSFLFSYLSVQTKKKTVRSLSCNSVPVSAQKPLPTEASVKNGGSSRVRIFSRFPEDMMMLKKSAFKKLIKFYSVPSFPECSSQCGLQLPCCPLQAMV

SEQ ID NO: 10414 - protein, 270 aa, Homo sapiens
MAASSSGEKEKERLGGGLGVAGGNSTRERLLSALEDLEVLSRELIEMLAISRNQKLLQAGEENQVLELLIHRDGEFQELMKLALNQGKIHHEMQVLEKEVEKRDSDIQQLQKQLKEAEQILATAVYQAKEKLKSIEKARKGAISSEEIIKYAHRISASNAVCAPLTWVPGDPRRPYPTDLEMRSGLLGQMNNPSTNGVNGHLPGDALAAGRLPDVLAPQYPWQSNDMSMNMLPPNHSSDFLLEPPGHNKENEDDVEIMSTDSSSSSSESD

SEQ ID NO: 10415 - protein, 439 aa, Homo sapiens
MDAKSLTAWSRTLVTFKDVFVDFTREEWKLLDTAQQIVYRNVMLENYKNLVSLGYQLTKPDVILRLEKGEEPWLVEREIHQETHPDSETAFEIKSSVSSRSIFKDKQSCDIKMEGMARNDLWYLSLEEVWKCRDQLDKYQENPERHLRHQLIHTGEKPYECKECGKSFSRSSHLIGHQKTHTGEEPYECKECGKSFSWFSHLVTHQRTHTGDKLYTCNQCGKSFVHSSRLIRHQRTHTGHKPYECPECGKSFRQSTHLILHQRTHVRVRPYECNECGKSYSQRSHLVVHHRIHTGLKPFECKDCGKCFSRSSHLYSHQRTHTGEKPYECHDCGKSFSQSSALIVHQRIHTGEKPYECCQCGKAFIRKNDLIKHQRIHVGAETYKCNQCGIIFSQNSPFIVHQIAHTGEQFLTCNQCGTALVNTSNLIGYQTNHIRENAY

SEQ ID NO: 10416 - protein, 573 aa, Homo sapiens
MDAKSLTAWSRTLVTFKDVFVDFTREEWKLLDTAQQIVYRNVMLENYKNLVSLGYQLTKPDVILRLEKGEEPWLVEREIHQETHPDSETAFEIKSSVSSRSIFKDKQSCDIKMEGMARNDLWYLSLEEVWKCRDQLDKYQENPERHLRQVAFTQKKVLTQERVSESGKYGGNCLLPAQLVLREYFHKRDSHTKSLKHDLVLNGHQDSCASNSNECGQTFCQNIHLIQFARTHTGDKSYKCPDNDNSLTHGSSLGISKGIHREKPYECKECGKFFSWRSNLTRHQLIHTGEKPYECKECGKSFSRSSHLIGHQKTHTGEEPYECKECGKSFSWFSHLVTHQRTHTGDKLYTCNQCGKSFVHSSRLIRHQRTHTGEKPYECPECGKSFRQSTHLILHQRTHVRVRPYECNECGKSYSQRSHLVVHHRIHTGLKPFECKDCGKCFSRSSHLYSHQRTHTGEKPYECHDCGKSFSQSSALIVHQRIHTGEKPYECCQCGKAFIRKNDLIKHQRIHVGEETYKCNQCGIIFSQNSPFIVHQIAHTGEQFLTCNQCGTALVNTSNLIGYQTNHIRENAY

SEQ ID NO: 10417 - protein, 232 aa, Homo sapiens
MERCPSLGVTLYALVVVLGLRATPAGGQHYLHIRPAPSDNLPLVDLIEHPDPIFDPKEKDLNETLLRSLLGGHYDPGFMATSPPEDRPGGGGGAAGGAEDLAELDQLLRQRPSGAMPSEIKGLEFSEGLAQGKKQRLSKKLRRKLQMWLWSQTFCPVLYAWNDLGSRFWPRYVKVGSCFSKRSCSVPEGMVCKPSKSVHLTVLRWRCQRRGGQRCGWIPIQYPIISECKCSC

SEQ ID NO: 10418 - protein, 1189 aa, Homo sapiens
EGLGEQASWAMVWCLGLAVLSLVISQGADGRGKPEVVSVVGRAGESVVLGCDLLPPAGRPPLHVIEWLRFGFLLPIFIQFGLYSPRIDPDYVGRVRLQKGASLQIEGLRVEDQGWYECRVFFLDQHIPEDDFANGSWVHLTVNSPPQFQETPPAVLEVQELEPVTLRCVARGSPLPHVTWKLRGKDLGQGQGQVQVQNGTLRIRRVERGSSGVYTCQASSTEGSATHATQLLVLGPPVIVVPPKNSTVNASQDVSLACHAEAYPANLTYSWFQDNINVFHISRLQPRVRILVDGSLRLLATQPDDAGCYTCVPSNGLLHPPSASAYLTVLYPAQVTAMPPETPLPIGMPGVIRCPVRANPPLLFVSWTKDGKALQLDKFPGWSQGTEGSLIIALGNEDALGEYSCTPYNSLGTAGPSPVTRVLLKAPPAFIERPKEEYFQEVGRELLIPCSAQGDPPPVVSWTKVGRGLQGQAQVDSNSSLILRPLTKEAHGHWECSASNAVARVATSTNVYVLGTSPHVVTNVSVVALPKGANVSWEPGFDGGYLQRFSVWYTPLAKRPDRMHHDWVSLAVPVGAAHLLVPGLQPHTQYQFSVLAQNKLGSGPFSEIVLSAPEGLPTTPAAPGLPPTEIPPPLSPPRGLVAVRTPRGVLLHWDPPELVPKRLDGYVLEGRQGSQGWEVLDPAVAGTETELLVPGLIKDVLYEFRLVAFAGSFVSDPSNTANVSTSGLEVYPSRTQLPGLLPQPVLAGVVGGVCFLGVAVLVSILAGCLLNRRRAARRRRKRLRQDPPLIFSPTGKSAAPSALGSGSPDSVAKLKLQGSPVPSLRQSLLWGDPAGTPSPHPDPPSSRGPLPLEPICRGPDGRFVMGPTVAAPQERSGREQAEPRTPAQRLARSFDCSSSSPSGAPQPLCIEDISPVAPPPAAPPSPLPGPGPLLQYLSLPFFREMNVDGDWPPLEEPSPAAPPDYMDTRRCPTSSFLRSPETPPVSPRESLPGAVVGAGATAEPPYTALADWTLRERLLPGLLPAAPRGSLTSQSSGRGSASFLRPPSTAPSAGGSYLSPAPGDTSSWASGPERWPRREHVVTVSKRRNTSVDENYEWDSEFPGDMELLETLHLGLASSRLRPEAEPELGVKTPEEGCLLNTAHVTGPEARCAALREEFLAFRRRRDATRARLPAYRQPVPHPEQATLL

SEQ ID NO: 10419 - protein, 2589 aa, Homo sapiens
LLELIPYAPTLSWTACPPAMAGPRGLLPLCLLAFCLAGFSFVRGQVLFKGCDVKTTFVTHVPCTSCAAIKKQTCPSGWLRELPDQITQDCRYEVQLGGSMVSMSGCRRKCRKQVVQKACCPGYWGSRCHECPGGAETPCNGHGTCLDGMDRNGTCVCQENFRGSACQECQDPNRFGPDCQSVCSCVHGVCNHGPRGDGSCLCFAGYTGPHCDQELPVCQELRCPQNTQCSAEAPSCRCLPGYTQQGSECRAPNPCWPSPCSLLAQCSVSPKGQAQCHCPENYHGDGMVCLPKDPCTDNLGGCPSNSTLCVYQKPGQAFCTCRPGLVSINSNASAGCFAFCSPFSCDRSATCQVTADGKTSCVCRESEVGDGRACYGHLLHEVQKATQTGRVFLQLRVAVAMMDQGCREILTTAGPFTVLVPSVSSFSSRTMNASLAQQLCRQHIIAGQHILEDTRTQQTRRWWTLAGQEITVTFNQFTKYSYKYKDQPQQTFNIYKANNIAANGVFHVVTGLRWQAPSGTPGDPKRTIGQILASTEAFSRFETILENCGLPSILDGPGPFTVFAPSNEAVDSLRDGRLIYLFTAGLSKLQELVRYHIYNHGQLTVEKLISKGRILTMANQVLAVNISEEGRILLGPEGVPLQRVDVMAANGVIHMLDGILLPPTILPILPKHCSEEQHKIVAGSCVDCQALNTSTCPPNSVKLDIFPKECVYIHDPTGLNVLKKGCASYCNQTIMEQGCCKGFFGPDCTQCPGGFSNPCYGKGNCSDGIQGNGACLCFPDYKGIACHICSNPNKHGEQCQEDCGCVHGLCDNRPGSGGVCQQGTCAPGFSGRFCNESMGDCGPTGLAQHCHLHARCVSQEGVARCRCLDGFEGDGFSCTPSNPCSHPDRGGCSENAECVPGSLGTHHCTCHKGWSGDGRVCVAIDECELDVRGGCHTDALCSYVGPGQSRCTCKLGFAGDGYQCSPIDPCRAGNGGCHGLATCRAVGGGQRVCTCPPGFGGDGFSCYGDIFRELEANAHFSIFYQWLKSAGITLPADRRVTALVPSEAAVRQLSPEDRAFWLQPRTLPNLVRAHFLQGALFEEELARLGGQEVATLNPTTRWEIRNISGRVWVQNASVDVADLLATNGVLHILSQVLLPPRGDVPGGQGLLQQLDLVPAFSLFRELLQHHGLVPQIEAATAYTIFVPTNRSLEAQGNSSHLDADTVRHHVVLGEALSMETLRKGGHRNSLLGPAHWIVFYNHSGQPEVNHVPLEGPMLEAPGRSLIGLSGVLTVGSSRCLHSHAEALREKCVNCTRRFRCTQGFQLQDTPRKSCVYRSGFSFSRGCSYTCAKKIQVPDCCPGFFGTLCEPCPGGLGGVCSGHGQCQDRFLGSGECHCHEGFHGTACEVCELGRYGPNCTGVCDCAHGLCQEGLQGDGSCVCNVGWQGLRCDQKITSPQCPRKCDPNANCVQDSAGASTCACAAGYSGNGIFCSEVDPCAHGHGGCSPHANCTKVAPGQRTCTCQDGYMGDGELCQEINSCLIHHGGCHIHAECIPTGPQQVSCSCREGYSGDGIRTCELLDPCSKNNGGCSPYATCKSTGDGQRTCTCDTAHTVGDGLTCRARVGLELLRDKHASFFSLRLLEYKELKGDGPFTIFVPHADLMSNLSQDELARIRAHRQLVFRYHVVGCRRLRSEDLLEQGYATALSGHPLRFSEREGSIYLNDFARVVSSDHEAVNGILHFIDRVLLPPEALHWEPDDAPIPRRNVTAAAQGFGYKIFSGLLKVAGLLPLLREASHRPFTMLWPTDAAFRALPPDRQAWLYHEDHRDKLAAILRGHMIRNVEALASDLPNLGPLRTMHGTPISFSCSRTRPGELMVGEDDARIVQRHLPFEGGLAYGIDQLLEPPGLGARCDHFETRPLRLNTCSICGLEPPCPEGSQEQGSPEACWRFYPKFWTSPPLHSLGLRSVWVHPSLWGRPQGLGRGCHRNCVTTTWKPSCCPGHYGSECQACPGGPSSPCSDRGVCMDGMSGSGQCLCRSGFAGTACELCAPGAFGPHCQACRCTVHGRCDEGLGGSGSCFCDEGWTGPRCEVQLELQPVCTPPCAPEAVCRAGNSCECSLGYEGDGRVCTVADLCQDGHGGCSEHANCSQVGTMVTCTCLPDYEGDGWSCRARNPCTDGHRGGCSEHANCLSTGLNTRRCECHAGYVGDGLQCLEESEPPVDRCLGQPPPCHSDAMCTDLHFQEKRAGVFHLQATSGPYGLNFSEAEAACEAQGAVLASFPQLSAAQQLGFHLCLMGWLANGSTAHPVVFPVADCGNGRVGIVSLGARKNLSERWDAYCFRVQDVACRCRNGFVGDGISTCNGKLLDVLAATANFSTFYGMLLGYANATQRGLDFLDFLDDELTYKTLFVPVNEGFVDNMTLSGPDLELHASNATLLSANASQGKLLPAHSGLSLIISDAGPDNSSWAPVAPGTVVVSRIIVWDIMAFNGIIHALASPLLAPPQPQAVLAPEAPPVAAGVGAVLAAGALLGLVAGALYLRARGKPMGFGFSAFQAEDDADDDFSPWQEGTNPTLVSVPNPVFGSDTFCEPFDDSLLEEDFPDTQRILTVK

SEQ ID NO: 10420 - protein, 219 aa, Homo sapiens
MALSWLQRVELALFAAAFLCGAVAAAAMTRTQGSFSGRCPLYGVATLNGSSLALSRPSAPSLCYFVAGASGLLALYCLLLLLFWIYSSCIEDSHRGAIGLRIALAISAIAVFLVLVSACILRFGTRSLCNSIISLNTTISCSEAQKIPWTPPGTALQFYSNLHNAETSSWVNLVLWCVVLVLQVVQWKSEATPYRPLERGDPEWSSETDALVGSRLSHS

SEQ ID NO: 10421 - protein, 693 aa, Homo sapiens
MTPQSLLQTTLFLLSLLFLVQGAHGRGHREDFRFCSQRNQTHRSSLHYKPTPDLRISIENSEEALTVHAPFPAAHPASRSFPDPRGLYHFCLYWNRHAGRLHLLYGKRDFLLSDKASSLLCFQHQEESLAQGPPLLATSVTSWWSPQNISLPSAASFTFSFHSPPHTAAHNASVDMCELKRDLQLLSQFLKHPQKASRRPSAAPASQQLQSLESKLTSVRFMGDMVSFEEDRINATVWKLQPTAGLQDLHIHSRQEEEQSEIMEYSVLLPRTLFQRTKGRSGEAEKRLLLVDFSSQALFQDKNSSHVLGEKVLGIVVQNTKVANLTEPVVLTFQHQLQPKNVTLQCVFWVEDPTLSSPGHWSSAGCETVRRETQTSCFCNHLTYFAVLMVSSVEVDAVHKHYLSLLSYVGCVVSALACLVTIAAYLCSRVPLPCRRKPRDYTIKVHMNLLLAVFLLDTSFLLSEPVALTGSEAGCRASAIFLHFSLLTCLSWMGLEGYNLYRLVVEVFGTYVPGYLLKLSAMGWGFPIFLVTLVALVDVDNYGPIILAVHRTPEGVIYPSMCWIRDSLVSYITNLGLFSLVFLFNMAMLATMVVQILRLRPHTQKWSHVLTLLGLSLVLGLPWALIFFSFASGTFQLVVLYLFSIITSFQGFLIFIWYWSMRLQARGGPSPLKSNSDSARLPISSGSTSSSRI

SEQ ID NO: 10422 - protein, 561 aa, Homo sapiens
MANMNSDSRHLGTSEVDHERDPGPMNIQFEPSDLRSKRPFCIEPTNIVNVNHVIQRVSDHASAMNKRIHYYSRLTTPADKALIAPDHVVPAPEECYVYSPLGSAYKLQSYTEGYGKNTSLVTIFMIWNTMMGTSILSIPWGIKQAGFTTGMCVIILMGLLTLYCCYRVVKSRTMMFSLDTTTWEYPDVCRHYFGSFGQWSSLLFSLVSLIGAMIVYWVLMSNFLFNTGKFIFNFIHHINDTDTILSTNNSNPVICPSAGSGGHPDNSSMIFYANDTGAQQFEKWWDKSRTVPFYLVGLLLPLLNFKSPSFFSKFNILGTVSVLYLIFLVTFKAVRLGFHLEFHWFIPTEFFVPEIRFQFPQLTGVLTLAFFIHNCIITLLKNNKKQENNVRDLCIAYMLVTLTYLYIGVLVFASFPSPPLSKDCIEQNFLDNFPSSDTLSFIARIFLLFQMMTVYPLLGYLARVQLLGHIFGDIYPSIFHVLILNLIIVGAGVIMACFYPNIGGIIRYSGAACGLAFVFIYPSLIYIISLHQEERLTWPKLIFHVFIIILGVANLIVQFFM

SEQ ID NO: 10423 - protein, 417 aa, Homo sapiens
MLLSVPLLLGLLGLAVAEPAVYFKEQFLDGDGWTSRWIESKHKSDFGKFVLSSGKFYGDEEKDKGLQTSQDARFYALSASFEPFSNKGQTLVVQFTVKHEQNIDCGGGYVKLFPNSLDQTDMHGDSEYNIMFGPDICGPGTKKVHVIFNYKGKNVLINKDIRCKDDEFTHLYTLIVRPDNTYEVKIDNSQVESGSLEDDWDFLPPKKIKDPDASKPEDWDERAKIDDPTDSKPEDWDKPEHIPDPDAKKPEDWDEEMDGEWEPPVIQNPEYKGEWKPRQIDNPDYKGTWIHPEIDNPEYSPDPSIYAYDNFGVLGLDLWQVKSGTIFDNFLITNDEAYAEEFGNETWGVTKAAEKQMKDKQDEEQRLKEEEEDKKRKEEEEAEDKEDDEDKDEDEEDEEDKEEDEEEDVPGQAKDEL

SEQ ID NO: 10424 - protein, 1336 aa, Homo sapiens
MAPRCPWPWPRRRRLLDVLAPLVLLLGVRAASAEPERISEEVGLLQLLGDPPPQQVTQTDDPDVGLAYVFGPDANSGQVARYHFPSLFFRDFSLLFHIRPATEGPGVLFAITDSAQAMVLLGVKLSGVQDGHQDISLLYTEPGAGQTHTAASFRLPAFVGQWTHLALSVAGGFVALYVDCEEFQRMPLARSSRGLELEPGAGLFVAQAGGADPDKFQGVIAELKVRRDPQVSPMHCLDEEGDDSDGAFGDSGSGLGDARELLREETGAALKPRLPAPPPVTTPPLAGGSSTEDSRSEEVEEQTTVASLGAQTLPGSDSVSTWDGSVRTPGGRVKEGGLKGQKGEPGVPGPPGRAGPPGSPCLPGPPGLPCPVSPLGPAGPALQTVPGPQGPPGPPGRDGTPGRDGEPGDPGEDGKPGDTGPQGFPGTPGDVGPKGDKGDPGVGERGPPGPQGPPGPPGPSFRHDKLTFIDMEGSGFGGDLEALRGPRGFPGPPGPPGVPGLPGEPGRFGVNSSDVPGPAGLPGVPGREGPPGFPGLPGPPGPPGREGPPGRTGQKGSLGEAGAPGHKGSKGAPGPAGARGESGLAGAPGPAGPPGPPGPPGPPGPGLPAGFDDMEGSGGPFWSTARSADGPQGPPGLPGLKGDPGVPGLPGAKGEVGADGIPGFPGLPGREGIAGPQGPKGDRGSRGEKGDPGKDGVGQPGLPGPPGPPGPVVYVSEQDGSVLSVPGPEGRPGFAGFPGPAGPKGNLGSKGERGSPGPKGEKGEPGSIFSPDGGALGPAQKGAKGEPGFRGPPGPYGRPGYKGEIGFPGRPGRPGMNGLKGEKGEPGDASLGFGMRGMPGPPGPPGPPGPPGTPVYDSNVFAESSRPGPPGLPGNQGPPGPKGAKGEVGPPGPPGQFPFDFLQLEAEMKGEKGDRGDAGQKGERGEPGGGGFFGSSLPGPPGPPGPRGYPGIPGPKGESIRGQPGPPGPQGPPGIGYEGRQGPPGPPGPPGPPSFPGPHRQTISVPGPPGPPGPPGPPGTMGASSGVRLWATRQAMLGQVHEVPEGWLIFVAEQEELYVRVQNGFRKVQLEARTPLPRGTDNEVAALQPPVVQLHDSNPYPRREHPHPTARPWRADDILASPPRLPEPQPYPGAPHHSSYVHLRPARPTSPPAHSHRDFQPVLHLVALNSPLSGGMRGIRGADFQCFQQARAVGLAGTFRAFLSSRLQDLYSIVRRADRAAVPIVNLKDELLFPSWEALFSGSEGPLKPGARIFSFDGKDVLRHPTWPQKSVWHGSDPNGRRLTESYCETWRTEAPSATGQASSLLGGRLLGQSAASCHHAYIVLCIENSFMTASK

SEQ ID NO: 10425 - protein, 1516 aa, Homo sapiens
MAPYPCGCHILLLLFCCLAAARANLLNLNWLWFNNEDTSHAATTIPEPQGPLPVQPTADTTTHVTPRNGSTEPATAPGSPEPPSELLEDGQDTPTSAESPDAPEENIAGVGAEILNVAKGIRSFVQLWNDTVPTESLARAETLVLETPVGPLALAGPSSTPQENGTTLWPSRGIPSSPGAHTTEAGTLPAPTPSPPSLGRPWAPLTGPSVPPPSSERISEEVGLLQLLGDPPPQQVTQTDDPDVGLAYVFGPDANSGQVARYHFPSLFFRDFSLLFHIRPATEGPGVLFAITDSAQAMVLLGVKLSGVQDGHQDISLLYTEPGAGQTHTAASFRLPAFVGQWTHLALSVAGGFVALYVDCEEFQRMPLARSSRGLELEPGAGLFVAQAGGADPDKFQGVIAELKVRRDPQVSPMHCLDEEGDDSDGAFGDSGSGLGDARELLREETGAALKPRLPAPPPVTTPPLAGGSSTEDSRSEEVEEQTTVASLGAQTLPGSDSVSTWDGSVRTPGGRVKEGGLKGQKGEPGVPGPPGRAGPPGSPCLPGPPGLPCPVSPLGPAGPALQTVPGPQGPPGPPGRDGTPGRDGEPGDPGEDGKPGDTGPQGFPGTPGDVGPKGDKGDPGVGERGPPGPQGPPGPPGPSFRHDKLTFIDMEGSGFGGDLEALRGPRGFPGPPGPPGVPGLPGEPGRFGVNSSDVPGPAGLPGVPGREGPPGFPGLPGPPGPPGREGPPGRTGQKGSLGEAGAPGHKGSKGAPGPAGARGESGLAGAPGPAGPPGPPGPPGPPGPGLPAGFDDMEGSGGPFWSTARSADGPQGPPGLPGLKGDPGVPGLPGAKGEVGADGIPGFPGLPGREGIAGPQGPKGDRGSRGEKGDPGKDGVGQPGLPGPPGPPGPVVYVSEQDGSVLSVPGPEGRPGFAGFPGPAGPKGNLGSKGERGSPGPKGEKGEPGSIFSPDGGALGPAQKGAKGEPGFRGPPGPYGRPGYKGEIGFPGRPGRPGMNGLKGEKGEPGDASLGFGMRGMPGPPGPPGPPGPPGTPVYDSNVFAESSRPGPPGLPGNQGPPGPKGAKGEVGPPGPPGQFPFDFLQLEAEMKGEKGDRGDAGQKGERGEPGGGGFFGSSLPGPPGPPGPRGYPGIPGPKGESIRGQPGPPGPQGPPGIGYEGRQGPPGPPGPPGPPSFPGPHRQTISVPGPPGPPGPPGPPGTMGASSGVRLWATRQAMLGQVHEVPEGWLIFVAEQEELYVRVQNGFRKVQLEARTPLPRGTDNEVAALQPPVVQLHDSNPYPRREHPHPTARPWRADDILASPPRLPEPQPYPGAPHHSSYVHLRPARPTSPPAHSHRDFQPVLHLVALNSPLSGGMRGIRGADFQCFQQARAVGLAGTFRAFLSSRLQDLYSIVRRADRAAVPIVNLKDELLFPSWEALFSGSEGPLKPGARIFSFDGKDVLRHPTWPQKSVWHGSDPNGRRLTESYCETWRTEAPSATGQASSLLGGRLLGQSAASCHHAYIVLCIENSFMTASK

SEQ ID NO: 10426 - protein, 1477 aa, Homo sapiens
MAPYPCGCHILLLLFCCLAAARANLLNLNWLWFNNEDTSHAATTIPEPQGPLPVQPTADTTTHVTPRNGSTEPATAPGSPEPPSELLEDGQDTPTSAESPDAPEENIAGVGAEILNVAKGIRSFVQLWNDTVPTESLARAETLVLETPVGPLALAGPSSTPQENGTTLWPSRGIPSSPGAHTTEAGTLPAPTPSPPSLGRPWAPLTGPSVPPPSSERISEEVGLLQLLGDPPPQQVTQTDDPDVGLAYVFGPDANSGQVARYHFPSLFFRDFSLLFHIRPATEGPGVLFAITDSAQAMVLLGVKLSGVQDGHQDISLLYTEPGAGQTHTAASFRLPAFVGQWTHLALSVAGGFVALYVDCEEFQRMPLARSSRGLELEPGAGLFVAQAGGADPDKFQGVIAELKVRRDPQVSPMHCLDEEGDDSDGASGDSGSGLGDARELLREETGAALKPRLPAPPPVTTPPLAGGSSTEDSRSEEVEEQTTVASLGAQTLPGSDSVSTWDGSVRTPGGRVKEGGLKGQKGEPGPPGPPGRDGTPGRDGEPGDPGEDGKPGDTGPQGFPGTPGDVGPKGDKGDPGVGERGPPGPQGPPGPPGPSFRHDKLTFIDMEGSGFGGDLEALRGPRGFPGPPGPPGVPGLPGEPGRFGVNSSDVPGPAGLPGVPGREGPPGFPGLPGPPGPPGREGPPGRTGQKGSLVSLPSSPGKGAPGPAGARGESGLAGAPGPAGPPGPPGPPGPPGPGLPAGFVTVPAGCLQPAWAHGVPAQVAQCPWDPSALGWGRAGDPGVPGLPGAKGEVGADGVPGFPGLPGREGIAGPQGPKGDRGSRGEKGDPGKDGVGQPGLPGPPGPPGPVVYVSEQDGSVLSVPGPEGRPGFAGFPGPAGPKGNLGSKGERGSPGPKGEKGEPGSIFSPDGGALGPAQKGAKGEPGFRGPPGPYGRPGYKGEIGFPGRPGRPGMNGLKGEKGEPGDASLGFGMRGMPGPPGPPGPPGPPGTPVYDSNVFAESSRPGPPGLPGNQGPPGPKGAKGEVGPPGPPGQFPFDFLQLEAEMKGEKGDRGDAGQKGERGEPGGGGFFGSSLPGPPGPPGPPGPRGYPGIPGPKGESIRGQPGPPGPQGPPGIGYEGRQGPPGPPGPPGPPSFPGPHRQTISVPGPPGPPGPPGPPGTMGASSGVRLWATRQAMLGQVHEVPEGWLIFVAEQEELYVRVQNGFRKVQLEARTPLPRGTDNEVAALQPPVVQLHDSNPYPRREHPHPTARPWRADDILASPPRLPEPQPYPGAPHHSSYVHLRPARPTSPPAHSHRDFQPVLHLVALNSPLSGGMRGIRGADFQCFQQARAVGLAGTFRAFLSSRLQDLYSIVRRADRAAVPIVNLKDELLFPSWEALFSGSEGPLKPGARIFSFDGKDVLRHPTWPQKSVWHGSDPNGRRLTESYCETWRTEAPSATGQASSLLGGRLLGQSAASCHHAYIVLCIENSFMTASK

SEQ ID NO: 10427 - protein, 521 aa, Homo sapiens
ARGGNDWATIGAALGRSASSVKDRCRLMKDTCNTGKWTEEEEKRLAEVVHELTSTEPGDIVTQGVSWAAVAERVGTRSEKQCRSKWLNYLNWKQSGGTEWTKEDEINLILRIAELDVADENDINWDLLAEGWSSVRSPQWLRSKWWTIKRQIANHKDVSFPVLIKGLKQLHENQKNNPTLLENKSGSGVPNSNTNSSVQHVQIRVARLEDNTAISSSPMAALQIPVQITHVSSADSPATVDSETITLNSGTLQTFEILPSFHLQPTGTPGTYLLQTSSSQGLPLTLTASPTVTLTAAAPASPEQIIVHALSPEHLLNTSDNVTVQCHTPRVIIQTVATEDITSSISQAELTVDSDIQSSDFPEPPDALEADTFPDEIHHPKMTVEPSFNDAHVSKFSDQNSTELMNSVMVRTEEEISDTDLKQEESPSDLASAYVTEGLESPTIEEQVDQTIDDETILIVPSPHGFIQASDVIDTESVLPLTTLTDPILQHHQEESNIIGSSLGSPVSEDSKDVEDLVNCH

SEQ ID NO: 10428 - protein, 760 aa, Homo sapiens
MSTVEEDSDTVTVETVNSVTLTQDTEGNLILHCPQNEADEIDSEDSIEPPHKRLCLSSEDDQSIDDSTPCISVVALPLSENDQSFEVTMTATTEVADDEVTEGTVTQIQILQNEQLDEISPLGNEEVSAVSQAWFTTKEDKDSLTNKGHKWKQGMWSKEEIDILMNNIERYLKARGIKDATEIIFEMSKDERKDFYRTIAWGLNRPLFAVYRRVLRMYDDRNHVGKYTPEEIEKLKELRIKHGNDWATIGAALGRSASSVKDRCRLMKDTCNTGKWTEEEEKRLAEVVHELTSTEPGDIVTQGVSWAAVAERVGTRSEKQCRSKWLNYLNWKQSGGTEWTKEDEINLILRIAELDVADENDINWDLLAEGWSSVRSPQWLRSKWWTIKRQIANHKDVSFPVLIKGLKQLHENQKNNPTLLENKSGSGVPNSNTNSSVQHVQIRVARLEDNTAISSSPMAALQIPVQITHVSSADSPATVDSETITLNSGTLQTFEILPSFHLQPTGTPGTYLLQTSSSQGLPLTLTASPTVTLTAAAPASPEQIIVHALSPEHLLNTSDNVTVQCHTPRVIIQTVATEDITSSISQAELTVDSDIQSSDFPEPPDALEADTFPDEIHHPKMTVEPSFNDAHVSKFSDQNSTELMNSVMVRTEEEISDTDLKQEESPSDLASAYVTEGLESPTIEEQVDQTIDDETILIVPSPHGFIQASDVIDTESVLPLTTLTDPILQHHQEESNIIGSSLGSPVSEDSKDVEDLVNCH

SEQ ID NO: 10429 - protein, 549 aa, Homo sapiens
MAEASFGSSSPVGSLSSEDHDFDPTAEMLVHDYDDERTLEEEEMMDEGKNFSSEIEDLEKEGTMPLEDLLAFYGYEPTIPAVANSSANSSPSELADELPDMTLDKEEIAKDLLSGDDEETQSSADGLTPSVTSHETSDFFPRPLRSNTACDGDKESEVEDVETDSGNSPEDLRKEIMIGLQYQAEIPPYLGEYDGNEKVYENEDQLLWCPDVVLESKVKEYLVETSLRTGSEKIMDRISAGTHTRDNEQALYELLKCNHNIKEAIERYCCNGKASQGMTAWTEEECRSFEHALMLFGKDFHLIQKNKVRTRTVAECVAFYYMWKKSERYDYFAQQTRFGKKRYNHHPGVTDYMDRLVDETEALGGTVNASALTSNRPEPIPDQQLNILNSFTASDLTALTNSVATVCDPTDVNCLDDSFPPLGNTPRGQVNHVPVVTEELLTLPSNGESDCFNLFETGFYHSELNPMNMCSEESERPAKRLKMGIAVPESFMNEVSVNNLGVDFENHTHHITSAKMAVSVADFGSLSANETNGFISAHALHQHAALHSE

SEQ ID NO: 10430 - protein, 415 aa, Homo sapiens
LFRRLNCGRMRGSVECTWGWGHCAPSPLLLWTLLLFAAPFGLLGEKTRQVSLEVIPNWLGPLQNLLHIRAVGTNSTLHYVWSSLGPLAVVMVATNTPHSTLSVNWSLLLSPEPDGGLMVLPKDSIQFSSALVFTRLLEFDSTNVSDTAAKPLGRPYPPYSLADFSWNNITDSLDPATLSATFQGHPMNDPTRTFANGSLAFRVQAFSRSSRPAQPPRLLHTADTCQLEVALIGASPRGNRSLFGLEVATLGQGPDCPSMQEQHSIDDEYAPAVFQLDQLLWGSLPSGFAQWRPVAYSQKPGGRESALPCQASPLHPALAYSLPQSPIVRAFFGSQNNFCAFNLTFGASTGPGYWDQHYLSWSMLLGVGFPPVDGLSPLVLGIMAVALGAPGLMLLGGGLVLLLHHKKYSEYQSIN

SEQ ID NO: 10431 - protein, 405 aa, Homo sapiens
MRPSGTAGAALLALLAALCPASRALEEKKVCQGTSNKLTQLGTFEDHFLSLQRMFNNCEVVLGNLEITYVQRNYDLSFLKTIQEVAGYVLIALNTVERIPLENLQIIRGNMYYENSYALAVLSNYDANKTGLKELPMRNLQEILHGAVRFSNNPALCNVESIQWRDIVSSDFLSNMSMDFQNHLGSCQKCDPSCPNGSCWGAGEENCQKLTKIICAQQCSGRCRGKSPSDCCHNQCAAGCTGPRESDCLVCRKFRDEATCKDTCPPLMLYNPTTYQMDVNPEGKYSFGATCVKKCPRNYVVTDHGSCVRACGADSYEMEEDGVRKCKKCEGPCRKVCNGIGIGEFKDSLSINATNIKHFKNCTSISGDLHILPVAFRGDSFTHTPPLDPQELDILKTVKEITGLS

SEQ ID NO: 10432 - protein, 705 aa, Homo sapiens
MRPSGTAGAALLALLAALCPASRALEEKKVCQGTSNKLTQLGTFEDHFLSLQRMFNNCEVVLGNLEITYVQRNYDLSFLKTIQEVAGYVLIALNTVERIPLENLQIIRGNMYYENSYALAVLSNYDANKTGLKELPMRNLQEILHGAVRFSNNPALCNVESIQWRDIVSSDFLSNMSMDFQNHLGSCQKCDPSCPNGSCWGAGEENCQKLTKIICAQQCSGRCRGKSPSDCCHNQCAAGCTGPRESDCLVCRKFRDEATCKDTCPPLMLYNPTTYQMDVNPEGKYSFGATCVKKCPRNYVVTDHGSCVRACGADSYEMEEDGVRKCKKCEGPCRKVCNGIGIGEFKDSLSINATNIKHFKNCTSISGDLHILPVAFRGDSFTHTPPLDPQELDILKTVKEITGFLLIQAWPENRTDLHAFENLEIIRGRTKQHGQFSLAVVSLNITSLGLRSLKEISDGDVIISGNKNLCYANTINWKKLFGTSGQKTKIISNRGENSCKATGQVCHALCSPEGCWGPEPRDCVSCRNVSRGRECVDKCNLLEGEPREFVENSECIQCHPECLPQAMNITCTGRGPDNCIQCAHYIDGPHCVKTCPAGVMGENNTLVWKYADAGHVCHLCHPNCTYGPGNESLKAMLFCLFKLSSCNQSNDGSVSHQSGSPAAQESCLGWIPSLLPSEFQLGWGGCSHLHAWPSASVIITASSCH

SEQ ID NO: 10433 - protein, 628 aa, Homo sapiens
MRPSGTAGAALLALLAALCPASRALEEKKVCQGTSNKLTQLGTFEDHFLSLQRMFNNCEVVLGNLEITYVQRNYDLSFLKTIQEVAGYVLIALNTVERIPLENLQIIRGNMYYENSYALAVLSNYDANKTGLKELPMRNLQEILHGAVRFSNNPALCNVESIQWRDIVSSDFLSNMSMDFQNHLGSCQKCDPSCPNGSCWGAGEENCQKLTKIICAQQCSGRCRGKSPSDCCHNQCAAGCTGPRESDCLVCRKFRDEATCKDTCPPLMLYNPTTYQMDVNPEGKYSFGATCVKKCPRNYVVTDHGSCVRACGADSYEMEEDGVRKCKKCEGPCRKVCNGIGIGEFKDSLSINATNIKHFKNCTSISGDLHILPVAFRGDSFTHTPPLDPQELDILKTVKEITGFLLIQAWPENRTDLHAFENLEIIRGRTKQHGQFSLAVVSLNITSLGLRSLKEISDGDVIISGNKNLCYANTINWKKLFGTSGQKTKIISNRGENSCKATGQVCHALCSPEGCWGPEPRDCVSCRNVSRGRECVDKCNLLEGEPREFVENSECIQCHPECLPQAMNITCTGRGPDNCIQCAHYIDGPHCVKTCPAGVMGENNTLVWKYADAGHVCHLCHPNCTYGS

SEQ ID NO: 10434 - protein, 1210 aa, Homo sapiens [sequence omitted]

SEQ ID NO: 10435 - protein, 579 aa, Homo sapiens
MSASSLLEQRPKGQGNKVQNGSVHQKDGLNDDDFEPYLSPQARPNNAYTAMSDSYLPSYYSPSIGFSYSLGEAAWSTGGDTAMPYLTSYGQLSNGEPHFLPDAMFGQPGALGSTPFLGQHGFNFFPSGIDFSAWGNNSSQGQSTQSSGYSSNYAYAPSSLGGAMIDGQSAFANETLNKAPGMNTIDQGMAALKLGSTEVASNVPKVVGSAVGSGSITSNIVASNSLPPATIAPPKPASWADIASKPAKQQPKLKTKNGIAGSSLPPPPIKHNMDIGTWDNKGPVAKAPSQALVQNIGQPTQGSPQPVGQQANNSPPVAQASVGQQTQPLPPPPPQPAQLSVQQQAAQPTRWVAPRNRGSGFGHNGVDGNGVGQSQAGSGSTPSEPHPVLEKLRSINNYNPKDFDWNLKHGRVFIIKSYSEDDIHRSIKYNIWCSTEHGNKRLDAAYRSMNGKGPVYLLFSVNGSGHFCGVAEMKSAVDYNTCAGVWSQDKWKGRFDVRWIFVKDVPNSQLRHIRLENNENKPVTNSRDTQEVPLEKAKQVLKIIASYKHTTSIFDDFSHYEKRQEEEESVKKERQGRGK

SEQ ID NO: 10436 - protein, 935 aa, Homo sapiens
MELRVLLCWASLAAALEETLLNTKLETADLKWVTFPQVDGQWEELSGLDEEQHSVRTYEVCDVQRAPGQAHWLRTGWVPRRGAVHVYATLRFTMLECLSLPRAGRSCKETFTVFYYESDADTATALTPAWMENPYIKVDTVAAEHLTRKRPGAEATGKVNVKTLRLGPLSKAGFYLAFQDQGACMALLSLHLFYKKCAQLTVNLTRFPETVPRELVVPVAGSCVVDAVPAPGPSPSLYCREDGQWAEQPVTGCSCAPGFEAAEGNTKCRACAQGTFKPLSGEGSCQPCPANSHSNTIGSAVCQCRVGYFRARTDPRGAPCTTPPSAPRSVVSRLNGSSLHLEWSAPLESGGREDLTYALRCRECRPGGSCAPCGGDLTFDPGPRDLVEPWVVVRGLRPDFTYTFEVTALNGVSSLATGPVPFEPVNVTTDREVPPAVSDIRVTRSSPSSLSLAWAVPRAPSGAVLDYEVKYHEKGAEGPSSVRFLKTSENRAELRGLKRGASYLVQVRARSEAGYGPFGQEHHSQTQLDESEGWREQLALIAGTAVVGVVLVLVVIVVAVLCLRKQSNGREAEYSDKHGQYLIGHGTKVYIDPFTYEDPNEAVREFAKEIDVSYVKIEEVIGAGEFGEVCRGRLKAPGKKESCVAIKTLKGGYTERQRREFLSEASIMGQFEHPNIIRLEGVVTNSMPVMILTEFMENGALDSFLRLNDGQFTVIQLVGMLRGIASGMRYLAEMSYVHRDLAARNILVNSNLVCKVSDFGLSRFLEENSSDPTYTSSLGGKIPIRWTAPEAIAFRKFTSASDAWSYGIVMWEVMSFGERPYWDMSNQDVINAIEQDYRLPPPPDCPTSLHQLMLDCWQKDRNARPRFPQVVSALDKMIRNPASLKIVARENGGDLLRIGVTLAGHQKKILASVQHMKSQAKPGTPGGTGGPAPQY

SEQ ID NO: 10437 - protein, 987 aa, Homo sapiens
MELRVLLCWASLAAALEETLLNTKLETADLKWVTFPQVDGQWEELSGLDEEQHSVRTYEVCDVQRAPGQAHWLRTGWVPRRGAVHVYATLRFTMLECLSLPRAGRSCKETFTVFYYESDADTATALTPAWMENPYIKVDTVAAEHLTRKRPGAEATGKVNVKTLRLGPLSKAGFYLAFQDQGACMALLSLHLFYKKCAQLTVNLTRFPETVPRELVVPVAGSCVVDAVPAPGPSPSLYCREDGQWAEQPVTGCSCAPGFEAAEGNTKCRACAQGTFKPLSGEGSCQPCPANSHSNTIGSAVCQCRVGYFRARTDPRGAPCTTPPSAPRSVVSRLNGSSLHLEWSAPLESGGREDLTYALRCRECRPGGSCAPCGGDLTFDPGPRDLVEPWVVVRGLRPDFTYTFEVTALNGVSSLATGPVPFEPVNVTTDREVPPAVSDIRVTRSSPSSLSLAWAVPRAPSGAVLDYEVKYHEKGAEGPSSVRFLKTSENRAELRGLKRGASYLVQVRARSEAGYGPFGQEHHSQTQLDESEGWREQLALIAGTAVVGVVLVLVVIVVAVLCLRKQSNGREAEYSDKHGQYLIGHGTKVYIDPFTYEDPNEAVREFAKEIDVSYVKIEEVIGAGEFGEVCRGRLKAPGKKESCVAIKTLKGGYTERQRREFLSEASIMGQFEHPNIIRLEGVVTNSMPVMILTEFMENGALDSFLRLNDGQFTVIQLVGMLRGIASGMRYLAEMSYVHRDLAARNILVNSNLVCKVSDFGLSRFLEENSSDPTYTSSLGGKIPIRWTAPEAIAFRKFTSASDAWSYGIVMWEVMSFGERPYWDMSNQDVINAIEQDYRLPPPPDCPTSLHQLMLDCWQKDRNARPRFPQVVSALDKMIRNPASLKIVARENGGASHPLLDQRQPHYSAFGSVGEWLRAIKMGRYEESFAAAGFGSFELVSQISAEDLLRIGVTLAGHQKKILASVQHMKSQAKPGTPGGTGGPAPQY

SEQ ID NO: 10438 - protein, 1149 aa, Homo sapiens
NSSPLWSLQTDQALKRTQFQKTVSSASGLPTESRHRVHEDRSNMSGTSSHESFYDSLSDMQEESKNTDFFPGLSAFLSQEEINKSLDLARRAIADSETEDFDSEKEISQIFSTSPASLCEHPSHKETKLGEHASRRPQDNRSTPVQPLAEKQTKSISSPVSKRKPAMSPLLTRPSYIRSLRKAEKRGAKTPSTNVKPKTPHQRKGGPQSQLCDKAANLIEELTSIFKAAKPRNRSPNGESSSPDSGYLSPKNQPSALLSASASQSPMEDQGEMEREVKSPGARHCYQDNQDLAVPHNRKSHPQPHSALHFPAAPRFIQKLRSQEVAEGSRVYLECRVTGNPTPRVRWFCEGKELHNTPDIQIHCEGGDLHTLIIAEAFEDDTGRYTCLATNPSGSDTTSAEVFIEGASSTDSDSESLAFKSRAGAMPQAQKKTTSVSLTIGSSSPKTGVTTAVIQPLSVPVQQVHSPTSYLCRPDGTTTAYFPPVFTKELQNTAVAEGQVVVLECRVRGAPPLQVQWFRQGSEIQDSPDFRILQKKPRSTAEPEEICTLVIAETFPEDAGIFTCSARNDYGSATSTAQLVVTSANTENCSYESMGESNNDHFQHFPPPPPILETSSLELASKKPSEIQQVNNPELGLSRAALQMQFNAAERETNGVHPSRGVNGLINGKANSNKSLPTPAVLLSPTKEPPPLLAKPKLGFPKKASRTARIASDEEIQGTKDAVIQDLERKLRFKEDLLNNGQPRLTYEERMARRLLGADSATVFNIQEPEEETANQEYKVSSCEQRLISEIEYRLERSPVDESGDEVQYGDVPVENGMAPFFEMKLKHYKIFEGMPVTFTCRVAGNPKPKIYWFKDGKQISPKSDHYTIQRDLDGTCSLHTTASTLDDDGNYTIMAANPQGRISCTGRLMVQAVNQRGRSPRSPSGHPHVRRPRSRSRDSGDENEPIQERFFRPHFLQAPGDLTVQEGKLCRMDCKVSGLPTPDLSWQLDGKPVRPDSAHKMLVRENGVHSLIIEPVTSRDAGIYTCIATNRAGQNSFSLELVVAAKEAHKPPVFIEKLQNTGVADGYPVRLECRVLGVPPPQIFWKKENESLTHSTDRVSMHQDNHGYICLLIQGATKEDAGWYTVSAKNEAGIVSCTARLDVYISRH

SEQ ID NO: 10439 - protein, 122 aa, Homo sapiens
MAAPVDLELKKAFTELQAKVIDTQQKVKLADIQIEQLNRTKKHAHLTDTEIMTLVDETNMYEGVGRMFILQSKEAIHSQLLEKQKIAEEKIKELEQKKSYLERSVKEAEDNIREMLMARRAQ

SEQ ID NO: 10440 - protein, 493 aa, Homo sapiens
LSASHFTRGRRLAEARDRRGTMGGTQVKCLTSPSPIHSAKSESIITQSEEKADFVIIPAEGIENRTEGTDSPLSRDWRPGSPGTYLETSWEEQLLEQQEYLEKEMEEAKKMISGLQALLLNGSLPEDEQERPLALCEPGVNPEEQLIIIQSRLDQSMEENQDLKKELLKCKQEARNLQGIKDALQQRLTQQDTSVLQLKQELLRANMDKDELHNQNVDLQRKLDERNRLLGEYKKELGQKDRLLQQHQAKLEEALRKLSDVSYHQVDLERELEHKDVLLAHCMKREADEATNYNSHNSQSNGFLLPTAGKGATSVSNRGTSDLQLVRDALRSLRNSFSGHDPQHHTIDSLEQGISSLMERLHVMETQKKQERKVRVKSPRTQVGSEYRESWPPNSKLPHSQSSPTVSSTCTKVLYFTDRSLTPFMVNIPKRLEEVTLKDFKAAIDREGNHRYHFKALDPEFGTVKEEIFHDDDAIPGWEGKIVAWVEEDHGEN

SEQ ID NO: 10441 - protein, 596 aa, Homo sapiens
MILSWLKRTHETPEGKVGGDRCSANFPGERQSLHPEERPEPHAGLTCPTDPSSTKGGLRVEKARFLSGRLASGAGLGRSPAASPRVTAQGGSRGLAEARDRRGTMGGTQVKCLTSPSPIHSAKSESIITQSEEKADFVIIPAEGIENRTGLTTPPGGESSLCYENRRDRFSIISRLAAREPGTYLETSWEEQLLEQQEYLEKEMEEAKKMISGLQALLLNGSLPEDEQERPLALCEPGVNPEEQLNEVMHSEATQMSPSDLTIFGLQKELLKCKQEARNLQGIKDALQQRLTQQDTSVLQLKQELLRANMDKDELHNQNVDLQRKLDERNRLLGEYKKELGQKDRLLQQHQAKLEEALRKLSDVSYHQVDLERELEHKDVLLAHCMKREADEATNYNSHNSQSNGFLLPTAGKGATSVSNRGTSDLQLVRDALRSLRNSFSGHDPQHHTIDSLEQGISSLMERLHVMETQKKQERKVRVKSPRTQVGSEYRESWPPNSKLPHSQSSPTVSSTCTKVLYFTDRSLTPFMVNIPKRLEEVTLKDFKAAIDREGNHRYHFKALDPEFGTVKEEIFHDDDAIPGWEGKIVAWVEEDHGEN

SEQ ID NO: 10442 - protein, 707 aa, Homo sapiens
MSRDRFRSRGGGGGGFHRRGGGGGRGGLHDFRSPPPGMGLNQNRGPMGPGPGQSGPKPPIPPPPPHQQQQQPPPQQPPPQQPPPHQPPPHPQPHQQQQPPPPPQDSSKPVVAQGPGPAPGVGSAPPASSSAPPATPPTSGAPPGSGPGPTPTPPPAVTSAPPGAPPPTPPSSGVPTTPPQAGGPPPPPAAVPGPGPGPKQGPGPGGPKGGKMPGGPKPGGGPGLSTPGGHPKPPHRGGGEPRGGRQHHPPYHQQHHQGPPPGGPGGRSEEKISDSEGFKANLSLLRRPGEKTYTQRCRLFVGNLPADITEDEFKRLFAKYGEPGEVFINKGKGFGFIKLESRALAEIAKAELDDTPMRGRQLRVRFATHAAALSVRNLSPYVSNELLEEAFSQFGPIERAVVIVDDRGRSTGKGIVEFASKPAARKAFERCSEGVFLLTTTPRPVIVEPLEQLDDEDGLPEKLAQKNPMYQKERETPPRFAQHGTFEYEYSQRWKSLDEMEKQQREQVEKNMKDAKDKLESEMEDAYHEHQANLLRQDLMRRQEELRRMEELHNQEMQKRKEMQLRQEEERRRREEEMMIRQREMEEQMRRQREESYSRMGYMDPRERDMRMGGGGAMNMGDPYGSGGQKFPPLGGGGGIGYEANPGVPPATMSGSMMGSDMRTERFGQGGAGPVGGQGPRGMGPGTPAGYGRGREEYEGPNKKPRF

SEQ ID NO: 10443 - protein, 669 aa, Homo sapiens
MSRDRFRSRGGGGGGFHRRGGGGGRGGLHDFRSPPPGMGLNQNRGPMGPGPGQSGPKPPIPPPPPHQQQQQPPPQQPPPQQPPPHQPPPHPQPHQQQQPPPPPQDSSKPVVAQGPGPAPGVGSAPPASSSAPPATPPTSGAPPGSGPGPTPTPPPAVTSAPPGAPPPTPPSSGVPTTPPQAGGPPPPPAAVPGPGPGPKQGPGPGGPKGGKMPGGPKPGGGPGLSTPGGHPKPPHRGGGEPRGGRQHHPPYHQQHHQGPPPGGPGGRSEEKISDSEGFKANLSLLRRPGEKTYTQRCRLFVGNLPADITEDEFKRLFAKYGEPGEVFINKGKGFGFIKLESRALAEIAKAELDDTPMRGRQLRVRFATHAAALSVRNLSPYVSNELLEEAFSQFGPIERAVVIVDDRGRSTGKGIVEFASKPAARKAFERCSEGVFLLTTTPRPVIVEPLEQLDDEDGLPEKLAQKNPMYQKERETPPRFAQHGTFEYEYSQRWKSLDEMEKQQREQVEKNMKDAKDKLESEMEDAYHEHQANLLRQDLMRRQEELRRMEELHNQEMQKRKEMQLRQEEERRRREEEMMIRQREMEEQMRRQREESYSRMGYMDPRERDMRMGGGGAMNMGDPYGSGGQKFPPLGGGGGIGYEANPGVPPATMSGSMMGSDMVRMIDVG

SEQ ID NO: 10444 - protein, 583 aa, Homo sapiens
MAGDGRRAEAVREGWGVYVTPRAPIREGRGRLAPQNGGSSDAPAYRTPPSRQGRREVRFSDEPPEVYGDFEPLVAKERSPVGKRTRLEEFRSDSAKEEVRESAYYLRSRQRRQPRPQETEEMKTRRTTRLQQQHSEQPPLQPSPVMTRRGLRDSHSSEEDEASSQTDLSQTISKKTVRSIQEAPVSEDLVIRLRRPPLRYPRYEATSVQQKVNFSEEGETEEDDQDSSHSSVTTVKARSRDSDESGDKTTRSSSQYIESFWQSSQSQNFTAHDKQPSVLSSGYQKTPQEWAPQTARIRTRMQNDSILKSELGNQSPSTSSRQVTGQPQNASFVKRNRWWLLPLIAALASGSFWFFSTPEVETTAVQEFQNQMNQLKNKYQGQDEKLWKRSQTFLEKHLNSSHPRSQPAILLLTAARDAEEALRCLSEQIADAYSSFRSVRAIRIDGTDKATQDSDTVKLEVDQELSNGFKNGQNAAVVHRFESFPAGSTLIFYKYCDHENAAFKDVALVLTVLLEEETLGTSLGLKEVEEKVRDFLKVKFTNSNTPNSYNHMDPDKLNGLWSRISHLVLPVQPENALKRGICL

SEQ ID NO: 10445 - protein, 770 aa, Homo sapiens [sequence omitted]

SEQ ID NO: 10446 - protein, 552 aa, Homo sapiens
MSNEVETSATNGQPDQQAAPKAPSKKEKKKGPEKTDEYLLARFKGDGVKYKAKLIGIDDVPDARGDKMSQDSMMKLKGMAARGRSQGQHKQRIWVNISLSGIKIIDEKTGVIEHEHPVNKISFIARDVTDNRAFGYVCGGEGQHQFFAIKTGQQAEPLVVDLKDLFQVIYNVKKKEEEKKKIEEASKAVENGSEALMILDDQTNKLKSGVDQMDLFGDMSTPPDLNSPTSSANDLLASDIFAPPVSEPSGQASPTGQPTALQPNPLDLFKTSAPAPVGPLVGLGGVTVTLPQAGPWNTASLVFNQSPSMAPGAMMGGQPSGFSQPVIFGTSPAVSGWNQPSPFAASTPPPVPVVWGPSASVAPNAWSTTSPLGNPFQSNIFPAPAVSTQPPSMHSSLLVTPPQPPPRAGPPKDISSDAFTALDPLGDKEIKDVKEMFKDFQLRQPPAVPARKGEQTSSGTLSAFASYFNSKVGIPQENADHDDFDANQLLNKINEPPKPAPRQVSLPVTKSTDNAFENPFFKDSFGSSQASVASSQPVSSEMYRDPFGNPFA

SEQ ID NO: 10447 - protein, 976 aa, Homo sapiens
MELQAARACFALLWGCALAAAAAAQGKEVVLLDFAAAGGELGWLTHPYGKGWDLMQNIMNDMPIYMYSVCNVMSGDQDNWLRTNWVYRGEAERNNFELNFTVRDCNSFPGGASSCKETFNLYYAESDLDYGTNFQKRLFTKIDTIAPDEITVSSDFEARHVKLNVEERSVGPLTRKGFYLAFQDIGACVALLSVRVYYKKCPELLQGLAHFPETIAGSDAPSLATVAGTCVDHAVVPPGGEEPRMHCAVDGEWLVPIGQCLCQAGYEKVEDACQACSPGFFKFEASESPCLECPEHTLPSPEGATSCECEEGFFRAPQDPASMPCTRPPSAPHYLTAVGMGAKVELRWTPPQDSGGREDIVYSVTCEQCWPESGECGPCEASVRYSEPPHGLTRTSVTVSDLEPHMNYTFTVEARNGVSGLVTSRSFRTASVSINQTEPPKVRLEGRSTTSLSVSWSIPPPQQSRVWKYEVTYRKKGDSNSYNVRRTEGFSVTLDDLAPDTTYLVQVQALTQEGQGAGSKVHEFQTLSPEGSGNLAVIGGVAVGVVLLLVLAGVGFFIHRRRKNQRARQSPEDVYFSKSEQLKPLKTYVDPHTYEDPNQAVLKFTTEIHPSCVTRQKVIGAGEFGEVYKGMLKTSSGKKEVPVAIKTLKAGYTEKQRVDFLGEAGIMGQFSHHNIIRLEGVISKYKPMMIITEYMENGALDKFLREKDGEFSVLQLVGMLRGIAAGMKYLANMNYVHRDLAARNILVNSNLVCKVSDFGLSRVLEDDPEATYTTSGGKIPIRWTAPEAISYRKFTSASDVWSFGIVMWEVMTYGERPYWELSNHEVMKAINDGFRLPTPMDCPSAIYQLMMQCWQQERARRPKFADIVSILDKLIRAPDSLKTLADFDPRVSIRLPSTSGSEGVPFRTVSEWLESIKMQQYTEHFMAAGYTAIEKVVQMTNDDIKRIGVRLPGHQKRIAYSLLGLKDQVNTVGIPI

SEQ ID NO: 10448 - protein, 976 aa, Homo sapiens
MELQAARACFALLWGCALAAAAAAQGKEVVLLDFAAAGGELGWLTHPYGKGWDLMQNIMNDMPIYMYSVCNVMSGDQDNWLRTNWVYRGEAERIFIELKFTVRDCNSFPGGASSCKETFNLYYAESDLDYGTNFQKRLFTKIDTIAPDEITVSSDFEARHVKLNVEERSVGPLTRKGFYLAFQDIGACVALLSVRVYYKKCPELLQGLAHFPETIAGSDAPSLATVAGTCVDHAVVPPGGEEPRMHCAVDGEWLVPIGQCLCQAGYEKVEDACQACSPGFFKFEASESPCLECPEHTLPSPEGATSCECEEGFFRAPQDPASMPCTRPPSAPHYLTAVGMGAKVELRWTPPQDSGGREDIVYSVTCEQCWPESGECGPCEASVRYSEPPHGLTRTSVTVSDLEPHMNYTFTVEARNGVSGLVTSRSFRTASVSINQTEPPKVRLEGRSTTSLSVSWSIPPPQQSRVWKYEVTYRKKGDSNSYNVRRTEGFSVTLDDLAPDTTYLVQVQALTQEGQGAGSKVHEFQTLSPEGSGNLAVIGGVAVGVVLLLVLAGVGFFIHRRRKNQRARQSPEDVYFSKSEQLKPLKTYVDPHTYEDPNQAVLKFTTEIHPSCVTRQKVIGAGEFGEVYKGMLKTSSGKKEVPVAIKTLKAGYTEKQRVDFLGEAGIMGQFSHHNIIRLEGVISKYKPMMIITEYMENGALDKFLREKDGEFSVLQLVGMLRGIAAGMKYLANMNYVHRDLAARNILVNSNLVCKVSDFGLSRVLEDDPEATYTTSGGKIPIRWTAPEAISYRKFTSASDVWSFGIVMWEVMTYGERPYWELSNHEVMKAINDGFRLPTPMDCPSAIYQLMMQCWQQERARRPKFADIVSILDKLIRAPDSLKTLADFDPRVSIRLPSTSGSEGVPFRTVSEWLESIKMQQYTEHFMAAGYTAIEKVVQMTNDDIKRIGVRLPGHQKRIAYSLLGLKDQVNTVGIPI

SEQ ID NO: 10449 - protein, 345 aa, Homo sapiens
MVAALLGGGGEARGGTVPGAWLCLMALLQLLGSAPRGSGLAHGRRLICWQALLQCQGEPECSYAYNQYAEACAPVLAQHGGGDAPGAAAAAFPASAASFSSRWRCPSHCISALIQLNHTRRGPALEDCDCAQDENCKSTKRAIEPCLPRTSGGGAGGPGAGGVMGCTEARRRCDRDSRCNLALSRYLTYCGKVFNGLRCTDECRTVIEDMLAMPKVALLNDCVCDGLERPICESVKENMARLCFGAELGNGPGSSGSDGGLDDYYDEDYDDEQRTGGAGGEQPLDDDDGVPHPPRPGSGAAASGGRGDLPYGPGRRSSGGGGRLAPRGAWTPLASILLLLLGPLF

SEQ ID NO: 10450 - protein, 223 aa, Homo sapiens
MKLHYVAVLTLAILMFLTWLPESLSCNKALCASDVSKCLIQELCQCRPGEGNCSCCKECMLCLGALWDECCDCVGMCNPRNYSDTPPTSKSTVEELHEPIPSLFRALTEGDTQLNWNIVSFPVAEELSHHENLVSFLETVNQPHHQNVSVPSNNVHAPYSSDKEHMCTVVYFDDCMSIHQCKISCESMGASKYRWFHNACCECIGPECIDYGSKTVKCMNCMF

SEQ ID NO: 10451 - protein, 274 aa, Homo sapiens
MIISHFPKCVAVFALLALSVGALDTFIAAVYEHAVILPNRTETPVSKEEALLLMNKNIDVLEKAVKLAAKQGAHIIVTPEDGIYGWIFTRESIYPYLEDIPDPGVNWIPCRDPWRFGNTPVQQRLSCLAKDNSIYVVANIGDKKPCNASDSQCPPDGRYQYNTDVVFDSQGKLLARYHKYNLFAPEIQFDFPKDSELVTFDTPFGKFGIFTCFDIFSHDPAVVVVDEFQLTAFSTPQHGTTRCPSSRLFPSIQHGPRPWESIYLLQIPTTPACT

SEQ ID NO: 10452 - protein, 314 aa, Homo sapiens
MLGIWTLLPLVLTSVARLSSKSVNAQVTDINSKGLELRKTVTTVETQNLEGLHHDGQFCHKPCPPGERKARDCTVNGDEPDCVPCQEGKEYTDKAHFSSKCRRCRLCDEGHGLEVEINCTRTQNTKCRCKPNFFCNSTVCEHCDPCTKCEHGIIKECTLTSNTKCKEEVKRKEVQKTCRKHRKENQGSHESPTLNPETVAINLSDVDLSKYITTIAGVMTLSQVKGFVRKNGVNEAKIDEIKNDNVQDTAEQKVQLLRNWHQLHGKKEAYDTLIKDLKKANLCTLAEKIQTIILKDITSDSENSNFRNEIQSLV

SEQ ID NO: 10453 - protein, 220 aa, Homo sapiens
MLGIWTLLPLVLTSVARLSSKSVNAQVTDINSKGLELRKTVTTVETQNLEGLHHDGQFCHKPCPPGERKARDCTVNGDEPDCVPCQEGKEYTDKAHFSSKCRRCRLCDEGHGLEVEINCTRTQNTKCRCKPNFFCNSTVCEHCDPCTKCEHGIIKECTLTSNTKCKEEGSRSNLGWLCLLLLPIPLIVWVKRKEVQKTCRKHRKENQGSHESPTLNPMLT

SEQ ID NO: 10454 - protein, 387 aa, Homo sapiens
LGWSLRGGHWHGTHPEASPGCPGGAASSPAGWWTRSVRSWGSSFTSEDCSTTMLGIWTLLPLVLTSVARLSSKSVNAQVTDINSKGLELRKTVTTVETQNLEGLHHDGQFCHKPCPPGERKARDCTVNGDEPDCVPCQEGKEYTDKAHFSSKCRRCRLCDEGHGLEVEINCTRTQNTKCRCKPNFFCNSTVCEHCDPCTKCEHGIIKECTLTSNTKCKEEGSRSNLGWLCLLLLPIPLIVWVKRKEVQKTCRKHRKENQGSHESPTLNPETVAINLSDVDLSKYITTIAGVMTLSQVKGFVRKNGVNEAKIDEIKNDNVQDTAEQKVQLLRNWHQLHGKKEAYDTLIKDLKKANLCTLAEKIQTIILKDITSDSENSNFRNEIQSLV

SEQ ID NO: 10455 - protein, 2448 aa, Homo sapiens
MSVGRRKLALLWALALALACTRHTGHAQDGSSESSYKHHPALSPIARGPSGVPLRGATVFPSLRTIPVVRASNPAHNGRVCSTWGSFHYKTFDGDVFRFPGLCNYVFSEHCGAAYEDFNIQLRRSQESAAPTLSRVLMKVDGVVIQLTKGSVLVNGHPVLLPFSQSGVLIQQSSSYTKVEARLGLVLMWNHDDSLLLELDTKYANKTCGLCGDFNGMPVVSELLSHNTKLTPMEFGNLQKMDDPTEQCQDPVPEPPRNCSTGFGICEELLHGQLFSGCVALVDVGSYLEACRQDLCFCEDTDLLSCVCHTLAEYSRQCTHAGGLPQDWRGPDFCPQKCPNNMQYHECRSPCADTCSNQEHSRACEDHCVAGCFCPEGTVLDDIGQTGCVPVSKCACVYNGAAYAPGATYSTDCTNCTCSGGRWSCQEVPCPDTCSVLGGAHFSTFDGKQYTVHGDCSYVLTKPCDSSAFTVLAELRRCGLTDSETCLKSVTLSLDGAQTVVVIKASGEVFLNQIYTQLPISAANVTIFRPSTFFIIAQTSLGLQLNLQPVPTMQLFMQLAPKLRGQTCGLCGNFNSIQADDFRTLSGVVEATAAAFFNTFKTQAACPNIRNSFEDPCSLSVENEKYAQHWCSQLTDADGPFGRCHAAVKPGTYYSNCVFDTCNCERSEDCLCAALSSYVHACAAKGVQLGGWRDGVCTKPMTTCPKSMTYHYHVSTCQPTCRSLSEGDITCSVGFIPVDGCICPKGTFLDDTGKCVQASNCPCYHRGSMIPNGESVHDSGAICTCTHGKLSCIGGQAPAPVCAAPMVFFDCRNATPGDTGAGCQKSCHTLDMTCYSPQCVPGCVCPDGLVADGEGGCITAEDCPCVHNEASYRAGQTIRVGCNTCTCDSRMWRCTDDPCLATCAVYGDGHYLTFDGQSYSFNGDCEYTLVQNHCGGKDSTQDSFRVVTENVPCGTTGTTCSKAIKIFLGGFELKLSHGKVEVIGTDESQEVPYTIQQMGIYLVVDTDIGLVLLWDKKTSIFINLSPEFKGRVCGLCGNFDDIAVNDFATRSRSVVGDVLEFGNSWKLSPSCPDALAPKDPCTANPFRKSWAQKQCSILHGPTFAACHAHVEPARYYEACVNDACACDSGGDCECFCTAVAAYAQACHEVGLCVCLRTPSICPLFCDYYNPEGQCEWHYQPCGVPCLRTCRNPRGDCLRDVRGLEGCYPKCPPEAPIFDEDKMQCVATCPTPPLPPRCHVHGKSYRPGAVVPSDKNCQSCLCTERGVECTYKAEACVCTYNGQRFHPGDVIYHTTDGTGGCISARCGANGTIERRVYPCSPTTPVPPTTFSFSTPPLVVSSTHTPSNGPSSAHTGPPSSAWPTTAGTSPRTRLPTASASLPPVCGEKCLWSPWMDVSRPGRGTDSGDFDTLENLRAHGYRVCESPRSVECRAEDAPGVPLRALGQRVQCSPDVGLTCRNREQASGLCYNYQIRVQCCTPLPCSTSSSPAQTTPPTTSKTTETRASGSSAPSSTPGTVSLSTARTTPAPGTATSVKKTFSTPSPPPVPATSTSSMSTTAPGTSVVSSKPTPTEPSTSSCLQELCTWTEWIDGSYPAPGINGGDFDTFQNLRDEGYTFCESPRSVQCRAESFPNTPLADLGQDVICSHTEGLICLNKNQLPPICYNYEIRIQCCETVNVCRDITRLPKTVATTRPTPHPTGAQTQTTFTTHMPSASTEQPTATSRGGPTATSVTQGTHTTLVTRNCHPRCTWTKWFDVDFPSPGPHGGDKETYNNIIRSGEKICRRPEEITRVQCRAKSHPEVSIEHLGQVVQCSREEGLVCRNQDQQGPFKMCLNYEVRVLCCETPRGCHMTSTPGSTSSSPAQTTPSTTSKTTEIQASGSSAPSSTPGTVSLSTARTTPAPGTATSVKKTFSTPSPPPVPATSTSSMSTTAPGTSVVSSKPTPTEPSTSSCLQELCTWTEWIDGSYPAPGINGGDFDTFQNLRDEGYTFCESPRSVQCRAESFPNTPLGRLGQDVICSHTEGLICLNKNQLPPICYNYEIRIQCCETVNVCRDITRPPKTVATTRPTPHPTGAQTQTTFTTHMPSASTEQPTATSRGGPTATSVTQGTHTTPVTRNCHPRCTWTTWFDVDFPSPGPHGGDKETYNNIIRSGEKICRRPEEITRLQCRAKSHPEVSIEHLGQVVQCSREEGLVCRNQDQQGPFKMCLNIEVRVLCCETPKGCPVTSTPVTAPSTPSGRAISPTQSTSSWQKSRTTTLVTTSTTSTPQTSTTYAHTTSTTSAPTARTTSAPTTSTTSVPTTSTISGPKTTPSPVPTTSTTSAATTSTISAPTTSTTSVPGTTPSPVLTTSTTSAPTTRTTSASPAGTTSGPGNTPSPVPTTSTISAPTTSITSAPTTSTTSAPTSSTTSGPGTTPSPVPTTSITSAPTTSTTSAPTTSTTSAPTTSTTSAP

SEQ ID NO: 10456 - protein, 1373 aa, Homo sapiens
MSVGRRKLALLWALALALACTRHTGHAQDGSSESSYKHHPALSPIARGPIGVPLRGATVFPSLRTIPVVRASNPAHNGRVCSTWGSFHYKTFDGDVFRFPGLCNYVFSEHCGAAYEDFNIPATPQPGVSGPHAEQGPHEGGWRGHPADQGLRPGQRPPGPAALQPVWGPHSARAAATPRWKPGWALSSCGTTMTACCWKLDTKYANKNLWALWGLQRDARGQRAPLPQHQADTHGIREPAERWTNPRSSVRTLSLNPRRTAPLALASCEELLHGQLFSGCVALVDVGSYLEACRQDLCFCEDTDLLSCVCHTLAEYSRQCTHAGGLPQDWRGPDFCPQKCPNNMQYHECRSPCADTCSNQEHSRACEDHCVAGCFCPEGTVLDDIGQTGCVPVSKCACVYNGAAYAPGATYSTDCTNCTCSGGRWSCQEVPCPGTCSVLGGAHFSTFDGKQYTVHGDCSYVLTKPCDSSAFTVLAELRRCGLTDSETCLKSVTLSLDGAQTVVVIKASGEVFLNQIYTQLPISAANVTIFRPSTFFIIAQTSLGLQLNLQLVPTMQLFMQLAPKLRGQTCGLCGNFNSIQADDFRTLSGVVEATAAAFFNTFKTQAACPNIRNSFEDPCSLSVENEKYAQHWCSQLTDADGPFGRCHAAVKPGTYYSNCMFDTCNCERSEDCLCAALSSYVHACAAKGVQLGGWRDGVCTKPMTTCPKSMTYHYHVSTCQPTCRSLSEGDITCSVGFIPVDGCICPKGTFLDDTGKCVQASNCPCYHRGSMIPNGESVHDSGAICTCTHGKLSCIGGQAPAPVCAAPMVFFDCRNATPGDTGAGCQKSCHTLDMTCYSPQCVPGCVCPDGLVADGEGGCITAEDCPCVHNEASYRAGQTIRVGCNTCTCDSRMWRCTDDPCLATCAVYGDGHYLTFDGQSYSFNEETASTRWCRTAVAGKTAPRTPFVLSPRTSPAAPQGPPAPRPSRFSWGNFELKLSHGKVEVIGTDESQEVPYTIRQMGIYLVVDTDIGLVLLWDKKTSIFINLSPEFKGRVCGLCGNFDDIAVNDFATRSRSVVGDVLEFGNSWKLSPSCPDALAPKDPCTANPFRKSWAQKQCSILHGPTFAACHAHVEPARYYEACVNDACACDSGGDCECFCTAVARYAQACHEVGTCVCLRTPSICPLFCDYYNPEGQCEWHYQPCGVPCLRTCRNPRGDCLRDVRGLEGCYPKCPPEAPIFDEDKMQCVATCPTPPLPPRCHVHGKSYRPGAVVPSDKNCQSCLCTERGVECTYKAEACVCTYNGQRFHPGDVIYHTTDGTGGCISARCGANGTIERRVYPCSPTTPVPPTTFSFSTPPLVVSSTHTPSNGPSSAHTGPPSSAWPTTAGTSPRT

SEQ ID NO: 10457 - protein, 193 aa, Homo sapiens
MQSLMQAPLLIALGLLLATPAQAHLKKPSQLSSFSWDNCDEGKDPAVIRSLTLEPDPIVVPGNVTLSVVGSTSVPLSSPLKVDLVLEKEVAGLWIKIPCTDYIGSCTFEHFCDVLDMLIPTGEPCPEPLRTYGLPCHCPFKEGTYSLPKSEFVVPDLELPSWLTTGNYRIESVLSSSGKRLGCIKIAASLKGI

SEQ ID NO: 10458 - protein, 1722 aa, Homo sapiens
MRTGWATPRRPAGLLMLLFWFFDLAEPSGRAANDPFTIVHGNTGKCIKPVYGWIVADDCDETEDKLWKWVSQHRLFHLHSQKCLGLDITKSVNELRMFSCDSSAMLWWKCEHHSLYGAARYRLALKDGHGTAISNASDVWKKGGSEESLCDQPYHEIYTRDGNSYGRPCEFPFLIDGTWHHDCILDEDHSGPWCATTLNYEYDRKWGICLKPENGCEDNWEKNEQFGSCYQFNTQTALSWKEAYVSCQNQGADLLSINSAAELTYLKEKEGIAKIFWIGLNQLYSARGWEWSDHKPLNFLNWDPDRPSAPTIGGSSCARMDAESGLWQSFSCEAQLPYVCRKPLNNTVELTDVWTYSDTRCDAGWLPNNGFCYLLVNESNSWDKAHAKCKAFSSDLISIHSLADVEVVVTKLHNEDIKEEVWIGLKNINIPTLFQWSDGTEVTLTYWDENEPNVPYNKTPNCVSYLGELGQWKVQSCEEKLKYVCKRKGEKLNDASSDKMCPPDEGWKRHGETCYKIYEDEVPFGTNCNLTITSRFEQEYLNDLMKKYDKSLRKYFWTGLRDVDSCGEYNWATVGGRRRAVTFSNWNFLEPASPGGCVAMSTGKSVGKWEVKDCRSFKALSICKKMSGPLGPEEASPKPDDPCPEGWQSFPASLSCYKVFHAERIVRKRNWEEAERFCQALGAHLSSFSHVDEIKEFLHFLTDQFSGQHWLWIGLNKRSPDLQGSWQWSDRTPVSTIIMPNEFQQDYDIRDCAAVKVFHRPWRRGWHFYDDREFIYLRPFACDTKLEWVCQIPKGRTPKTPDWYNPDRAGIHGPPLIIEGSEYWFVADLHLNYEEAVLYCASNHSFLATITSFVGLKAIKNKIANISGDGQKWWIRISEWPIDDHFTYSRYPWHRFPVTFGEECLYMSAKTWLIDLGKPTDCSTKLPFICEKYNVSSLEKYSPDSAAKVQCSEQWIPFQNKCFLKIKPVSLTFSQASDTCHSYGGTLPSVLSQIEQDFITSLLPDMEATLWIGLRWTAYEKINKWTDNRELTYSNFHPLLVSGRLRIPENFFEEESRYHCALILNLQKSPFTGTWNFTSCSERHFVSLCQKYSEVKSRQTLQNASETVKYLNNLYKIIPKTLTWHSAKRECLKSNMQLVSITDPYQQAFLSVQALLHNSSLWIGLFSQDDELNFGWSDGKRLHFSRWAETNGQLEDCVVLDTDGFWKTVDCNDNQPGAICYYSGNETEKEVKPVDSVKCPSPVLNTPWIPFQNCCYNFIITKNRHMATTQDEVHTKCQKLNPKSHILSIRDEKENNFVLEQLLYFNYMASWVMLGITYRNNSLMWFDKTPLSYTHWRAGRPTIKNEKFLAGLSTDGFWDIQTFKVIEEAVYFHQHSILACKIEMVDYKEEHNTTLPQFMPYEDGIYSVIQKKVTWYEALNMCSQSGGHLASVHNQNGQLFLEDIVKRDGFPLWVGLSSHDGSESSFEWSDGSTFDYIPWKGQTSPGNCVLLDPKGTWKHEKCNSVKDGAICYKPTKSKKLSRLTYSSRCPAAKENGSRWIQYKGHCYKSDQALHSFSEAKKLCSKHDHSATIVSIKDEDENKFVSRLMRENNNITMRVWLGLSQHSVDQSWSWLDGSEVTFVKWENKSKSGVGRCSMLIASNETWKKVECEHGFGRVVCKVPLGPDYTAIAIIVATLSILVLMGGLIWFLFQRHRLHLAGFSSVRYAQGVNEDEIMLPSFHD

SEQ ID NO: 10459 - protein, 331 aa, Homo sapiens
MASALWTVLPSRMSLRSLKWSLLLLSLLSFFVMWYLSLPHYNVIERVNWMYFYEYEPIYRQDFHFTLREHSNCSHQNPFLVILVTSHPSDVKARQAIRVTWGEKKSWWGYEVLTFFLLGQEAEKEDKMLALSLEDEHLLYGDIIRQDFLDTYNNLTLKTIMAFRWVTEFCPNAKYVMKTDTDVFINTGNLVKYLLNLNHSEKFFTGYPLIDNYSYRGFYQKTHISYQEYPFKVFPPYCSGLGYIMSRDLVPRIYEMMGHVKPIKFEDVYVGICLNLLKVNIHIPEDTNLFFLYRIHLDVCQLRRVIAAHGFSSKEIITFWQVMLRNTTCHY

SEQ ID NO: 10460 - protein, 373 aa, Homo sapiens
MSLLLLLLLVSYYVGTLGTHTEIKRVAEEKVTLPCHHQLGLPEKDTLDIEWLLTDNEGNQKVVITYSSRHVYNNLTEEQKGRVAFASNFLAGDASLQIEPLKPSDEGRYTCKVKNSGRYVWSHVILKVLVRPSKPKCELEGELTEGSDLTLQCESSSGTEPIVYYWQRIREKEGEDERLPPKSRIDYNHPGRVLLQNLTMSYSGLYQCTAGNEAGKESCVVRVTVQYVQSIGMVAGAVTGIVAGALLIFLLVWLLIRRKDKERYEEEERPNEIREDAEAPKARLVKPSSSSSGSRSSRSGSSSTRSTANSASRSQRTLSTDAAPQPGLATQAYSLVGPEVRGSEPKKVHHANLTKAETTPSMIPSQSRAFQTV

SEQ ID NO: 10461 - protein, 467 aa, Homo sapiens
MLLLLLLPLLWGRERVEGQKSNRKDYSLTMQSSVTVQEGMCVHVRCSFSYPVDSQTDSDPVHGYWFRAGNDISWKAPVATNNPAWAVQEETRDRFHLLGDPQTKNCTLSIRDARMSDAGRYFFRMEKGNIKWNYKYDQLSVNVTALTHRPNILIPGTLESGCFQNLTCSVPWACEQGTPPMISWMGTSVSPLHPSTTRSSVLTLIPQPQHHGTSLTCQVTLPGAGVTTNRTIQLNVSYPPQNLTVTVFQGEGTASTALGNSSSLSVLEGQSLRLVCAVDSNPPARLSWTWRSLTLYPSQPSNPLVLELQVHLGDEGEFTCRAQNSLGSQHVSLNLSLQQEYTGKMRPVSGVLLGAVGGAGATALVFLSFCVIFIVVRSCRKKSARPAADVGDIGMKDANTIRGSASQGNLTESWADDNPRHHGLAAHSSGEEREIQYAPLSFHKGEPQDLSGQEATNNEYSEIKIPK

SEQ ID NO: 10462 - protein, 374 aa, Homo sapiens
MLLLLLLPLLWGRERVEGQKSNRKDYSLTMQSSVTVQEGMCVHVRCSFSYPVDSQTDSDPVHGYWFRAGNDISWKAPVATNNPAWAVQEETRDRFHLLGDPQTKNCTLSIRDARMSDAGRYFFRMEKGNIKWNYKYDQLSVNVTDPPQNLTVTVFQGEGTASTALGNSSSLSVLEGQSLRLVCAVDSNPPARLSWTWRSLTLYPSQPSNPLVLELQVHLGDEGEFTCRAQNSLGSQHVSLNLSLQQEYTGKMRPVSGVLLGAVGGAGATALVFLSFCVIFIVVRSCRKKSARPAADVGDIGMKDANTIRGSASQGNLTESWADDNPRHHGLAAHSSGEEREIQYAPLSFHKGEPQDLSGQEATNNEYSEIKIPK

SEQ ID NO: 10463 - protein, 788 aa, Homo sapiens
MARQPPPPWVHAAFLLCLLSLGGAIEIPMDPSIQNELTQPPTITKQSAKDHIVDPRDNILIECEAKGNPAPSFHWTRNSRFFNIAKDPRVSMRRRSGTLVIDFRSGGRPEEYEGEYQCFARNKFGTALSNRIRLQVSKSPLWPKENLDPVVVQEGAPLTLQCNPPPGLPSPVIFWMSSSMEPITQDKRVSQGHNGDLYFSNVMLQDMQTDYSCNARFHFTHTIQQKNPFTLKVLTTRGVAERTPSFMYPQGTASSQMVLRGMDLLLECIASGVPTPDIAWYKKGGDLPSDKAKFENFNKALRITNVSEEDSGEYFCLASNKMGSIRHTISVRVKAAPYWLDEPKNLILAPGEDGRLVCRANGNPKPTVQWMVNGEPLQSAPPNPNREVAGDTIIFRDTQISSRAVYQCNTSNEHGYLLANAFVSVLDVPPRMLSPRNQLIRVILYNRTRLDCPFFGSPIPTLRWFKNGQGSNLDGGNYHVYENGSLEIKMIRKEDQGIYTCVATNILGKAENQVRLEVKDPTRIYRMPEDQVARRGTTVQLECRVKHDPSLKLTVSWLKDDEPLYIGNRMKKEDDSLTIFGVAERDQGSYTCVASTELDQDLAKAYLTVLGNCPCSPWHTYTLRVYSRDNEGISSTVITFMTSTAYTNNQADIATQGWFIGLMCAIALLVLILLIVCFIKRSRGGKYPVREKKDVPLGPEDPKEEDGSFDYSDEDNKPLQGSQTSLDGTIKQQESDDSLVDYGEGGEGQFNEDGSFIGQYTVKKDKEETEGNESSEATSPVNAIYSLA

SEQ ID NO: 10464 - protein, 276 aa, Homo sapiens
MRAPHLHLSAASGARALAKLLPLLMAQLWAAEAALLPQNDTRLDPEAYGAPCARGSQPWQVSLFNGLSFHCAGVLVDQSWVLTAAHCGNKPLWARVGDDHLLLLQGEQLRRTTRSVVHPKYHQGSGPILPRRTDEHDLMLLKLARPVVPGPRVRALQLPYRCAQPGDQCQVAGWGTTAARRVKYNKGLTCSSITILSPKECEVFYPGVVTNNMICAGLDRGQDPCQSDSGGPLVCDETLQGILSWGVYPCGSAQHPAVYTQICKYMSWINKVIRSN

SEQ ID NO: 10465 - protein, 2013 aa, Homo sapiens
MTAWRRFQSLLLLLGLLVLCARLLTAAKGQNCGGLVQGPNGTIESPGFPHGYPNYANCTWIIITGERNRIQLSFHTFALEENFDILSVYDGQPQQGNLKVRLSGFQLPSSIVSTGSILTLWFTTDFAVSAQGFKALYEVLPSHTCGNPGEILKGVLHGTRFNIGDKIRYSCLPGYILEGHAILTCIVSPGNGASWDFPAPFCRAEGACGGTLRGTSSSISSPHFPSEYENNADCTWTILAEPGDTIALVFTDFQLEEGYDFLEISGTEAPSIWLTGMNLPSPVISSKNWLRLHFTSDSNHRRKGFNAQFQVKKAIELKSRGVKMLPSKDGSHKNSVLSQGGVALVSHMCLDPGIPENGRRAGSDFSRVGANVQFSCEDNYVLQGSKSITCQRVTETLAAWSDHRPICRARTCGSNLRGPSGVITSPNYPVQYEDNAHCVWVITTTDPDKVIKLAFEEFELERGYDTLTVGDAGKVGDTRSVLYVLTGSSVPDLIVSMSNQMWLHLQSDDSIGSPGFKAVYQEIEKGGCGDPGIPAYGKRTGSSFLHGDTLTFECPAAFELVGERVITCQQNNQWSGNKPSCVFSCFFNFTASSGIILSPNYPEEYGNNMNCVWLIISEPGSRIHLIFNDFDVEPQFDFLAVKDDGISDITVLGTFSGNEVPSQLASSGHIVRLEFQSDHSTTGRGFNITYTTFGQNECHDPGIPINGRRFGDRFLLGSSVSFHCDDGFVKTQGSESITCILQDGNVVWSSTVPRCEAPCGGHLTASSGVILPPGWPGYYKDSLHCEWIIEAKPGHSIKMTFDRFQTEVNYDTLEVRDGPASSSPLIGEYHGTQAPQFLISTGNFMYLLFTTDNSRSSIGFLIHYESVTLESDSCLDPGIPVNGHRHGGDFGIRSTVTFSCDPGYTLSDDEPLVCERNHQWNHALPSCDALCGGYIQGKSGTVLSPGFPDFYPNSLNCTWTIEVSHGKGVQMIFHTFHLESSHDYLLITEDGSFSEPVARLTGSVLPHTIKAGLFGNFTAQLRFISDFSISYEGFNITFSEYDLEPCDDPGVPAFSRRIGFHFGVGDSLTFSCFLGYRLEGATKLTCLGGGRRVWSAPLPRCVAECGASVKGNEGTLLSPNFPSNYDNTHECIYKIETEAGKGIHLRTRSFQLFEGDTLKVYDGKDSSSRPLGTFTKNELLGLILNSTSNHLWLEFNTNGSDTDQGFQLTYTSFDLVKCEDPGIPNYGYRIRDEGHFTDTVVLYSCNPGYAMHGSNTLTCLSGDRRVWDKPLPSCIAECGGQIHAATSGRILSPGYPAPYDNNLHCTWIIEADPGKTISLHFIVFDTEMAHDILKVWDGPVDSDILLKEWSGSALPEDIHSTFNSLTLQFDSDFFISKSGFSIQFSTSIAATCNDPGMPQNGTRYGDSREAGDTVTFQCDPGYQLQGQAKITCVQLNNRFFWQPDPPTCIAACGGNLTGPAGVILSPNYPQPYPPGKECDWRVKVNPDFVIALIFKSFNMEPSYDFLHIYEGEDSNSPLIGSYQGSQAPERIESSGNSLFLAFRSDASVGLSGFAIEFKEKPREACFDPGNIMNGTRVGTDFKLGSTITYQCDSGYKILDPSSITCVIGADGKPSWDQVLPSCNAPCGGQYTGSEGVVLSPNYPHNYTAGQICLYSITVPKEFVVFGQFAYFQTALNDLAELFDGTHAQARLLSSLSGSHSGETLPLATSNQILLRFSAKSGASARGFHFVYQAVPRTSDTQCSSVPEPRYGRRIGSEFSAGSIVRFECNPGYLLQGSTALHCQSVPNALAQWNDTIPSCVVPCSGNFTQRRGTILSPGYPEPYGNNLNCIWKIIVTEGSGIQIQVISFATEQNWDSLEIHDGGDVTAPRLGSFSGTTVPALLNSTSNQLYLHFQSDISVAAAGFHLEYKTVGLAACQEPALPSNSIKIGDRYMVNDVLSFQCEPGYTLQGRSHISCMPGTVRRWNYPSPLCIATCGGTLSTLGGVILSPGFPGSYPNNLDCTWRISLPIGYGK

SEQ ID NO: 10466 - protein, 2110 aa, Homo sapiens
MTAWRRFQSLLLLLGLLVLCARLLTAAKGQNCGGLVQGPNGTIESPGFPHGYPNYANCTWIIITGERNRIQLSFHTFALEENFDILSVYDGQPQQGNLKVRLSGFQLPSSIVSTGSILTLWFTTDFAVSAQGFKALYEVLPSHTCGNPGEILKGVLHGTRFNIGDKIRYSCLPGYILEGHAILTCIVSPGNGASWDFPAPFCRAEGACGGTLRGTSSSISSPHFPSEYENNADCTWTILAEPGDTIALVFTDFQLEEGYDFLEISGTEAPSIWLTGMNLPSPVISSKNWLRLHFTSDSNHRRKGFNAQFQVKKAIELKSRGVKMLPSKDGSHKNSVLSQGGVALVSHMCLDPGIPENGRRAGSDFSRVGANVQFSCEDNYVLQGSKSITCQRVTETLAAWSDHRPICRARTCGSNLRGPSGVITSPNYPVQYEDNAHCVWVITTTDPDKVIKLAFEEFELERGYDTLTVGDAGKVGDTRSVLYVLTGSSVPDLIVSMSNQMWLHLQSDDSIGSPGFKAVYQEIEKGGCGDPGIPAYGKRTGSSFLHGDTLTFECPAAFELVGERVITCQQNNQWSGNKPSCVFSCFFNFTASSGIILSPNYPEEYGNNMNCVWLIISEPGSRIHLIFNDFDVEPQFDFLAVKDDGISDITVLGTFSGNEVPSQLASSGHIVRLEFQSDHSTTGRGFNITYTTFGQNECHDPGIPINGRRFGDRFLLGSSVSFHCDDGFVKTQGSESITCILQDGNVVWSSTVPRCEAPCGGHLTASSGVILPPGWPGYYKDSLHCEWIIEAKPGHSIKMTFDRFQTEVNYDTLEVRDGPASSSPLIGEYHGTQAPQFLISTGNFMYLLFTTDNSRSSIGFLIHYESVTLESDSCLDPGIPVNGHRHGGDFGIRSTVTFSCDPGYTLSDDEPLVCERNHQWNHALPSCDALCGGYIQGKSGTVLSPGFPDFYPNSLNCTWTIEVSHGKGVQMIFHTFHLESSHDYLLITEDGSFSEPVARLTGSVLPHTIKAGLFGNFTAQLRFISDFSISYEGFNITFSEYDLEPCDDPGVPAFSRRIGFHFGVGDSLTFSCFLGYRLEGATKLTCLGGGRRVWSAPLPRCVAECGASVKGNEGTLLSPNFPSNYDNTHECIYKIETEAGKGIHLRTRSFQLFEGDTLKVYDGKDSSSRPLGTFTKNELLGLILNSTSNHLWLEFNTNGSDTDQGFQLTYTSFDLVKCEDPGIPNYGYRIRDEGHFTDTVVLYSCNPGYAMHGSNTLTCLSGDRRVWDKPLPSCIAECGGQIHAATSGRILSPGYPAPYDNNLHCTWIIEADPGKTISLHFIVFDTEMAHDILKVWDGPVDSDILLKEWSGSALPEDIHSTFNSLTLQFDSDFFISKSGFSIQFSTSIAATCNDPGMPQNGTRYGDSREAGDTVTFQCDPGYQLQGQAKITCVQLNNRFFWQPDPPTCIAACGGNLTGPAGVILSPNYPQPYPPGKECDWRVKVNPDFVIALIFKSFNMEPSYDFLHIYEGEDSNSPLIGSYQGSQAPERIESSGNSLFLAFRSDASVGLSGFAIEFKEKPREACFDPGNIMNGTRVGTDFKLGSTITYQCDSGYKILDPSSITCVIGADGKPSWDQVLPSCNAPCGGQYTGSEGVVLSPNYPHNYTAGQICLYSITVPKEFVVFGQFAYFQTALNDLAELFDGTHAQARLLSSLSGSHSGETLPLATSNQILLRFSAKSGASARGFHFVYQAVPRTSDTQCSSVPEPRYGRRIGSEFSAGSIVRFECNPGYLLQGSTALHCQSVPNALAQWNDTIPSCVVPCSGNFTQRRGTILSPGYPEPYGNNLNCIWKIIVTEGSGIQIQVISFATEQNWDSLEIHDGGDVTAPRLGSFSGTTVPALLNSTSNQLYLHFQSDISVAAAGFHLEYKTVGLAACQEPALPSNSIKIGDRYMVNDVLSFQCEPGYTLQGRSHISCMPGTVRRWNYPSPLCIATCGGTLSTLGGVILSPGFPGSYPNNLDCTWRISLPIGYGAHIQFLNFSTEANHDFLEIQNGPYHTSPMIGQFSGTDLPAALLSTTHETLIHFYSDHSQNRQGFKLAYQGGSGNIGPAFPCLDTPFQARCQGEERTFN

SEQ ID NO: 10467 - protein, 858 aa, Homo sapiens [sequence omitted]

SEQ ID NO: 10468 - protein, 733 aa, Homo sapiens
MWSWKCLLFWAVLVTATLCTARPSPTLPEQDALPSSEDDDDDDDSSSEEKETDNTKPNRMPVAPYWTSPEKMEKKLHAVPAAKTVKFKCPSSGTPNPTLRWLKNGKEFKPDHRIGGYKVRYATWSIIMDSVVPSDKGNYTCIVENEYGSINHTYQLDVVERSPHRPILQAGLPANKTVALGSNVEFMCKVYSDPQPHIQWLKHIEVNGSKIGPDNLPYVQILKTAGVNTTDKEMEVLHLRNVSFEDAGEYTCLAGNSIGLSHHSAWLTVLEALEERPAVMTSPLYLEIIIYCTGAFLISCMVGSVIVYKMKSGTKKSDFHSQMAVHKLAKSIPLRRQVTVSADSSASMNSGVLLVRPSRLSSSGTPMLAGVSEYELPEDPRWELPRDRLVLGKPLGEGCFGQVVLAEAIGLDKDKPNRVTKVAVKMLKSDATEKDLSDLISEMEMMKMIGKHKNIINLLGACTQDGPLYVIVEYASKGNLREYLQARRPPGLEYCYNPSHNPEEQLSSKDLVSCAYQVARGMEYLASKKCIHRDLAARNVLVTEDNVMKIADFGLARDIHHIDYYKKTTNGRLPVKWMAPEALFDRIYTHQSDVWSFGVLLWEIFTLGGSPYPGVPVEELFKLLKEGHRMDKPSNCTNELYMMMRDCWHAVPSQRPTFKQLVEDLDRIVALTSNQEYLDLSMPLDQYSPSFPDTRSSTCSSGEDSVFSHEPLPEEPCLPRHPAQLANGGLKRR

SEQ ID NO: 10469 - protein, 302 aa, Homo sapiens
MWSWKCLLFWAVLVTATLCTARPSPTLPEQDALPSSEDDDDDDDSSSEEKETDNTKPNRMPVAPYWTSPEKMEKKLHAVPAAKTVKFKCPSSGTPNPTLRWLKNGKEFKPDHRIGGYKVRYATWSIIMDSVVPSDKGNYTCIVENEYGSINHTYQLDVVERSPHRPILQAGLPANKTVALGSNVEFMCKVYSDPQPHIQWLKHIEVNGSKIGPDNLPYVQILKVIMAPVFVGQSTGKETTVSGAQVPVGRLSCPRMGSFLTLQAHTLHLSRDLATSPRTSNRGHKVEVSWEQRAAGMGGAGL

SEQ ID NO: 10470 - protein, 820 aa, Homo sapiens
MWSWKCLLFWAVLVTATLCTARPSPTLPEQAQPWGAPVEVESFLVHPGDLLQLRCRLRDDVQSINWLRDGVQLAESNRTRITGEEVEVQDSVPADSGLYACVTSSPSGSDTTYFSVNVSDALPSSEDDDDDDDSSSEEKETDNTKPNPVAPYWTSPEKMEKKLHAVPAAKTVKFKCPSSGTPNPTLRWLKNGKEFKPDHRIGGYKVRYATWSIIMDSVVPSDKGNYTCIVENEYGSINHTYQLDVVERSPHRPILQAGLPANKTVALGSNVEFMCKVYSDPQPHIQWLKHIEVNGSKIGPDNLPYVQILKTAGVNTTDKEMEVLHLRNVSFEDAGEYTCLAGNSIGLSHHSAWLTVLEALEERPAVMTSPLYLEIIIYCTGAFLISCMVGSVIVYKMKSGTKKSDFHSQMAVHKLAKSIPLRRQVTVSADSSASMNSGVLLVRPSRLSSSGTPMLAGVSEYELPEDPRWELPRDRLVLGKPLGEGCFGQVVLAEAIGLDKDKPNRVTKVAVKMLKSDATEKDLSDLISEMEMMKMIGKHKNIINLLGACTQDGPLYVIVEYASKGNLREYLQARRPPGLEYCYNPSHNPEEQLSSKDLVSCAYQVARGMEYLASKKCIHRDLAARNVLVTEDNVMKIADFGLARDIHHIDYYKKTTNGRLPVKWMAPEALFDRIYTHQSDVWSFGVLLWEIFTLGGSPYPGVPVEELFKLLKEGHRMDKPSNCTNELYMMMRDCWHAVPSQRPTFKQLVEDLDRIVALTSNQEYLDLSMPLDQYSPSFPDTRSSTCSSGEDSVFSHEPLPEEPCLPRHPAQLANGGLKRR

SEQ ID NO: 10471 - protein, 300 aa, Homo sapiens
MWSWKCLLFWAVLVTATLCTARPSPTLPEQDALPSSEDDDDDDDSSSEEKETDNTKPNPVAPYWTSPEKMEKKLHAVPAAKTVKFKCPSSGTPNPTLRWLKNGKEFKPDHRIGGYKVRYATWSIIMDSVVPSDKGNYTCIVENEYGSINHTYQLDVVERSPHRPILQAGLPANKTVALGSNVEFMCKVYSDPQPHIQWLKHIEVNGSKIGPDNLPYVQILKVIMAPVFVGQSTGKETTVSGAQVPVGRLSCPRMGSFLTLQAHTLHLSRDLATSPRTSNRGHKVEVSWEQRAAGMGGAGL

SEQ ID NO: 10472 - protein, 731 aa, Homo sapiens
MWSWKCLLFWAVLVTATLCTARPSPTLPEQDALPSSEDDDDDDDSSSEEKETDNTKPNRMPVAPYWTSPEKMEKKLHAVPAAKTVKFKCPSSGTPNPTLRWLKNGKEFKPDHRIGGYKVRYATWSIIMDSVVPSDKGNYTCIVENEYGSINHTYQLDVVERSPHRPILQAGLPANKTVALGSNVEFMCKVYSDPQPHIQWLKHIEVNGSKIGPDNLPYVQILKTAGVNTTDKEMEVLHLRNVSFEDAGEYTCLAGNSIGLSHHSAWLTVLEALEERPAVMTSPLYLEIIIYCTGAFLISCMVGSVIVYKMKSGTKKSDFHSQMAVHKLAKSIPLRRQVSADSSASMNSGVLLVRPSRLSSSGTPMLAGVSEYELPEDPRWELPRDRLVLGKPLGEGCFGQVVLAEAIGLDKDKPNRVTKVAVKMLKSDATEKDLSDLISEMEMMKMIGKHKNIINLLGACTQDGPLYVIVEYASKGNLREYLQARRPPGLEYCYNPSHNPEEQLSSKDLVSCAYQVARGMEYLASKKCIHRDLAARNVLVTEDNVMKIADFGLARDIHHIDYYKKTTNGRLPVKWMAPEALFDRIYTHQSDVWSFGVLLWEIFTLGGSPYPGVPVEELFKLLKEGHRMDKPSNCTNELYMMMRDCWHAVPSQRPTFKQLVEDLDRIVALTSNQEYLDLSMPLDQYSPSFPDTRSSTCSSGEDSVFSHEPLPEEPCLPRHPAQLANGGLKRR

SEQ ID NO: 10473 - protein, 820 aa, Homo sapiens
MWSWKCLLFWAVLVTATLCTARPSPTLPEQAQPWGAPVEVESFLVHPGDLLQLRCRLRDDVQSINWLRDGVQLAESNRTRITGEEVEVQDSVPADSGLYACVTSSPSGSDTTYFSVNVSDALPSSEDDDDDDDSSSEEKETDNTKPNRMPVAPYWTSPEKMEKKLHAVPAAKTVKFKCPSSGTPNPTLRWLKNGKEFKPDHRIGGYKVRYATWSIIMDSVVPSDKGNYTCIVENEYGSINHTYQLDVVERSPHRPILQAGLPANKTVALGSNVEFMCKVYSDPQPHIQWLKHIEVNGSKIGPDNLPYVQILKTAGVNTTDKEMEVLHLRNVSFEDAGEYTCLAGNSIGLSHHSAWLTVLEALEERPAVMTSPLYLEIIIYCTGAFLISCMVGSVIVYKMKSGTKKSDFHSQMAVHKLAKSIPLRRQVSADSSASMNSGVLLVRPSRLSSSGTPMLAGVSEYELPEDPRWELPRDRLVLGKPLGEGCFGQVVLAEAIGLDKDKPNRVTKVAVKMLKSDATEKDLSDLISEMEMMKMIGKHKNIINLLGACTQDGPLYVIVEYASKGNLREYLQARRPPGLEYCYNPSHNPEEQLSSKDLVSCAYQVARGMEYLASKKCIHRDLAARNVLVTEDNVMKIADFGLARDIHHIDYYKKTTNGRLPVKWMAPEALFDRIYTHQSDVWSFGVLLWEIFTLGGSPYPGVPVEELFKLLKEGHRMDKPSNCTNELYMMMRDCWHAVPSQRPTFKQLVEDLDRIVALTSNQEYLDLSMPLDQYSPSFPDTRSSTCSSGEDSVFSHEPLPEEPCLPRHPAQLANGGLKRR

SEQ ID NO: 10474 - protein, 822 aa, Homo sapiens [sequence omitted]

SEQ ID NO: 10475 - protein, 662 aa, Homo sapiens
MEKKLHAVPAAKTVKFKCPSSGTPNPTLRWLKNGKEFKPDHRIGGYKVRYATWSIIMDSVVPSDKGNYTCIVENEYGSINHTYQLDVVERSPHRPILQAGLPANKTVALGSNVEFMCKVYSDPQPHIQWLKHIEVNGSKIGPDNLPYVQILKTAGVNTTDKEMEVLHLRNVSFEDAGEYTCLAGNSIGLSHHSAWLTVLEALEERPAVMTSPLYLEIIIYCTGAFLISCMVGSVIVYKMKSGTKKSDFHSQMAVHKLAKSIPLRRQVTVSADSSASMNSGVLLVRPSRLSSSGTPMLAGVSEYELPEDPRWELPRDRLVLGKPLGEGCFGQVVLAEAIGLDKDKPNRVTKVAVKMLKSDATEKDLSDLISEMEMMKMIGKHKNIINLLGACTQDGPLYVIVEYASKGNLREYLQARRPPGLEYCYNPSHNPEEQLSSKDLVSCAYQVARGMEYLASKKCIHRDLAARNVLVTEDNVMKIADFGLARDIHHIDYYKKTTNGRLPVKWMAPEALFDRIYTHQSDVWSFGVLLWEIFTLGGSPYPGVPVEELFKLLKEGHRMDKPSNCTNELYMMMRDCWHAVPSQRPTFKQLVEDLDRIVALTSNQEYLDLSMPLDQYSPSFPDTRSSTCSSGEDSVFSHEPLPEEPCLPRHPAQLANGGLKRR

SEQ ID NO: 10476 - protein, 662 aa, Homo sapiens
MWSWKCLLFWAVLVTATLCTARPCPTLPEQAQPWGAPVEVESFLVHPGDLLQLRCRLRDDVQSINWLRDGVQLAESNRTRITGEEVEVQDSVPADSGLYACVTSSPSGSDTTYFSVNVSDALPSSEDDDDDDDSSSEEKETDNTKPNRMPVAPYWTSPEKMEKKLHAVPAAKTVKFKCPSSGTPNPTLRWLKNGKEFKPDHRIGGYKVRYATWSIIMDSVVPSDKGNYTCIVENEYGSINHTYQLDVVERSPHRPILQAGLPANKTVALGSNVEFMCKVYSDPQPHIQWLKHIEVNGSKIGPDNLPYAQILKTAGVNTTDKEMEVLHLRNVSFEDAGEYTCLAGNSIGLSHHSAWLTVLEALEERPAVMTSPLYLEIIIYCTGAFLISCMVGSVIVYKMKSGTKKSDFHSQMAVHKLAKSIPLRRQVTVSADSSASMNSGVLLVRPSRLSSSGTPMLAGVSEYELPEDPRWELPRDRLVLGKPLGEGCFGQVVLAEAIGLDKDKPNRVTKVAVKMLKSDATEKDLSDLISEMEMMKMIGKHKNIINLLGACTQDGPLYVIVEYASKGNLREYLQARRPPGLEYCYNPSHNPEEQLSSKDLVSCAYQVARGMEYLASKKVWNLKAPLVHTPRPGSQECPGDRGQCDEDSRLWPRTGHSPHRLL

SEQ ID NO: 10477 - protein, 785 aa, Homo sapiens
MWSWKCLLFWAVLVTATLCTARPSPTLPEQAQPWGAPVEVESFLVHPGDLLQLRCRLRDDVQSINWLRDGVQLAESNRTRITGEEVEVQDSVPADSGLYACVTSSPSGSDTTYFSVNVSDALPSSEDDDDDDDSSSEEKETDNTKPNRMPVAPYWTSPEKMEKKLHAVPAAKTVKFKCPSSGTPNPTLRWLKNGKEFKPDHRIGGYKVRYATWSIIMDSVVPSDKGNYTCIVENEYGSINHTYQLDVVERSPHRPILQAGLPANKTVALGSNVEFMCKVYSDPQPHIQWLKHIEVNGSKIGPDNLPYVQILKTAGVNTTDKEMEVLHLRNVSFEDAGEYTCLAGNSIGLSHHSAWLTVLEALEERPAVMTSPLYLEIIIYCTGAFLISCMVGSVIVYKMKSGTKKSDFHSQMAVHKLAKSIPLRRQVTVSADSSASMNSGVLLVRPSRLSSSGTPMLAGVSEYELPEDPRWELPRDRLVLGKPLGEGCFGQVVLAEAIGLDKDKPNRVTKVAVKMLKSDATEKDLSDLISEMEMMKMIGKHKNIINLLGACTQDGPLYVIVEYASKGNLREYLQARRPPGLEYCYNPSHNPEEQLSSKDLVSCAYQVARGMEYLASKKCIHRDLAARNVLVTEDNVMKIADFGLARDIHHIDYYKKTTNGRLPVKWMAPEALFDRIYTHQSDVWSFGVLLWEIFTLGGSPYPGVPVEELFKQLVEDLDRIVALTSNQEYLDLSMPLDQYSPSFPDTRSSTCSSGEDSVFSHEPLPEEPCLPRHPAQLANGGLKRR

SEQ ID NO: 10478 - protein, 140 aa, Homo sapiens
MAGWNAYIDNLMADGTCQDAAIVGYKDSPSVWAAVPGKTFVNITPAEVGVLVGKDRSSFYVNGLTLGGQKCSVIRDSLLQDGEFSMDLRTKSTGGAPTFNVTVTKTDKTLVLLMGKEGVHGGLINKKCYEMASHLRRSQY

SEQ ID NO: 10479 - protein, 638 aa, Homo sapiens
MAAAHGPVAPSSPEQNGAVPSEATKRDQNLKRGNWGNQIEFVLTSVGYAVGLGNVWRFPYLCYRNGGGAFMFPYFIMLIFCGIPLFFMELSFGQFASQGCLGVWRISPMFKGVGYGMMVVSTYIGIYYNVVICIAFYYFFSSMTHVLPWAYCNNPWNTHDCAGVLDASNLTNGSRPAALPSNLSHLLNHSLQRTSPSEEYWRLYVLKLSDDIGNFGEVRLPLLGCLGVSWLVVFLCLIRGVKSSGKVVYFTATFPYVVLTILFVRGVTLEGAFDGIMYYLTPQWDKILEAKVWGDAASQIFYSLACAWGGLITMASYNKFHNNCYRDSVIISITNCATSVYAGFVIFSILGFMANHLGVDVSRVADHGPGLAFVAYPEALTLLPISPLWSLLFFFMLILLGLGTQFCLLETLVTAIVDEVGNEWILQKKTYVTLGVAVAGFLLGIPLTSQAGIYWLLLMDNYAASFSLVVISCIMCVAIMYIYGHRNYFQDIQMMLGFPPPLFFQICWRFVSPAIIFFILVFTVIQYQPITYNHYQYPGWAVAIGFLMALSSVLCIPLYAMFRLCRTDGDTLLQRLKNATKPSRDWGPALLEHRTGRYAPTIAPSPEDGFEVQSLHPDKAQIPIVGSNGSSRLQDSRI

SEQ ID NO: 10480 - protein, 698 aa, Homo sapiens [sequence omitted]

SEQ ID NO: 10481 - protein, 633 aa, Homo sapiens
MVGKGAKGMLNGAVPSEATKRDQNLKRGNWGNQIEFVLTSVGYAVGLGNVWRFPYLCYRNGGGAFMFPYFIMLIFCGIPLFFMELSFGQFASQGCLGVWRISPMFKGVGYGMMVVSTYIGIYYNVVICIAFYYFFSSMTHVLPWAYCNNPWNTHDCAGVLDASNLTNGSRPAALPSNLSHLLNHSLQRTSPSEEYWRLYVLKLSDDIGNFGEVRLPLLGCLGVSWLVVFLCLIRGVKSSGKVVYFTATFPYVVLTILFVRGVTLEGAFDGIMYYLTPQWDKILEAKVWGDAASQIFYSLACAWGGLITMASYNKFHNNCYRDSVIISITNCATSVYAGFVIFSILGFMANHLGVDVSRVADHGPGLAFVAYPEALTLLPISPLWSLLFFFMLILLGLGTQFCLLETLVTAIVDEVGNEWILQKKTYVTLGVAVAGFLLGIPLTSQAGIYWLLLMDNYAASFSLVVISCIMCVAIMYIYGHRNYFQDIQMMLGFPPPLFFQICWRFVSPAIIFFILVFTVIQYQPITYNHYQYPGWAVAIGFLMALSSVLCIPLYAMFRLCRTDGDTLLQRLKNATKPSRDWGPALLEHRTGRYAPTIAPSPEDGFEVQSLHPDKAQIPIVGSNGSSRLQDSRI

SEQ ID NO: 10482 - protein, 1518 aa, Homo sapiens
PYSVGFREADAATSFLRAARSGNLDKALDHLRNGVDINTCNQNGLNGLHLASKEGHVKMVVELLHKEIILETTTKKGNTALHIAALAGQDEVVRELVNYGANVNAQSQKGFTPLYMAAQENHLEVVKFLLENGANQNVATEDGFTPLAVALQQGHENVVAHLINYGTKGKVRLPALHIAARNDDTRTAAVLLQNDPNPDVLSKTGFTPLHIAAHYENLNVAQLLLNRGASVNFTPQNGITPLHIASRRGNVIMVRLLLDRGAQIETKTKDELTPLHCAARNGHVRISEILLDHGAPIQAKTKNGLSPIHMAAQGDHLDCVRLLLQYDAEIDDITLDHLTPLHVAAHCGHHRVAKVLLDKGAKPNSRALNGFTPLHIACKKNHVRVMELLLKTGASIDAVTESGLTPLHVASFMGHLPIVKNLLQRGASPNVSNVKVETPLHMAARAGHTEVAKYLLQNKAKVNAKAKDDQTPLHCAARIGHTNMVKLLLENNANPNLATTAGHTPLHIAAREGHVETVLALLEKEASQACMTKKGFTPLHVAAKYGKVRVAELLLERDAHPNAAGKNGLTPLHVAVHHNNLDIVKLLLPRGGSPHSPAWNGYTPLHIAAKQNQVEVARSLLQYGGSANAESVQGVTPLHLAAQEGHAEMVALLLSKQANGNLGNKSGLTPLHLVAQEGHVPVADVLIKHGVMVDATTRMGYTPLHVASHYGNIKLVKFLLQHQADVNAKTKLGYSPLHQAAQQGHTDIVTLLLKNGASPNEVSSDGTTPLAIAKRLGYISVTDVLKVVTDETSFVLVSDKHRMSFPETVDEILDVSEDEGEELISFKAERRDSRDVDEEKELLDFVPKLDQVVESPAIPRIPCAMPETVVIRSEEQEQASKEYDEDSLIPSSPATETSDNISPVASPVHTGFLVSFMVDARGGSMRGSRHNGLRVVIPPRTCAAPTRITCRLVKPQKLSTPPPLAEEEGLASRIIALGPTGAQFLSPVIVEIPHFASHGRGDRELVVLRSENGSVWKEHRSRYGESYLDQILNGMDEELGSLEELEKKRVCRIITTDFPLYFVIMSRLCQDYDIIGPEGGSLKSKLVPLVQATFPENAVTKRVKLALQAQPVPDELVTKLLGNQATFSPIVTVEPRRRKFHRPIGLRIPLPPSWTDNPRDSGEGDTTSLRLLCSVIGGTDQAQWEDITGTTKLVYANECANFTTNVSARFWLSDCPRTAEAVNFATLLYKELTAVPYMAKFVIFAKMNDPREGRLRCYCMTDDKVDKTLEQHENFVEVARSRDIEVLEGMSLFAELSGNLVPVKKAAQQRSFHFQSFRENRLAMPVKVRDSSREPGGSLSFLRKAMKYEDTQHILCHLNITMPPCAKGSGAEDRRRTPTPLALRYSILSESTPGSLSGTEQAEMKMAVISEHLGLSWAELARELQFSVEDINRIRVENPNSLLEQSVALLNLWVIREGQNANMENLYTALQSIDRGEIVNMLEGSGRQSRNLKPDRRHTDRDYSLSPSQMNDTSTPNP

SEQ ID NO: 10483 - protein, 1881 aa, Homo sapiens
MPYSVGFREADAATSFLRAARSGNLDKALDHLRNGVDINTCNQNGLNGLHLASKEGHVKMVVELLHKEIILETTTKKGNTALHIAALAGQDEVVRELVNYGANVNAQSQKGFTPLYMAAQENHLEVVKFLLENGANQNVATEDGFTPLAVALQQGHENVVAHLINYGTKGKVRLPALHIAARNDDTRTAAVLLQNDPNPDVLSKTGFTPLHIAAHYENLNVAQLLLNRGASVNFTPQNGITPLHIASRRGNVIMVRLLLDRGAQIETKTKDELTPLHCAARNGHVRISEILLDHGAPIQAKTKNGLSPIHMAAQGDHLDCVRLLLQYDAEIDDITLDHLTPLHVAAHCGHHRVAKVLLDKGAKPNSRALNGFTPLHIACKKNHVRVMELLLKTGASIDAVTESGLTPLHVASFMGHLPIVKNLLQRGASPNVSNVKVETPLHMAARAGHTEVAKYLLQNKAKVNAKAKDDQTPLHCAARIGHTNMVKLLLENNANPNLATTAGHTPLHIAAREGHVETVLALLEKEASQACMTKKGFTPLHVAAKYGKVRVAELLLERDAHPNAAGKNGLTPLHVAVHHNNLDIVKLLLPRGGSPHSPAWNGYTPLHIAAKQNQVEVARSLLQYGGSANAESVQGVTPLHLAAQEGHAEMVALLLSKQANGNLGNKSGLTPLHLVAQEGHVPVADVLIKHGVMVDATTRMGYTPLHVASHYGNIKLVKFLLQHQADVNAKTKLGYSPLHQAAQQGHTDIVTLLLKNGASPNEVSSDGTTPLAIAKRLGYISVTDVLKVVTDETSFVLVSDKHRMSFPETVDEILDVSEDEGEELISFKAERRDSRDVDEEKELLDFVPKLDQVVESPAIPRIPCAMPETVVIRSEEQEQASKEYDEDSLIPSSPATETSDNISPVASPVHTGFLVSFMVDARGGSMRGSRHNGLRVVIPPRTCAAPTRITCRLVKPQKLSTPPPLAEEEGLASRIIALGPTGAQFLSPVIVEIPHFASHGRGDRELVVLRSENGSVWKEHRSRYGESYLDQILNGMDEELGSLEELEKKRVCRIITTDFPLYFVIMSRLCQDYDIIGPEGGSLKSKLVPLVQATFPENAVTKRVKLALQAQPVPDELVTKLLGNQATFSPIVTVEPRRRKFHRPIGLRIPLPPSWTDNPRDSGEGDTTSLRLLCSVIGGTDQAQWEDITGTTKLVYANECANFTTNVSARFWLSDCPRTAEAVNFATLLYKELTAVPYMAKFVIFAKMNDPREGRLRCYCMTDDKVDKTLEQHENFVEVARSRDIEVLEGMSLFAELSGNLVPVKKAAQQRSFHFQSFRENRLAMPVKVRDSSREPGGSLSFLRKAMKYEDTQHILCHLNITMPPCAKGSGAEDRRRTPTPLALRYSILSESTPGSLSGTEQAEMKMAVISEHLGLSWAELARELQFSVEDINRIRVENPNSLLEQSVALLNLWVIREGQNANMENLYTALQSIDRGEIVNMLEGSGRQSRNLKPDRRHTDRDYSLSPSQMNGYSSLQDELLSPASLGCALSSPLRADQYWNEVAVLDAIPLAATEHDTMLEMSDMQVWSAGLTPSLVTAEDSSLECSKAEDSDATGHEWKLEGALSEEPRGPELGSLELVEDDTVDSDATNGLIDLLEQEEGQRSEEKLPGSKRQDDATGAGQDSENEVSLVSGHQRGQARITHSPTVSQVTERSQDRLQDWDADGSIVSYLQDAAQGSWQEEVTQGPHSFQGTSTMTEGLEPGGSQEYEKVLVSVSEHTWTEQPEAESSQADRDRRQQGQEEQVQEAKNTFTQVVQGNEFQNIPGEQVTEEQFTDEQGNIVTKKIIRKVVRQIDLSSADAAQEHEEVTVEGPLEDPSELEVDIDYFMKHSKDHTSTPNP

SEQ ID NO: 10484 - protein, 1879 aa, Homo sapiens
PYSVGFREADAATSFLRAARSGNLDKALDHLRNGVDINTCNQNGLNGLHLASKEGHVKMVVELLHKEIILETTTKKGNTALHIAALAGQDEVVRELVNYGANVNAQSQKGFTPLYMAAQENHLEVVKFLLENGANQNVATEDGFTPLAVALQQGHENVVAHLINYGTKGKVRLPALHIAARNDDTRTAAVLLQNDPNPDVLSKTGFTPLHIAAHYENLNVAQLLLNRGASVNFTPQNGITPLHIASRRGNVIMVRLLLDRGAQIETKTKDELTPLHCAARNGHVRISEILLDHGAPIQAKTKNGLSPIHMAAQGDHLDCVRLLLQYDAEIDDITLDHLTPLHVAAHCGHHRVAKVLLDKGAKPNSRALNGFTPLHIACKKNHVRVMELLLKTGASIDAVTESGLTPLHVASFMGHLPIVKNLLQRGASPNVSNVKVETPLHMAARAGHTEVAKYLLQNKAKVNAKAKDDQTPLHCAARIGHTNMVKLLLENNANPNLATTAGHTPLHIAAREGHVETVLALLEKEASQACMTKKGFTPLHVAAKYGKVRVAELLLERDAHPNAAGKNGLTPLHVAVHHNNLDIVKLLLPRGGSPHSPAWNGYTPLHIAAKQNQVEVARSLLQYGGSANAESVQGVTPLHLAAQEGHAEMVALLLSKQANGNLGNKSGLTPLHLVAQEGHVPVADVLIKHGVMVDATTRMGYTPLHVASHYGNIKLVKFLLQHQADVNAKTKLGYSPLHQAAQQGHTDIVTLLLKNGASPNEVSSDGTTPLAIAKRLGYISVTDVLKVVTDETSFVLVSDKHRMSFPETVDEILDVSEDEGEELISFKAERRDSRDVDEEKELLDFVPKLDQVVESPAIPRIPCAMPETVVIRSEEQEQASKEYDEDSLIPSSPATETSDNISPVASPVHTGFLVSFMVDARGGSMRGSRHNGLRVVIPPRTCAAPTRITCRLVKPQKLSTPPPLAEEEGLASRIIALGPTGAQFLSPVIVEIPHFASHGRGDRELVVLRSENGSVWKEHRSRYGESYLDQILNGMDEELGSLEELEKKRVCRIITTDFPLYFVIMSRLCQDYDIIGPEGGSLKSKLVPLVQATFPENAVTKRVKLALQAQPVPDELVTKLLGNQATFSPIVTVEPRRRKFHRPIGLRIPLPPSWTDNPRDSGEGDTTSLRLLCSVIGGTDQAQWEDITGTTKLVYANECANFTTNVSARFWLSDCPRTAEAVNFATLLYKELTAVPYMAKFVIFAKMNDPREGRLRCYCMTDDKVDKTLEQHENFVEVARSRDIEVLEGMSLFAELSGNLVPVKKAAQQRSFHFQSFRENRLAMPVKVRDSSREPGGSLSFLRKAMKYEDTQHILCHLNITMPPCAKGSGAEDRRRTPTPLALRYSILSESTPGSLSGTEQAEMKMAVISEHLGLSWAELARELQFSVEDINRIRVENPNSLLEQSVALLNLWVIREGQNANMENLYTALQSIDRGEIVNMLEGSGRQSRNLKPDRRHTDRDYSLSPSQMNGYSSLQDELLSPASLGCALSSPLRADQYWNEVAVLDAIPLAATEHDTMLEMSDMQVWSAGLTPSLVTAEDSSLECSKAEDSDATGHEWKLEGALSEEPRGPELGSLELVEDDTVDSDATNGLIDLLEQEEGQRSEEKLPGSKRQDDATGAGQDSENEVSLVSGHQRGQARITHSPTVSQVTERSQDRLQDWDADGSIVSYLQDAAQGSWQEEVTQGPHSFQGTSTMTEGLEPGGSQEYEKVLVSVSEHTWTEQPEAESSQADRDRRQQGQEEQVQEAKNTFTQVVQGNEFQNIPGEQVTEEQFTDEQGNIVTKKIIRKVVRQIDLSSADAAQEHEEVELRGSGLQPDLIEGRKGAQIVKRASLKRGKQ

SEQ ID NO: 10485 - protein, 1856 aa, Homo sapiens
MPYSVGFREADAATSFLRAARSGNLDKALDHLRNGVDINTCNQNGLNGLHLASKEGHVKMVVELLHKEIILETTTKKGNTALHIAALAGQDEVVRELVNYGANVNAQSQKGFTPLYMAAQENHLEVVKFLLENGANQNVATEDGFTPLAVALQQGHENVVAHLINYGTKGKVRLPALHIAARNDDTRTAAVLLQNDPNPDVLSKTGFTPLHIAAHYENLNVAQLLLNRGASVNFTPQNGITPLHIASRRGNVIMVRLLLDRGAQIETKTKDELTPLHCAARNGHVRISEILLDHGAPIQAKTKNGLSPIHMAAQGDHLDCVRLLLQYDAEIDDITLDHLTPLHVAAHCGHHRVAKVLLDKGAKPNSRALNGFTPLHIACKKNHVRVMELLLKTGASIDAVTESGLTPLHVASFMGHLPIVKNLLQRGASPNVSNVKVETPLHMAARAGHTEVAKYLLQNKAKVNAKAKDDQTPLHCAARIGHTNMVKLLLENNANPNLATTAGHTPLHIAAREGHVETVLALLEKEASQACMTKKGFTPLHVAAKYGKVRVAELLLERDAHPNAAGKNGLTPLHVAVHHNNLDIVKLLLPRGGSPHSPAWNGYTPLHIAAKQNQVEVARSLLQYGGSANAESVQGVTPLHLAAQEGHAEMVALLLSKQANGNLGNKSGLTPLHLVAQEGHVPVADVLIKHGVMVDATTRMGYTPLHVASHYGNIKLVKFLLQHQADVNAKTKLGYSPLHQAAQQGHTDIVTLLLKNGASPNEVSSDGTTPLAIAKRLGYISVTDVLKVVTDETSFVLVSDKHRMSFPETVDEILDVSEDEGEELISFKAERRDSRDVDEEKELLDFVPKLDQVVESPAIPRIPCAMPETVVIRSEEQEQASKEYDEDSLIPSSPATETSDNISPVASPVHTGFLVSFMVDARGGSMRGSRHNGLRVVIPPRTCAAPTRITCRLVKPQKLSTPPPLAEEEGLASRIIALGPTGAQFLSPVIVEIPHFASHGRGDRELVVLRSENGSVWKEHRSRYGESYLDQILNGMDEELGSLEELEKKRVCRIITTDFPLYFVIMSRLCQDYDIIGPEGGSLKSKLVPLVQATFPENAVTKRVKLALQAQPVPDELVTKLLGNQATFSPIVTVEPRRRKFHRPIGLRIPLPPSWTDNPRDSGEGDTTSLRLLCSVIGGTDQAQWEDITGTTKLVYANECANFTTNVSARFWLSDCPRTAEAVNFATLLYKELTAVPYMAKFVIFAKMNDPREGRLRCYCMTDDKVDKTLEQHENFVEVARSRDIEVLEGMSLFAELSGNLVPVKKAAQQRSFHFQSFRENRLAMPVKVRDSSREPGGSLSFLRKAMKYEDTQHILCHLNITMPPCAKGSGAEDRRRTPTPLALRYSILSESTPGSLSGTEQAEMKMAVISEHLGLSWAELARELQFSVEDINRIRVENPNSLLEQSVALLNLWVIREGQNANMENLYTALQSIDRGEIVNMLEGSGRQSRNLKPDRRHTDRDYSLSPSQMNGYSSLQDELLSPASLGCALSSPLRADQYWNEVAVLDAIPLAATEHDTMLEMSDMQVWSAGLTPSLVTAEDSSLECSKAEDSDATGHEWKLEGALSEEPRGPELGSLELVEDDTVDSDATNGLIDLLEQEEGQRSEEKLPGSKRQDDATGAGQDSENEVSLVSGHQRGQARITHSPTVSQVTERSQDRLQDWDADGSIVSYLQDAAQGSWQEEVTQGPHSFQGTSTMTEGLEPGGSQEYEKVLVSVSEHTWTEQPEAESSQADRDRRQQGQEEQVQEAKNTFTQVVQGNEFQNIPGEQVTEEQFTDEQGNIVTKKIIRKVVRQIDLSSADAAQEHEEDHTSTPNP

SEQ ID NO: 10486 - protein, 1719 aa, Homo sapiens
MPYSVGFREADAATSFLRAARSGNLDKALDHLRNGVDINTCNQNGLNGLHLASKEGHVKMVVELLHKEIILETTTKKGNTALHIAALAGQDEVVRELVNYGANVNAQSQKGFTPLYMAAQENHLEVVKFLLENGANQNVATEDGFTPLAVALQQGHENVVAHLINYGTKGKVRLPALHIAARNDDTRTAAVLLQNDPNPDVLSKTGFTPLHIAAHYENLNVAQLLLNRGASVNFTPQNGITPLHIASRRGNVIMVRLLLDRGAQIETKTKDELTPLHCAARNGHVRISEILLDHGAPIQAKTKNGLSPIHMAAQGDHLDCVRLLLQYDAEIDDITLDHLTPLHVAAHCGHHRVAKVLLDKGAKPNSRALNGFTPLHIACKKNHVRVMELLLKTGASIDAVTESGLTPLHVASFMGHLPIVKNLLQRGASPNVSNVKVETPLHMAARAGHTEVAKYLLQNKAKVNAKAKDDQTPLHCAARIGHTNMVKLLLENNANPNLATTAGHTPLHIAAREGHVETVLALLEKEASQACMTKKGFTPLHVAAKYGKVRVAELLLERDAHPNAAGKNGLTPLHVAVHHNNLDIVKLLLPRGGSPHSPAWNGYTPLHIAAKQNQVEVARSLLQYGGSANAESVQGVTPLHLAAQEGHAEMVALLLSKQANGNLGNKSGLTPLHLVAQEGHVPVADVLIKHGVMVDATTRMGYTPLHVASHYGNIKLVKFLLQHQADVNAKTKLGYSPLHQAAQQGHTDIVTLLLKNGASPNEVSSDGTTPLAIAKRLGYISVTDVLKVVTDETSFVLVSDKHRMSFPETVDEILDVSEDEGEELISFKAERRDSRDVDEEKELLDFVPKLDQVVESPAIPRIPCAMPETVVIRSEEQEQASKEYDEDSLIPSSPATETSDNISPVASPVHTGFLVSFMVDARGGSMRGSRHNGLRVVIPPRTCAAPTRITCRLVKPQKLSTPPPLAEEEGLASRIIALGPTGAQFLSPVIVEIPHFASHGRGDRELVVLRSENGSVWKEHRSRYGESYLDQILNGMDEELGSLEELEKKRVCRIITTDFPLYFVIMSRLCQDYDIIGPEGGSLKSKLVPLVQATFPENAVTKRVKLALQAQPVPDELVTKLLGNQATFSPIVTVEPRRRKFHRPIGLRIPLPPSWTDNPRDSGEGDTTSLRLLCSVIGGTDQAQWEDITGTTKLVYANECANFTTNVSARFWLSDCPRTAEAVNFATLLYKELTAVPYMAKFVIFAKMNDPREGRLRCYCMTDDKVDKTLEQHENFVEVARSRDIEVLEGMSLFAELSGNLVPVKKAAQQRSFHFQSFRENRLAMPVKVRDSSREPGGSLSFLRKAMKYEDTQHILCHLNITMPPCAKGSGAEDRRRTPTPLALRYSILSESTPGSLSGTEQAEMKMAVISEHLGLSWAELARELQFSVEDINRIRVENPNSLLEQSVALLNLWVIREGQNANMENLYTALQSIDRGEIVNMLEGSGRQSRNLKPDRRHTDRDYSLSPSQMNGHQRGQARITHSPTVSQVTERSQDRLQDWDADGSIVSYLQDAAQGSWQEEVTQGPHSFQGTSTMTEGLEPGGSQEYEKVLVSVSEHTWTEQPEAESSQADRDRRQQGQEEQVQEAKNTFTQVVQGNEFQNIPGEQVTEEQFTDEQGNIVTKKIIRKVVRQIDLSSADAAQEHEEVTVEGPLEDPSELEVDIDYFMKHSKDHTSTPNP

SEQ ID NO: 10487 - protein, 1121 aa, Homo sapiens
MPIVDKLKEALKPGRKDSADDGELGKLLASSAKKVLLQKIEFEPASKSFSYQLEALKSKYVLLNPKTEGASRHKSGDDPPARRQGSEHTYESCGDGVPAPQKVLFPTERLSLRWERVFRVGAGLHNLGNTCFLNATIQCLTYTPPLANYLLSKEHARSCHQGSFCMLCVMQNHIVQAFANSGNAIKPVSFIRDLKKIARHFRFGNQEDAHEFLRYTIDAMQKACLNGCAKLDRQTQATTLVHQIFGGYLRSRVKCSVCKSVSDTYDPYLDVALEIRQAANIVRALELFVKADVLSGENAYMCAKCKKKVPASKRFTIHRTSNVLTLSLKRFANFSGGKITKDVGYPEFLNIRPYMSQNNGDPVMYGLYAVLVHSGYSCHAGHYYCYVKASNGQWYQMNDSLVHSSNVKVVLNQQAYVLFYLRIPGSKKSPEGLISRTGSSSLPGRPSVIPDHSKKNIGNGIISSPLTGKRQDSGTMKKPHTTEEIGVPISRNGSTLGLKSQNGCIPPKLPSGSPSPKLSQTPTHMPTILDDPGKKVKKPAPPQHFSPRTAQGLPGTSNSNSSRSGSQRQGSWDSRDVVLSTSPKLLATATANGHGLKGNDESAGLDRRGSSSSSPEHSASSDSTKAPQTPRSGAAHLCDSQETNCSTAGHSKTPPSGADSKTVKLKSPVLSNTTTEPASTMSPPPAKKLALSAKKASTLWRATGNDLRPPPPSPSSDLTHPMKTSHPVVASTWPVHRARAVSPAPQSSSRLQPPFSPHPTLLSSTPKPPGTSEPRSCSSISTALPQVNEDLVSLPHQLPEASEPPRSPSEKRKKTFVGEPQRLGSETCLPQHIREATAAPHGKRKRKKKKRPEDTAASALQEGQTQRQPGSPMYRREGQAQLPAVRRQEDGTQPQVNGQQVGCVTDGHHASSRKRRRKGAEGLGEEGGLHQDPLRHSCSPMGDGDPEAMEESPRKKKKRKQETQRAVEEDGHLKCPRSAKPQDAVVPESSSCAPSANGWCPGDRMGLSQAPPVSWNGERESDVVQELLKYSSDKAYGRKVLTWDGKMSAVSQDAIEDSRQARTETVVDDWDEEFDRGKEKKIKKFKREKRRNFNAFQKLQTRRNFWSVTHPAKAASLSYRR

SEQ ID NO: 10488 - protein, 609 aa, Homo sapiens
MAAENEASQESALGAYSPVDYMSITSFPRLPEDEPAPAAPLRGRKDEDAFLGDPDTDPDSFLKSARLQRLPSSSSEMGSQDGSPLRETRKDPFSAAAAECSCRQDGLTVIVTACLTFATGVTVALVMQIYFGDPQIFQQGAVVTDAARCTSLGIEVLSKQGSSVDAAVAAALCLGIVAPHSSGLGGGGVMLVHDIRRNESHLIDFRESAPGALREETLQRSWETKPGLLVGVPGMVKGLHEAHQLYGRLPWSQVLAFAAAVAQDGFNVTHDLARALAEQLPPNMSERFRETFLPSGRPPLPGSLLHRPDLAEVLDVLGTSGPAAFYAGGNLTLEMVAEAQHAGGVITEEDFSNYSALVEKPVCGVYRGHLVLSPPPPHTGPALISALNILEGFNLTSLVSREQALHWVAETLKIALALASRLGDPVYDSTITESMDDMLSKVEAAYLRGHINDSQAAPAPLLPVYELDGAPTAAQVLIMGPDDFIVAMVSSLNQPFGSGLITPSGILLNSQMLDFSWPNRTANHSAPSLENSVQPGKRPLSFLLPTVVRPAEGLCGTYLALGANGAARGLSGLTQHLNRQPALFRVGFERKGLLFSRTPQNGSMNVLRT

SEQ ID NO: 10489 - protein, 666 aa, Homo sapiens
MAAENEASQESALGAYSPVDYMSITSFPRLPEDEPAPAAPLRGRKDEDAFLGDPDTDPDSFLKSARLQRLPSSSSEMGSQDGSPLRETRKDPFSAAAAECSCRQDGLTVIVTACLTFATGVTVALVMQIYFGDPQIFQQGAVVTDAARCTSLGIEVLSKQGSSVDAAVAAALCLGIVAPHSSGLGGGGVMLVHDIRRNESHLIDFRESAPGALREETLQRSWETKVGTLPGLLVGVPGMVKGLHEAHQLYGRLPWSQVLAFAAAVAQDGFNVTHDLARALAEQLPPNMSERFRETFLPSGRPPLPGSLLHRPDLAEVLDVLGTSGPAAFYAGGNLTLEMVAEAQHAGGVITEEDFSNYSALVEKPVCGVYRGHLVLSPPPPHTGPALISALNILEGFNLTSLVSREQALHWVAETLKIALALASRLGDPVYDSTITESMDDMLSKVEAAYLRGHINDSQAAPAPLLPVYELDGAPTAAQVLIMGPDDFIVAMVSSLNQPFGSGLITPSGILLNSQMLDFSWPNRTANHSAPSLENSVQPGKRPLSFLLPTVVRPAEGLCGTYLALGANGAARGLSGLTQVLLNVLTLNRNLSDSLARGRLHPDLQSNLLQVDSEFTEEEIEFLEARGHHVEKVDVLSWVHGSRRTNNFIIAVKDPRSPDAAGATIL

SEQ ID NO: 10490 - protein, 581 aa, Homo sapiens
MAAENEASQESALGAYSPVDYMSITSFPRLPEDEPAPAAPLRGRKDEDAFLGDPDTDPDSFLKSARLQRLPSSSSEMGSQDGSPLRETRKDPFSAAAAECSCRQDGLTVIVTACLTFATGVTVALVMQIYFGDPQIFQQGAVVTDAARCTSLGIEVLSKQGSSVDAAVAAALCLGIVAPHSSGLGGGGVMLVHDIRRNESHLIDFRESAPGALREETLQRSWETKVGTLPGLLVGVPGMVKGLHEAHQLYGRLPWSQVLAFAAAVAQDGFNVTHDLARALAEQLPPNMSERFRETFLPSGRPPLPGSLLHRPDLAEVLDVLGTSGPAAFYAGGNLTLEMVAEAQHAGGVITEEDFSNYSALVEKPVCGVYRGHLVLSPPPPHTGPALISALNILEGFNLTSLVSREQALHWVAETLKIALALASRLGDPVYDSTITESMDDMLSKVEAAYLRGHINDSQAAPAPLLPVYELDGAPTAAQVLIMGPDDFIVAMVSSLNQPFGSGLITPSGILLNSQMLDFSWPNRTANHSAPSLENSVQPGKRPLSFLLPTVVRPAEGLCGTYLALGANGAARGLSGLTQGC

SEQ ID NO: 10491 - protein, 80 aa, Homo sapiens
MGRAMVARLGLGLLLLALLLPTQIYSSETTTGTSSNSSQSTSNSGLAPNPTNATTKAAGGALQSTASLFVVSLSLLHLYS

SEQ ID NO: 10492 - protein, 799 aa, Homo sapiens
MPRAPAPLYACLLGLCALLPRLAGLNICTSGSATSCEECLLIHPKCAWCSKEDFGSPRSITSRCDLRANLVKNGCGGEIESPASSFHVLRSLPLSSKGSGSAGWDVIQMTPQEIAVNLRPGDKTTFQLQVRQVEDYPVDLYYLMDLSLSMKDDLDNIRSLGTKLAEEMRKLTSNFRLGFGSFVDKDISPFSYTAPRYQTNPCIGYKLFPNCVPSFGFRHLLPLTDRVDSFNEEVRKQRVSRNRDAPEGGFDAVLQAAVCKEKIGWRKDALHLLVFTTDDVPHIALDGKLGGLVQPHDGQCHLNEANEYTASNQMDYPSLALLGEKLAENNINLIFAVTKNHYMLYKNFTALIPGTTVEILDGDSKNIIQLIINAYNSIRSKVELSVWDQPEDLNLFFTATCQDGVSYPGQRKCEGLKIGDTASFEVSLEARSCPSRHTEHVFALRPVGFRDSLEVGVTYNCTCGCSVGLEPNSARCNGSGTYVCGLCECSPGYLGTRCECQDGENQSVYQNLCREAEGKPLCSGRGDCSCNQCSCFESEFGKIYGPFCECDNFSCARNKGVLCSGHGECHCGECKCHAGYIGDNCNCSTDISTCRGRDGQICSERGHCLCGQCQCTEPGAFGEMCEKCPTCPDACSTKRDCVECLLLHSGKPDNQTCHSLCRDEVITWVDTIVKDDQEAVLCFYKTAKDCVMMFTYVELPSGKSNLTVLREPECGNTPNAMTILLAVVGSILLVGLALLAIWKLLVTIHDRREFAKFQSERSRARYEMASNPLYRKPISTHTVDFTFNKFNKSYNGTVD

SEQ ID NO: 10493 - protein, 784 aa, Homo sapiens
MSDQKKEEEEEAAAAAAMATEGGKTSEPENNNKKPKTSGSQDSQPSPLALLAATCSKIGTPGENQATGQQQIIIDPSQGLVQLQNQPQQLELVTTQLAGNAWQLVASTPPASKENNVSQPASSSSSSSSSNNGSASPTKTKSGNSSTPGQFQVIQVQNPSGSVQYQVIPQLQTVEGQQIQINPTSSSSLQDLQGQIKLISAGNNQAILTAANRTASGNILAQNLANQTVPVQIRPGVSIPLQLQTLPGTQAQVVTTLPINIGGVTLALPVINNVAAGGGTGQVGQPAATADSGTSNGNQLVSTPTNTTTSASTMPESPSSSTTCTTTASTSLTSSDTLVSSADTGQYASTSASSSERTIEESQTPAATESEAQSSSQLHANGMQNQQDQSNSLQQVQIVGQPILQQIQIQQPQQQIIQAIPPQSFQLQSGQTIQTIQQQPLQNVQLQAVNPTQVLIRAPTLTPSGQISWQTVQVQNIQSLSNLQVQNAGLSQQLTITPVSSSGGTTLAQIAPVAVAGAPITLNTAQLASVPNLQTVSVANLGAAGVQVQGVPVTITSVAGQQQGQDGVKVQQATIAPVTVAVGGIANATIGAVSPDQLTQVHLQQGQQTSDQEVQPGKRLRRVACSCPNCREGEGRGSNEPGKKKQHICHIEGCGKVYGKTSHLRAHLRWHTGERPFICNWMFCGKRFTRSDELQRHRRTHTGEKRFECPECSKRFMRSDHLSKHVKTHQNKKGGGTALAIVTSGELDSSVTEVLGSPRIVTVAAISQDSNPATPNVSTNMEEF

SEQ ID NO: 10494 - protein, 568 aa, Homo sapiens
MASKPAAGKSRGEKRKRVVLTLKEKIDICTRLEKGESRKALMQEYNVGMSTLYDIRAHKAQLLRFFASSDSNKALEQRRTLHTPKLEHLDRVLYEWFLGKRSEGVPVSGPMLIEKAKDFYEQMQLTEPCVFSGGWLWRFKARHGIKKLDASSEKQSADHQAAEQFCAFFRSLAAEHGLSAEQVYNADETGLFWRCLPNPTPEGGAVPGPKQGKDRLTVLMCANATGSHRLKPLAIGKCSGPRAFKGIQHLPVAYKAQGNAWVDKEIFSDWFHHIFVPSVREHFRTIGLPEDSKAVLLLDSSRAHPQEAELVSSNVFTIFLPASVASLVQPMEQGIRRDFMRNFINPPVPLQGPHARYNMNDAIFSVACAWNAVPSHVFRRAWRKLWPSVAFAEGSSSEEELEAECFPVKPHNKSFAHILELVKEGSSCPGQLRQRQAASWGVAGREAEGGRPPAATSPAEVVWSSEKTPKADQDGRGDPGEGEEVAWEQAAVAFDAVLRFAERQPCFSAQEVGQLRALRAVFRSQQQVRRRRGALGAVVKVEALQEGPGGCGATAQSPLPCSSTAGDN

SEQ ID NO: 10495 - protein, 1133 aa, Homo sapiens
MDVLAEEFGNLTPEQLAAPIPTVEEKWRLLPAFLKVKGLVKQHIDSFNYFINVEIKKIMKANEKVTSDADPMWYLKYLNIYVGLPDVEESFNVTRPVSPHECRLRDMTYSAPITVDIEYTRGSQRIIRNALPIGRMPIMLRSSNCVLTGKTPAEFAKLNECPLDPGGYFIVKGVEKVILIQEQLSKNRIIVEADRKGAVGASVTSSTHEKKSRTNMAVKQGRFYLRHNTLSEDIPIVIIFKAMGVESDQEIVQMIGTEEHVMAAFGPSLEECQKAQIFTQMQALKYIGNKVRRQRMWGGGPKKTKIEEARELLASTILTHVPVKEFNFRAKCIYTAVMVRRVILAQGDNKVDDRDYYGNKRLELAGQLLSLLFEDLFKKFNSEMKKIADQVIPKQRAAQFDVVKHMRQDQITNGMVNAISTGNWSLKRFKMDRQGVTQVLSRLSYISALGMMTRISSQFEKTRKVSGPRSLQPSQWGMLCPSDTPEGEACGLVKNLALMTHITTDMEDGPIVKLASNLGVEDVNLLCGEELSYPNVFLVFLNGNILGVIRDHKKLVNTFRLMRRAGYINEFVSISTNLTDRCVYISSDGGRLCRPYIIVKKQKPAVTNKHMEELAQGYRNFEDFLHESLVEYLDVNEENDCNIALYEHTINKDTTHLEIEPFTLLGVCAGLIPYPHHNQSPRNTYQCAMGKQAMGTIGYNQRNRIDTLMYLLAYPQKPMVKTKTIELIEFEKLPAGQNATVAVMSYSGYDIEDALVLNKASLDRGFGRCLVYKNAKCTLKRYTNQTFDKVMGPMLDAATRKPIWRHEILDADGICSPGEKVENKQVLVNKSMPTVTQIPLEGSNVPQQPQYKDVPITYKGATDSYIEKVMISSNAEDAFLIKMLLRQTRRPEIGDKFSSRHGQKGVCGLIVPQEDMPFCDSGICPDIIMNPHGFPSRMTVGKLIELLAGKAGVLDGRFHYGTAFGGSKVKDVCEDLVRHGYNYLGKDYVTSGITGEPLEAYIYFGPVYYQKLKHMVLDKMHARARGPRAVLTRQPTEGRSRDGGLRLGEMERDCLIGYGASMLLLERLMISSDAFEVDVCGQCGLLGYSGWCHYCKSSCHVSSLRIPYACKLLFQELQSMNIIPRLKLSKYNE

SEQ ID NO: 10496 - protein, 121 aa, Homo sapiens
MTDRNRDKKSTSPSNSDTEMKSEQLPPCVNPGNPVFSCMLDPKTLQTATSLSKPQMIMYKTNSSHYGEFLPIPQFFPCNYTPKEQVFSSHIRATGFYQNNTLNTAPDRTRTLDFPNIQHTL

SEQ ID NO: 10497 - protein, 859 aa, Homo sapiens [sequence omitted]

SEQ ID NO: 10498 - protein, 529 aa, Homo sapiens
MSSSSYAKNGTADGPHSPTSQVARGTTTRRSRLKRSDGSTTSTSFILRQGSADSYTSRPSDSDVSLEEDREAIRQEREQQAAIQLERAKSKPVAFAVKTNVSYCGALDEDVPVPSTAISFDAKDFLHIKEKYNNDWWIGRLVKEGCEIGFIPSPLRLENIRIQQEQKRGRFHGGKSSGNSSSSLGEMVSGTFRATPTSTGMLNLTLSRVSNHLFQTEHIPPYDVVPSMRPVVLVGPSLKGYEVTDMMQKALFDFLKHRFDGRISITRVTADISLAKRSVLNNPSKRAIIERSNTRSSLAEVQSEIERIFELARSLQLVVLDADTINHPAQLIKTSLAPIIVHVKVSSPKVLQRLIKSRGKSQSKHLNVQLVAADKLAQCPPEMFDVILDENQLEDACEHLGEYLEAYWRATHTTSSTPMTPLLGRNLGSTALSPYPTAISGLQSQRMRHSNHSTENSPIERRSLMTSDENYHNERARKSRNRLSSSSQHSRDHYPLVEEDYPDSYQDTYKPHRNRGSPGGYSHDSRHRL

SEQ ID NO: 10499 - protein, 5265 aa, Homo sapiens
MDSQNLAGEDKDSQPAADGPAASEDPSATESDLPNPHVGEVSVLSSGSPRLQETPQDCSGGPVRRCALCNCGEPALHGQRELRRFELPFDWPRCPVVSPGGSPGPNEAVLPSEDLSQIGFPEGLTPAHLGEPGGSCWAHHWCAAWSAGVWGQEGPQLCGVDKAIFSGISQRCSHCTRLGASIPCRSPGCPRLYHFPCATASGSFLSMKTLQLLCPEHSEGAAYLEEARCAVCEGPGELCDLFFCTSCGHHYHGACLDTALTARKRAGWQCPECKVCQACRKPGNDSKMLVCETCDKGYHTFCLKPPMEELPAHSWKCKACRVCRACGAGSAELNPNSEWFENYSLCHRCHKAQGGQTIRSVAEQHTPVCSRFSPPEPGDTPTDEPDALYVACQGQPKGGHVTSMQPKEPGPLQCEAKPLGKAGVQLEPQLEAPLNEEMPLLPPPEESPLSPPPEESPTSPPPEASRLSPPPEELPASPLPEALHLSRPLEESPLSPPPEESPLSPPPESSPFSPLEESPLSPPEESPPSPALETPLSPPPEASPLSPPFEESPLSPPPEELPTSPPPEASRLSPPPEESPMSPPPEESPMSPPPEASRLFPPFEESPLSPPPEESPLSPPPEASRLSPPPEDSPMSPPPEESPMSPPPEVSRLSPLPVVSRLSPPPEESPLSPPALSPLGELEYPFGAKGDSDPESPLAAPILETPISPPPEANCTDPEPVPPMILPPSPGSPVGPASPILMEPLPPQCSPLLQHSLVPQNSPPSQCSPPALPLSVPSPLSPIGKVVGVSDEAELHEMETEKVSEPECPALEPSATSPLPSPMGDLSCPAPSPAPALDDFSGLGEDTAPLDGIDAPGSQPEPGQTPGSLASELKGSPVLLDPEELAPVTPMEVYPECKQTAGRGSPCEEQEEPRAPVAPTPPTLIKSDIVNEISNLSQGDASASFPGSEPLLGSPDPEGGGSLSMELGVSTDVSPARDEGSLRLCTDSLPETDDSLLCDAGTAISGGKAEGEKGRRRSSPARSRIKQGRSSSFPGRRRPRGGAHGGRGRGRARLKSTASSIETLVVADIDSSPSKEEEEEDDDTMQNTVVLFSNTDKFVLMQDMCVVCGSFGRGAEGHLLACSQCSQCYHPYCVNSKITKVMLLKGWRCVECIVCEVCGQASDPSRLLLCDDCDISYHTYCLDPPLLTVPKGGWKCKWCVSCMQCGAASPGFHCEWQNSYTHCGPCASLVTCPICHAPYVEEDLLIQCRHCERWMHAGCESLFTEDDVDHAPDEGFDCVSCQPYVVKPVAPVAPPELVPMKVKEPEPQYFRFEGVWLTETGMALLRNLTMSPLHKRRQRRGRLGLPGEAGLEGSEPSDALGPDDKKDGDLDTDELLKGEGGVEHMECEIKLEGPVSPDVEPGKEETEESKKRKRKPYRPGIGGFMVRQRKSHTRTKKGPAAQAEVLSGDGQPDEGETVIPADLPAEGAVEQSLAEGDEKKKQQRRGRKRSKLEGMFPAYLQEAFFGKELLDLSRKALFAVGVGRPSFGLGTPKAKGDGGSERKELPTSQKGDDGPDIADEESRGLEGKADTPGPEDGGVKASPVPSDPEKPGTPGEGMLSSDLDRISTEELPKMESKDLQQLFKDVLGSEREQHLGCGTPGLEGSRTPLQRPFLQGGLPLGNLPSSSPMDSYPGLCQSPFLDSRERGGFFSPEPGEPDSPWTGSGGTTPSTPTTPTTEGEGDGLSYNQRSLQRWEKDEELGQLSTISPVLYANINFPNLKQDYPDWSSRCKQIMKLWRKVPAADKAPYLQKAKDNRAAHRINKVQKQAESQINKQTKVGDIARKTDRPALHLRIPPQPGALGSPPPAAAPTIFIGSPTTPAGLSTSADGFLKPPAGSVPGPDSPGELFLKLPPQVPAQAPSQDPFGLAPAYPLEPRFPTAPPTYPPYPSPTGAPAQPPMLGASSRPGAGQPGEFHTTPPGTPRHQPSTPDPFLKPRCPSLDNLAVPESPGVGGGKASEPLLSPPPFGESRKALEVKKEELGASSPSYGPPNLGFVDSPSSGTHLGGLELKTPDVFKAPLTPRASQVEPQSPGLGLRPQEPPPAQALAPSPPSHPDIFRPGSYTDPYAQPPLTPRPQPPPPESCCALPPRSLPSDPFSRVPVSPQSQSSSQSPLTPRPLSAEAFCPSPVTPRFQSPDPYSRPPSRPQSRDPFAPLHKPPRPQPPEVAFKAGSLAHTSLGAGGFPAALPAGPAGELHAKVPSGQPPNFVRSPGTGAFVGTPSPMRFTFPQAVGEPSLKPPVPQPGLPPPHGINSHFGPGPTLGKPQSTNYTVATGNFHPSGSPLGPSSGSTGESYGLSPLRPPSVLPPPAPDGSLPYLSHGASQRSGITSPVEKREDPGTGMGSSLATAELPGTQDPGMSGLSQTELEKQRQRQRLRELLIRQQIQRNTLRQEKETAAAAAGAVGPPGSWGAEPSSPAFEQLSRGQTPFAGTQDKSSLVGLPPSKLSGPILGPGSFPSDDRLSRPPPPATPSSMDVNSRQLVGGSQAFYQRAPYPGSLPLQQQQQQLWQQQQATAATSMRFAMSARFPSTPGPELGRQALGSPLAGISTRLPGPGEPVPGPAGPAQFIELRHNVQKGLGPGGTPFPGQGPPQRPRFYPVSEDPHRLAPEGLRGLAVSGLPPQKPSAPPAPELNNSLHPTPHTKGPTLPTGLELVNRPPSSTELGRPNPLALEAGKLPCEDPELDDDFDAHKALEDDEELAHLGLGVDVAKGDDELGTLENLETNDPHLDDLLNGDEFDLLAYTDPELDTGDKKDIFNEHLRLVESANEEAEREALLRGVEPGPLGPEERPPPAADASEPRLASVLPEVKPKVEEGGRHPSPCQFTIATPKVEPAPAANSLGLGLKPGQSMMGSRDTRMGTGPFSSSGHTAEKASFGATGGPPAHLLTPSPLSGPGGSSLLEKFELESGALTLPGGPAASGDELDKMESSLVASELPLLIEDLLEHEKKELQKKQQLSAQLQPAQQQQQQQQQHSLLPAPGPAQAMSLPHEGSSPSLAGSQQQLSLGLAVARQPGLPQPLMPTQPPAHALQQRLAPSMAMVSNQGHMLSGQHGGQAGLVPQQSSQPVLSQKPMGTMPPSMCMKPQQLAMQQQLANSFFPDTDLDKFAAEDIIGPIAKAKMVALKGIKKVMAQGSIGVAPGMNRQQVSLLAQRLSGGPSSDLQNHVAAGSGQERSAGDPSQPRPNPPTFAQGVINEADQRQYEEWLFHTQQLLQMQLKVLEEQIGVHRKSRKALCAKQRTAKKAGREFPEADAEKLKLVTEQQSKIQKQLDQVRKQQKEHTNLMAEYRNKQQQQQQQQQQQQQQHSAVLALSPSQSPRLLTKLPGQLLPGHGLQPPQGPPGGQAGGLRLTPGGMALPGQPGGPFLNTALAQQQQQQHSGGAGSLAGPSGGFFPGNLALRSLGPDSRLLQERQLQLQQQRMQLAQKLQQQQQQQQQQQHLLGQVAIQQQQQQGPGVQTNQALGPKPQGLMPPSSHQGLLVQQLSPQPPQGPQGMLGPAQVAVLQQQHPGALGPQGPHRQVLMTQSRVLSSPQLAQQGQGLMGHRLVTAQQQQQQQQHQQQGSMAGLSHLQQSLMSHSGQPKLSAQPMGSLQQLQQQQQLQQQQQLQQQQQQQLQQQQQLQQQQLQQQQQQQQLQQQQQQQLQQQQQQLQQQQQQQQQQFQQQQQQQQMGLLNQSRTLLSPQQQQQQQVALGPGMPAKPLQHFSSPGALGPTLLLTGKEQNTVDPAVSSEATEGPSTHQGGPLAIGTTPESMATEPGEVKPSLSGDSQLLLVQPQPQPQPSSLQLQPPLRLPGQQQQQVSLLHTAGGGSHGQLGSGSSSEASSVPHLLAQPSVSLGDQPGSMTQNLLGPQQPMLERPMQNNTGPQPPKPGPVLQSGQGLPGVGIMPTVGQLRAQLQGVLAKNPQLRHLSPQQQQQLQALLMQRQLQQSQAVRQTPPYQEPGTQTSPLQGLLGCQPQLGGFPGPQTGPLQELGAGPRPQGPPRLPAPPGALSTGPVLGPVHPTPPPSSPQEPKRPSQLPSPSSQLPTEAQLPPTHPGTPKPQGPTLEPPPGRVSPAAAQLADTLFSKGLGPWDPPDNLAETQKPEQSSLVPGHLDQVNGQVVPEASQLSIKQEPREEPCALGAQSVKREANGEPIGAPGTSNHLLLAGPRSEAGHLLLQKLLRAKNVQLSTGQGSEGLRAEINGHIDSKLAGLEQKLQGTPSNKEDAAARKPLTPKPKRVQKASDRLVSSRKKLRKEDGVRASEALLKQLKQELSLLPLTEPAITANFSLFAPFGSGCPVNGQSQLRGAFGSGALPTGPDYYSQLLTKNNLSNPPTPPSSLPPTPPPSVQQKMVNGVTPSEELGEHPKDAASARDSERALRDTSEVKSLDLLAALPTPPHNQTEDVRMESDEDSDSPDSIVPASSPESILGEEAPRFPHLGSGRWEQEDRALSPVIPLIPRDSIPVFPDTKPYGALGLEVPGKLPVTTWEKGKGSEVSVMLTVSAAADKNLNGVMVAVAELLSMKIPNSYEVLFPESPARGGTEPKKGEAEGPGGKEKGLEGKSPDTGPDWLKQFDAVLAGYTLKRQLDILSLLKQESPAPEPPTQHRYTYNVSNLDVRQLSAPPPEEPSPPPSPLAPSPASPPTEPLVELPTEPLAEPPVPSPLPLASSPESARPKPRARPPEEGEDTRPPRLKKWKGVRWKRLRLLLTIQKGSGRQEDEREVAEFMEQLGTALRPDKVPRDMRRCCFCHEEGDGATDGPARLLNLDLDLWVHLNCALWSTEVYETQGGALMNVEVALHRGLLTKCSLCQRTGATSSCNRMRCPNVYHFGCAIRAKCMFFKDKTMLCPMHKIKGPCEQELSSFAVFRRVYIERDEVKQIASIIQRGERLHMFRVGGLVFHAIGQLLPHQMADFHSATALYPVGYEATRIYWSLRTNNRRCCYRCSIGENNGRPEFVIKVIEQGLEDLVFTDASPQAVWNRIIEPVAAMRKEADMLRLFPEYLKGEELFGLTVHAVLRIAESLPGVESCQNYLFRYGRHPLMELPLMINPTGCARSEPKILTHYKRPHTLNSTSMSKAYQSTFTGETNTPYSKQFVHSKSSQYRRLRTEWKNNVYLARSRIQGLGLYAAKDLEKHTMVIEYIGTIIRNEVANRREKIYEEQNRGIYMFRINNEHVIDATLTGGPARYINHSCAPNCVAEVVTFDKEDKIIIISSRRIPKGEELTYDYQFDFEDDQHEIPCHCGAWNCRKWMN

SEQ ID NO: 10500 - protein, 5262 aa, Homo sapiens
MDSQNLAGEDKDSQPAADGPAASEDPSATESDLPNPHVGEVSVLSSGSPRLQETPQDCSGGPVRRCALCNCGEPALHGQRELRRFELPFDWPRCPVVSPGGSPGPNEAVLPSEDLSQIGFPEGLTPAHLGEPGGSCWAHHWCAAWSAGVWGQEGPQLCGVDKAIFSGISQRCSHCTRLGASIPCRSPGCPRLYHFPCATASGSFLSMKTLQLLCPEHSEGAAYLEEARCAVCEGPGELCDLFFCTSCGHHYHGACLDTALTARKRAGWQCPECKVCQACRKPGNDSKMLVCETCDKGYHTFCLKPPMEELPAHSWKCKACRVCRACGAGSAELNPNSEWFENYSLCHRCHKAQGGQTIRSVAEQHTPVCSRFSPPEPGDTPTDEPDALYVACQGQPKGGHVTSMQPKEPGPLQCEAKPLGKAGVQLEPQLEAPLNEEMPLLPPPEESPLSPPPEESPTSPPPEASRLSPPPEELPASPLPEALHLSRPLEESPLSPPPEESPLSPPPESSPFSPLEESPLSPPEESPPSPALETPLSPPPEASPLSPPFEESPLSPPPEELPTSPPPEASRLSPPPEESPMSPPPEESPMSPPPEASRLFPPFEESPLSPPPEESPLSPPPEASRLSPPPEDSPMSPPPEESPMSPPPEVSRLSPLPVVSRLSPPPEESPLSPPALSPLGELEYPFGAKGDSDPESPLAAPILETPISPPPEANCTDPEPVPPMILPPSPGSPVGPASPILMEPLPPQCSPLLQHSLVPQNSPPSQCSPPALPLSVPSPLSPIGKVVGVSDEAELHEMETEKVSEPECPALEPSATSPLPSPMGDLSCPAPSPAPALDDFSGLGEDTAPLDGIDAPGSQPEPGQTPGSLASELKGSPVLLDPEELAPVTPMEVYPECKQTAGRGSPCEEQEEPRAPVAPTPPTLIKSDIVNEISNLSQGDASASFPGSEPLLGSPDPEGGGSLSMELGVSTDVSPARDEGSLRLCTDSLPETDDSLLCDAGTAISGGKAEGEKGRRRSSPARSRIKQGRSSSFPGRRRPRGGAHGGRGRGRARLKSTASSIETLVVADIDSSPSKEEEEEDDDTMQNTVVLFSNTDKFVLMQDMCVVCGSFGRGAEGHLLACSQCSQCYHPYCVNSKITKVMLLKGWRCVECIVCEVCGQASDPSRLLLCDDCDISYHTYCLDPPLLTVPKGGWKCKWCVSCMQCGAASPGFHCEWQNSYTHCGPCASLVTCPICHAPYVEEDLLIQCRHCERWMHAGCESLFTEDDVDHAPDEGFDCVSCQPYVVKPVAPVAPPELVPMKVKEPEPQYFRFEGVWLTETGMALLRNLTMSPLHKRRQRRGRLGLPGEAGLEGSEPSDALGPDDKKDGDLDTDELLKGEGGVEHMECEIKLEGPVSPDVEPGKEETEESKKRKRKPYRPGIGGFMVRQRKSHTRTKKGPAAQAEVLSGDGQPDEVIPADLPAEGAVEQSLAEGDEKKKQQRRGRKRSKLEGMFPAYLQEAFFGKELLDLSRKALFAVGVGRPSFGLGTPKAKGDGGSERKELPTSQKGDDGPDIADEESRGLEGKADTPGPEDGGVKASPVPSDPEKPGTPGEGMLSSDLDRISTEELPKMESKDLQQLFKDVLGSEREQHLGCGTPGLEGSRTPLQRPFLQGGLPLGNLPSSSPMDSYPGLCQSPFLDSRERGGFFSPEPGEPDSPWTGSGGTTPSTPTTPTTEGEGDGLSYNQRSLQRWEKDEELGQLSTISPVLYANINFPNLKQDYPDWSSRCKQIMKLWRKVPAADKAPYLQKAKDNRAAHRINKVQKQAESQINKQTKVGDIARKTDRPALHLRIPPQPGALGSPPPAAAPTIFIGSPTTPAGLSTSADGFLKPPAGSVPGPDSPGELFLKLPPQVPAQAPSQDPFGLAPAYPLEPRFPTAPPTYPPYPSPTGAPAQPPMLGASSRPGAGQPGEFHTTPPGTPRHQPSTPDPFLKPRCPSLDNLAVPESPGVGGGKASEPLLSPPPFGESRKALEVKKEELGASSPSYGPPNLGFVDSPSSGTHLGGLELKTPDVFKAPLTPRASQVEPQSPGLGLRPQEPPPAQALAPSPPSHPDIFRPGSYTDPYAQPPLTPRPQPPPPESCCALPPRSLPSDPFSRVPVSPQSQSSSQSPLTPRPLSAEAFCPSPVTPRFQSPDPYSRPPSRPQSRDPFAPLHKPPRPQPPEVAFKAGSLAHTSLGAGGFPAALPAGPAGELHAKVPSGQPPNFVRSPGTGAFVGTPSPMRFTFPQAVGEPSLKPPVPQPGLPPPHGINSHFGPGPTLGKPQSTNYTVATGNFHPSGSPLGPSSGSTGESYGLSPLRPPSVLPPPAPDGSLPYLSHGASQRSGITSPVEKREDPGTGMGSSLATAELPGTQDPGMSGLSQTELEKQRQRQRLRELLIRQQIQRNTLRQEKETAAAAAGAVGPPGSWGAEPSSPAFEQLSRGQTPFAGTQDKSSLVGLPPSKLSGPILGPGSFPSDDRLSRPPPPATPSSMDVNSRQLVGGSQAFYQRAPYPGSLPLQQQQQQLWQQQQATAATSMRFAMSARFPSTPGPELGRQALGSPLAGISTRLPGPGEPVPGPAGPAQFIELRHNVQKGLGPGGTPFPGQGPPQRPRFYPVSEDPHRLAPEGLRGLAVSGLPPQKPSAPPAPELNNSLHPTPHTKGPTLPTGLELVNRPPSSTELGRPNPLALEAGKLPCEDPELDDDFDAHKALEDDEELAHLGLGVDVAKGDDELGTLENLETNDPHLDDLLNGDEFDLLAYTDPELDTGDKKDIFNEHLRLVESANEEAEREALLRGVEPGPLGPEERPPPAADASEPRLASVLPEVKPKVEEGGRHPSPCQFTIATPKVEPAPAANSLGLGLKPGQSMMGSRDTRMGTGPFSSSGHTAEKASFGATGGPPAHLLTPSPLSGPGGSSLLEKFELESGALTLPGGPAASGDELDKMESSLVASELPLLIEDLLEHEKKELQKKQQLSAQLQPAQQQQQQQQQHSLLPAPGPAQAMSLPHEGSSPSLAGSQQQLSLGLAVARQPGLPQPLMPTQPPAHALQQRLAPSMAMVSNQGHMLSGQHGGQAGLVPQQSSQPVLSQKPMGTMPPSMCMKPQQLAMQQQLANSFFPDTDLDKFAAEDIIGPIAKAKMVALKGIKKVMAQGSIGVAPGMNRQQVSLLAQRLSGGPSSDLQNHVAAGSGQERSAGDPSQPRPNPPTFAQGVINEADQRQYEEWLFHTQQLLQMQLKVLEEQIGVHRKSRKALCAKQRTAKKAGREFPEADAEKLKLVTEQQSKIQKQLDQVRKQQKEHTNLMAEYRNKQQQQQQQQQQQQQQHSAVLALSPSQSPRLLTKLPGQLLPGHGLQPPQGPPGGQAGGLRLTPGGMALPGQPGGPFLNTALAQQQQQQHSGGAGSLAGPSGGFFPGNLALRSLGPDSRLLQERQLQLQQQRMQLAQKLQQQQQQQQQQQHLLGQVAIQQQQQQGPGVQTNQALGPKPQGLMPPSSHQGLLVQQLSPQPPQGPQGMLGPAQVAVLQQQHPGALGPQGPHRQVLMTQSRVLSSPQLAQQGQGLMGHRLVTAQQQQQQQQHQQQGSMAGLSHLQQSLMSHSGQPKLSAQPMGSLQQLQQQQQLQQQQQLQQQQQQQLQQQQQLQQQQLQQQQQQQQLQQQQQQQLQQQQQQLQQQQQQQQQQFQQQQQQQQMGLLNQSRTLLSPQQQQQQQVALGPGMPAKPLQHFSSPGALGPTLLLTGKEQNTVDPAVSSEATEGPSTHQGGPLAIGTTPESMATEPGEVKPSLSGDSQLLLVQPQPQPQPSSLQLQPPLRLPGQQQQQVSLLHTAGGGSHGQLGSGSSSEASSVPHLLAQPSVSLGDQPGSMTQNLLGPQQPMLERPMQNNTGPQPPKPGPVLQSGQGLPGVGIMPTVGQLRAQLQGVLAKNPQLRHLSPQQQQQLQALLMQRQLQQSQAVRQTPPYQEPGTQTSPLQGLLGCQPQLGGFPGPQTGPLQELGAGPRPQGPPRLPAPPGALSTGPVLGPVHPTPPPSSPQEPKRPSQLPSPSSQLPTEAQLPPTHPGTPKPQGPTLEPPPGRVSPAAAQLADTLFSKGLGPWDPPDNLAETQKPEQSSLVPGHLDQVNGQVVPEASQLSIKQEPREEPCALGAQSVKREANGEPIGAPGTSNHLLLAGPRSEAGHLLLQKLLRAKNVQLSTGQGSEGLRAEINGHIDSKLAGLEQKLQGTPSNKEDAAARKPLTPKPKRVQKASDRLVSSRKKLRKEDGVRASEALLKQLKQELSLLPLTEPAITANFSLFAPFGSGCPVNGQSQLRGAFGSGALPTGPDYYSQLLTKNNLSNPPTPPSSLPPTPPPSVQQKMVNGVTPSEELGEHPKDAASARDSERALRDTSEVKSLDLLAALPTPPHNQTEDVRMESDEDSDSPDSIVPASSPESILGEEAPRFPHLGSGRWEQEDRALSPVIPLIPRDSIPVFPDTKPYGALGLEVPGKLPVTTWEKGKGSEVSVMLTVSAAADKNLNGVMVAVAELLSMKIPNSYEVLFPESPARGGTEPKKGEAEGPGGKEKGLEGKSPDTGPDWLKQFDAVLAGYTLKRQLDILSLLKQESPAPEPPTQHRYTYNVSNLDVRQLSAPPPEEPSPPPSPLAPSPASPPTEPLVELPTEPLAEPPVPSPLPLASSPESARPKPRARPPEEGEDTRPPRLKKWKGVRWKRLRLLLTIQKGSGRQEDEREVAEFMEQLGTALRPDKVPRDMRRCCFCHEEGDGATDGPARLLNLDLDLWVHLNCALWSTEVYETQGGALMNVEVALHRGLLTKCSLCQRTGATSSCNRMRCPNVYHFGCAIRAKCMFFKDKTMLCPMHKIKGPCEQELSSFAVFRRVYIERDEVKQIASIIQRGERLHMFRVGGLVFHAIGQLLPHQMADFHSATALYPVGYEATRIYWSLRTNNRRCCYRCSIGENNGRPEFVIKVIEQGLEDLVFTDASPQAVWNRIIEPVAAMRKEADMLRLFPEYLKGEELFGLTVHAVLRIAESLPGVESCQNYLFRYGRHPLMELPLMINPTGCARSEPKILTHYKRPHTLNSTSMSKAYQSTFTGETNTPYSKQFVHSKSSQYRRLRTEWKNNVYLARSRIQGLGLYAAKDLEKHTMVIEYIGTIIRNEVANRREKIYEEQNRGIYMFRINNEHVIDATLTGGPARYINHSCAPNCVAEVVTFDKEDKIIIISSRRIPKGEELTYDYQFDFEDDQHEIPCHCGAWNCRKWMN

SEQ ID NO: 10501 - protein, 492 aa, Homo sapiens
MAAGPIRVVLVLLGVLSVCAASGHGSVAEREAGGEAEWAEPWDGAVFRPPAALGAVGVTRSSGTPRPGREEAGDLPVLLWWSPGLFPHFPGDSERIECARGACVASRNRRALRDSRTRALLFYGTDFRASAAPLPRLAHQSWALLHEESPLNNFLLSHGPGIRLFNLTSTFSRHSDYPLSLQWLPGTAYLRRPVPPPMERAEWRRRGYAPLLYLQSHCDVPADRDRYVRELMRHIPVDSYGKCLQNRELPTARLQDTATATTEDPELLAFLSRYKFHLALENAICNDYMTEKLWRPMHLGAVPVYRGSPSVRDWMPNNHSVILIDDFESPQKLAEFIDFLDKNDEEYMKYLAYKQPGGITNQFLLDSLKHREWGVNDPLLPNYLNGFECFVCDYELARLDAEKAHAASPGDSPVFEPHIAQPSHMDCPVPTPGFGNVEEIPENDSWKEMWLQDYWQGLDQGEALTAMIHNNETEQTKFWDYLHEIFMKRQHL

SEQ ID NO: 10502 - protein, 533 aa, Homo sapiens
MGPRGAASLPRGPGPRRLLLPVVLPLLLLLLLAPPGSGAGASRPPHLVFLLADDLGWNDVGFHGSRIRTPHLDALAAGGVLLDNYYTQPLCTPSRSQLLTGRYQIRTGLQHQIIWPCQPSCVPLDEKLLPQLLKEAGYTTHMVGKWHLGMYRKECLPTRRGFDTYFGYLLGSEDYYSHERCTLIDALNVTRCALDFRDGEEVATGYKNMYSTNIFTKRAIALITNHPPEKPLFLYLALQSVHEPLQVPEEYLKPYDFIQDKNRHHYAGMVSLMDEAVGNVTAALKSSGLWNNTVFIFSTDNGGQTLAGGNNWPLRGRKWSLWEGGVRGVGFVASPLLKQKGVKNRELIHISDWLPTLVKLARGHTNGTKPLDGFDVWKTISEGSPSPRIELLHNIDPNFVDSSPCPRNSMAPAKDDSSLPEYSAFNTSVHAAIRHGNWKLLTGYPGCGYWFPPPSQYNVSEIPSSDPPTKTLWLFDIDRDPEERHDLSREYPHIVTKLLSRLQFYHKHSVPVYFPAQDPRCDPKATGVWGPWM

SEQ ID NO: 10503 - protein, 413 aa, Homo sapiens
MGPRGAASLPRGPGPRRLLLPVVLPLLLLLLLAPPGSGAGASRPPHLVFLLADDLGWNDVGFHGSRIRTPHLDALAAGGVLLDNYYTQPLCTPSRSQLLTGRYQIRTGLQHQIIWPCQPSCVPLDEKLLPQLLKEAGYTTHMVGKWHLGMYRKECLPTRRGFDTYFGYLLGSEDYYSHERCTLIDALNVTRCALDFRDGEEVATGYKNMYSTNIFTKRAIALITNHPPEKPLFLYLALQSVHEPLQVPEEYLKPYDFIQDKNRHHYAGMVSLMDEAVGNVTAALKSSGLWNNTVFIFSTDNGGQTLAGGNNWPLRGRKWSLWEGGVRGVGFVASPLLKQKGVKNRELIHISDWLPTLVKLARGHTNGTKPLDGFDVWKTISEGSPSPRIELLHNIDPNFVDSSPYWPECSLLL

SEQ ID NO: 10504 - protein, 467 aa, Homo sapiens
MRPQELPRLAFPLLLLLLLLLPPPPCPAHSATRFDPTWESLDARQLPAWFDQAKFGIFIHWGVFSVPSFGSEWFWWYWQKEKIPKYVEFMKDNYPPSFKYEDFGPLFTAKFFNANQWADIFQASGAKYIVLTSKHHEGFTLWGSEYSWNWNAIDEGPKRDIVKELEVAIRNRTDLRFGLYYSLFEWFHPLFLEDESSSFHKRQFPVSKTLPELYELVNNYQPEVLWSDGDGGAPDQYWNSTGFLAWLYNESPVRGTVVTNDRWGAGSICKHGGFYTCSDRYNPGHLLPHKWENCMTIDKLSWGYRREAGISDYLTIEELVKQLVETVSCGGNLLMNIGPTLDGTISVVFEERLRQMGSWLKVNGEAIYETHTWRSQNDTVTPDVWYTSKPKEKLVYAIFLKWPTSGQLFLGHPKAILGATEVKLLGHGQPLNWISLEQNGIMVELPQLTIHQMPCKWGWALALTNVI

SEQ ID NO: 10505 - protein, 109 aa, Homo sapiens
QLVETVSCGGNLLMNIGPTLDGTISVVFEERLRQMGSWLKVNGEAIYETHTWRSQNDTVTPDVWYTSKPKEKLVYAIFLKWPTSGQLFLGHPKAILGATEVRGNFTLFL

SEQ ID NO: 10506 - protein, 945 aa, Homo sapiens
MGARSGARGALLLALLLCWDPRLSQAGTDSGSEVLPDSFPSAPAEPLPYFLQEPQDAYIVKNKPVELRCRAFPATQIYFKCNGEWVSQNDHVTQEGLDEATGLRVREVQIEVSRQQVEELFGLEDYWCQCVAWSSAGTTKSRRAYVRIAYLRKNFDQEPLGKEVPLDHEVLLQCRPPEGVPVAEVEWLKNEDVIDPTQDTNFLLTIDHNLIIRQARLSDTANYTCVAKNIVAKRRSTTATVIVYVNGGWSSWAEWSPCSNRCGRGWQKRTRTCTNPAPLNGGAFCEGQAFQKTACTTICPVDGAWTEWSKWSACSTECAHWRSRECMAPPPQNGGRDCSGTLLDSKNCTDGLCMQNKKTLSDPNSHLLEASGDAALYAGLVVAIFVVVAILMAVGVVVYRRNCRDFDTDITDSSAALTGGFHPVNFKTARPSNPQLLHPSVPPDLTASAGIYRGPVYALQDSTDKIPMTNSPLLDPLPSLKVKVYSSSTTGSGPGLADGADLLGVLPPGTYPSDFARDTHFLHLRSASLGSQQLLGLPRDPGSSVSGTFGCLGGRLSIPGTGVSLLVPNGAIPQGKFYEMYLLINKAESTLPLSEGTQTVLSPSVTCGPTGLLLCRPVILTMPHCAEVSARDWIFQLKTQAHQGHWEEVVTLDEETLNTPCYCQLEPRACHILLDQLGTYVFTGESYSRSAVKRLQLAVFAPALCTSLEYSLRVYCLEDTPVALKEVLELERTLGGYLVEEPKPLMFKDSYHNLRLSLHDLPHAHWRSKLLAKYQEIPFYHIWSGSQKALHCTFTLERHSLASTELTCKICVRQVEGEGQIFQLHTTLAETPAGSLDTLCSAPGSTVTTQLGPYAFKIPLSIRQKICNSLDAPNSRGNDWRMLAQKLSMDRYLNYFATKASPTGVILDLWEALQQDDGDLNSLASALEEMGKSEMLVAVATDGDC

SEQ ID NO: 10507 - protein, 934 aa, Homo sapiens
MGARSGARGALLLALLLCWDPRLSQAGTDSGSEVLPDSFPSAPAEPLPYFLQEPQDAYIVKNKPVELRCRAFPATQIYFKCNGEWVSQNDHVTQEGLDEATGLRVREVQIEVSRQQVEELFGLEDYWCQCVAWSSAGTTKSRRAYVRIAYLRKNFDQEPLGKEVPLDHEVLLQCRPPEGVPVAEVEWLKNEDVIDPTQDTNFLLTIDHNLIIRQARLSDTANYTCVAKNIVAKRRSTTATVIVYVNGGWSSWAEWSPCSNRCGRGWQKRTRTCTNPAPLNGGAFCEGQAFQKTACTTICPVDGAWTEWSKWSACSTECAHWRSRECMAPPPQNGGRDCSGTLLDSKNCTDGLCMQMLEASGDAALYAGLVVAIFVVVAILMAVGVVVYRRNCRDFDTDITDSSAALTGGFHPVNFKTARPSNPQLLHPSVPPDLTASAGIYRGPVYALQDSTDKIPMTNSPLLDPLPSLKVKVYSSSTTGSGPGLADGADLLGVLPPGTYPSDFARDTHFLHLRSASLGSQQLLGLPRDPGSSVSGTFGCLGGRLSIPGTGVSLLVPNGAIPQGKFYEMYLLINKAESTLPLSEGTQTVLSPSVTCGPTGLLLCRPVILTMPHCAEVSARDWIFQLKTQAHQGHWEEVVTLDEETLNTPCYCQLEPRACHILLDQLGTYVFTGESYSRSAVKRLQLAVFAPALCTSLEYSLRVYCLEDTPVALKEVLELERTLGGYLVEEPKPLMFKDSYHNLRLSLHDLPHAHWRSKLLAKYQEIPFYHIWSGSQKALHCTFTLERHSLASTELTCKICVRQVEGEGQIFQLHTTLAETPAGSLDTLCSAPGSTVTTQLGPYAFKIPLSIRQKICNSLDAPNSRGNDWRMLAQKLSMDRYLNYFATKASPTGVILDLWEALQQDDGDLNSLASALEEMGKSEMLVAVATDGDC

SEQ ID NO: 10508 - protein, 931 aa, Homo sapiens [sequence omitted]

SEQ ID NO: 10509 - protein, 353 aa, Homo sapiens
MAAAALPPRPLLLLPLVLLLSGRPTRADSKVFGDLDQVRMTSEGSDCRCKCIMRPLSKDACSRVRSGRARVEDFYTVETVSSGTDCRCSCTAPPSSLNPCENEWKMEKLKKQAPELLKSIKANLSRENEVVKDSVRHLSEQLRHYENHSAIMLGIKKELSRLGLQLLQKDAAAAPATPATGTGSKAQDTARGKGKDISKYGSVQKSFADRGLPKPPKEKLLQVEKLRKESGKGSFLQPTAKPRALAQQQAVIRGFTYYKAGKQEVTEAVADNALQGTSWLEQLPPKVEGRSNSAEPNSAEQDEAEPRSSERVDLASGTTHLILPPHSLHHHSTPVLATPAPFHLQCHNKPVPS

SEQ ID NO: 10510 - protein, 680 aa, Homo sapiens
MVPGVPGAVLTLCLWLAASSGCLAAGPGAAAARRLDESLSAGSVQRAPCASRCLSLQITRISAFFQHFQNNGSLVWCQNHKQCSKCLEPCKESGDLRKHQCQSFCEPLFPKKSYECLTSCEFLKYILLVKQGDCPAPEKASGFAAACVESCEVDNECSGVKKCCSNGCGHTCQVPKTLYKGVPLKPRKELRFTELQSGQLEVKWSSKFNISIEPVIYVVQRRWNYGIHPSEDDATHWQTVAQTTDERVQLTDIRPSRWYQFRVAAVNVHGTRGFTAPSKHFRSSKDPSAPPAPANLRLANSTVNSDGSVTVTIVWDLPEEPDIPVHHYKVFWSWMVSSKSLVPTKKKRRKTTDGFQNSVILEKLQPDCDYVVELQAITYWGQTRLKSAKVSLHFTSTHATNNKEQLVKTRKGGIQTQLPFQRRRPTRPLEVGAPFYQDGQLQVKVYWKKTEDPTVNRYHVRWFPEACAHNRTTGSEASSGMTHENYIILQDLSFSCKYKVTVQPIRPKSHSKAEAVFFTTPPCSALKGKSHKPIGCLGEAGHVLSKVLAKPENLSASFIVQDVNITGHFSWKMAKANLYQPMTGFQVTWAEVTTESRQNSLPNSIISQSQILPSDHYVLTVPNLRPSTLYRLEVQVLTPGGEGPATIKTFRTPELPPSSAHRSHLKHRHPHHYKPSPERY

SEQ ID NO: 10511 - protein, 887 aa, Homo sapiens
MAGRVPSLLVLLVFPSSCLAFRSPLSVFKRFKETTRPFSNECLGTTRPVVPIDSSDFALDIRMPGVTPKQSDTYFCMSMRIPVDEEAFVIDFKPRASMDTVHHMLLFGCNMPSSTGSYWFCDEGTCTDKANILYAWARNAPPTRLPKGVGFRVGGETGSKYFVLQVHYGDISAFRDNNKDCSGVSLHLTRLPQPLIAGMYLMMSVDTVIPAGEKVVNSDISCHYKNYPMHVFAYRVHTHHLGKVVSGYRVRNGQWTLIGRQSPQLPQAFYPVGHPVDVSFGDLLAARCVFTGEGRTEATHIGGTSSDEMCNLYIMYYMEAKHAVSFMTCTQNVAPDMFRTIPPEANIPIPVKSDMVMMHEHHKETEYKDKIPLLQQPKREEEEVLDQGDFYSLLSKLLGEREDVVHVHKYNPTEKAESESDLVAEIANVVQKKDLGRSDAREGAEHERGNAILVRDRIHKFHRLVSTLRPPESRVFSLQQPPPGEGTWEPEHTGDFHMEEALDWPGVYLLPGQVSGVALDPKNNLVIFHRGDHVWDGNSFDSKFVYQQIGLGPIEEDTILVIDPNNAAVLQSSGKNLFYLPHGLSIDKDGNYWVTDVALHQVFKLDPNNKEGPVLILGRSMQPGSDQNHFCQPTDVAVDPGTGAIYVSDGYCNSRIVQFSPSGKFITQWGEESSGSSPLPGQFTVPHSLALVPLLGQLCVADRENGRIQCFKTDTKEFVREIKHSSFGRNVFAISYIPGLLFAVNGKPHFGDQEPVQGFVMNFSNGEIIDIFKPVRKHFDMPHDIVASEDGTVYIGDAHTNTVWKFTLTEKLEHRSVKKAGIEVQEIKGKGSGGLNLGNFFASRKGYSRKGFDRLSTEGSDQEKEDDGSESEEEYSAPLPALAPSSS

SEQ ID NO: 10512 - protein, 866 aa, Homo sapiens
MAGRVPSLLVLLVFPSSCLAFRSPLSVFKRFKETTRPFSNECLGTTRPVVPIDSSDFALDIRMPGVTPKQSDTYFCMSMRIPVDEEAFVIDFKPRASMDTVHHMLLFGCNMPSSTGSYWFCDEGTCTDKANILYAWARNAPPTRLPKGVGFRVGGETGSKYFVLQVHYGDISAFRDNNKDCSGVSLHLTRLPQPLIAGMYLMMSVDTVIPAGEKVVNSDISCHYKNYPMHVFAYRVHTHHLGKVVSGYRVRNGQWTLIGRQSPQLPQAFYPVGHPVDVSFGDLLAARCVFTGEGRTEATHIGGTSSDEMCNLYIMYYMEAKHAVSFMTCTQNVAPDMFRTIPPEANIPIPVKSDMVMMHEHHKETEYKDKIPLLQQPKREEEEVLDQDFHMEEALDWPGVYLLPGQVSGVALDPKNNLVIFHRGDHVWDGNSFDSKFVYQQIGLGPIEEDTILVIDPNNAAVLQSSGKNLFYLPHGLSIDKDGNYWVTDVALHQVFKLDPNNKEGPVLILGRSMQPGSDQNHFCQPTDVAVDPGTGAIYVSDGYCNSRIVQFSPSGKFITQWGEESSGSSPLPGQFTVPHSLALVPLLGQLCVADRENGRIQCFKTDTKEFVREIKHSSFGRNVFAISYIPGLLFAVNGKPHFGDQEPVQGFVMNFSNGEIIDIFKPVRKHFDMPHDIVASEDGTVYIGDAHTNTVWKFTLTEKLEHRSVKKAGIEVQEIKEAEAVVETKMENKPTSSELQKMQEKQKLIKEPGSGVPVVLITTLLVIPVVVLLAIAIFIRWKKSRAFGDSEHKLETSSGRVLGRFRGKGSGGLNLGNFFASRKGYSRKGFDRLSTEGSDQEKEDDGSESEEEYSAPLPALAPSSS

SEQ ID NO: 10513 - protein, 974 aa, Homo sapiens
MAGRVPSLLVLLVFPSSCLAFRSPLSVFKRFKETTRPFSNECLGTTRPVVPIDSSDFALDIRMPGVTPKQSDTYFCMSMRIPVDEEAFVIDFKPRASMDTVHHMLLFGCNMPSSTGSYWFCDEGTCTDKANILYAWARNAPPTRLPKGVGFRVGGETGSKYFVLQVHYGDISAFRDNNKDCSGVSLHLTRLPQPLIAGMYLMMSVDTVIPAGEKVVNSDISCHYKNYPMHVFAYRVHTHHLGKVVSGYRVRNGQWTLIGRQSPQLPQAFYPVGHPVDVSFGDLLAARCVFTGEGRTEATHIGGTSSDEMCNLYIMYYMEAKHAVSFMTCTQNVAPDMFRTIPPEANIPIPVKSDMVMMHEHHKETEYKDKIPLLQQPKREEEEVLDQGDFYSLLSKLLGEREDVVHVHKYNPTEKAESESDLVAEIANVVQKKDLGRSDAREGAEHERGNAILVRDRIHKFHRLVSTLRPPESRVFSLQQPPPGEGTWEPEHTGDFHMEEALDWPGVYLLPGQVSGVALDPKNNLVIFHRGDHVWDGNSFDSKFVYQQIGLGPIEEDTILVIDPNNAAVLQSSGKNLFYLPHGLSIDKDGNYWVTDVALHQVFKLDPNNKEGPVLILGRSMQPGSDQNHFCQPTDVAVDPGTGAIYVSDGYCNSRIVQFSPSGKFITQWGEESSGSSPLPGQFTVPHSLALVPLLGQLCVADRENGRIQCFKTDTKEFVREIKHSSFGRNVFAISYIPGLLFAVNGKPHFGDQEPVQGFVMNFSNGEIIDIFKPVRKHFDMPHDIVASEDGTVYIGDAHTNTVWKFTLTEKLEHRSVKKAGIEVQEIKEAEAVVETKMENKPTSSELQKMQEKQKLIKEPGSGVPVVLITTLLVIPVVVLLAIAIFIRWKKSRAFGADSEHKLETSSGRVLGRFRGKGSGGLNLGNFFASRKGYSRKGFDRLSTEGSDQEKEDDGSESEEEYSAPLPALAPSSS

SEQ ID NO: 10514 - protein, 905 aa, Homo sapiens
MAGRVPSLLVLLVFPSSCLAFRSPLSVFKRFKETTRPFSNECLGTTRPVVPIDSSDFALDIRMPGVTPKQSDTYFCMSMRIPVDEEAFVIDFKPRASMDTVHHMLLFGCNMPSSTGSYWFCDEGTCTDKANILYAWARNAPPTRLPKGVGFRVGGETGSKYFVLQVHYGDISAFRDNNKDCSGVSLHLTRLPQPLIAGMYLMMSVDTVIPAGEKVVNSDISCHYKNYPMHVFAYRVHTHHLGKVVSGYRVRNGQWTLIGRQSPQLPQAFYPVGHPVDVSFGDLLAARCVFTGEGRTEATHIGGTSSDEMCNLYIMYYMEAKHAVSFMTCTQNVAPDMFRTIPPEANIPIPVKSDMVMMHEHHKETEYKDKIPLLQQPKREEEEVLDQGDFYSLLSKLLGEREDVVHVHKYNPTEKAESESDLVAEIANVVQKKDLGRSDAREGAEHERGNAILVRDRIHKFHRLVSTLRPPESRVFSLQQPPPGEGTWEPEHTGDFHMEEALDWPGVYLLPGQVSGVALDPKNNLVIFHRGDHVWDGNSFDSKFVYQQIGLGPIEEDTILVIDPNNAAVLQSSGKNLFYLPHGLSIDKDGNYWVTDVALHQVFKLDPNNKEGPVLILGRSMQPGSDQNHFCQPTDVAVDPGTGAIYVSDGYCNSRIVQFSPSGKFITQWGEESSGSSPLPGQFTVPHSLALVPLLGQLCVADRENGRIQCFKTDTKEFVREIKHSSFGRNVFAISYIPGLLFAVNGKPHFGDQEPVQGFVMNFSNGEIIDIFKPVRKHFDMPHDIVASEDGTVYIGDAHTNTVWKFTLTEKLEHRSVKKAGIEVQEIKDSEHKLETSSGRVLGRFRGKGSGGLNLGNFFASRKGYSRKGFDRLSTEGSDQEKEDDGSESEEEYSAPLPALAPSSS

SEQ ID NO: 10515 - protein, 583 aa, Homo sapiens
MPLRKMKIPFLLLFFLWEAESHAASRPNIILVMADDLGIGDPGCYGNKTIRTPNIDRLASGGVKLTQHLAASPLCTPSRAAFMTGRYPVRSGMASWSRTGVFLFTASSGGLPTDEITFAKLLKDQGYSTALIGKWHLGMSCHSKTDFCHHPLHHGFNYFYGISLTNLRDCKPGEGSVFTTGFKRLVFLPLQIVGVTLLTLAALNCLGLLHVPLGVFFSLLFLAALILTLFLGFLHYFRPLNCFMMRNYEIIQQPMSYDNLTQRLTVEAAQFIQRNTETPFLLVLSYLHVHTALFSSKDFAGKSQHGVYGDAVEEMDWSVGQILNLLDELRLANDTLIYFTSDQGAHVEEVSSKGEIHGGSNGIYKGGKANNWEGGIRVPGILRWPRVIQAGQKIDEPTSNMDIFPTVAKLAGAPLPEDRIIDGRDLMPLLEGKSQRSDHEFLFHYCNAYLNAVRWHPQNSTSIWKAFFFTPNFNPVGSNGCFATHVCFCFGSYVTHHDPPLLFDISKDPRERNPLTPASEPRFYEILKVMQEAADRHTQTLPEVPDQFSWNNFLWKPWLQLCCPSTGLSCQCDREKQDKRLSR

SEQ ID NO: 10516 - protein, 600 aa, Homo sapiens
MRSCLWRCRHLSQGVQWSLLLAVLVFFLFALPSFIKEPQTKPSRHQRTENIKERSLQSLAKPKSQAPTRARRTTIYAEPVPENNALNTQTQPKAHTTGDRGKEANQAPPEEQDKVPHTAQRAAWKSPEKEKTMVNTLSPRGQDAGMASGRTEAQSWKSQDTKTTQGNGGQTRKLTASRTVSEKHQGKAATTAKTLIPKSQHRMLAPTGAVSTRTRQKGVTTAVIPPKEKKPQATPPPAPFQSPTTQRNQRLKAANFKSEPRWDFEEKYSFEIGGLQTTCPDSVKIKASKSLWLQKLFLPNLTLFLDSRHFNQSEWDRLEHFAPPFGFMELNYSLVQKVVTRFPPVPQQQLLLASLPAGSLRCITCAVVGNGGILNNSHMGQEIDSHDYVFRLSGALIKGYEQDVGTRTSFYGFTAFSLTQSLLILGNRGFKNVPLGKDVRYLHFLEGTRDYEWLEALLMNQTVMSKNLFWFRHRPQEAFREALHMDRYLLLHPDFLRYMKNRFLRSKTLDGAHWRIYRPTTGALLLLTALQLCDQVSAYGFITEGHERFSDHYYDTSWKRLIFYINHDFKLEREVWKRLHDEGIIRLYQRPGPGTAKAKN

SEQ ID NO: 10517 - protein, 310 aa, Homo sapiens
MAAKNSSVTEFILEGLTHQPGLRIPLFFLFLGFYTVTVVGNLGLITLIGLNSHLHTPMYFFLFNLSLIDFCFSTTITPKMLMSFVSRKNIISFTGCMTQLFFFCFFVVSESFILSAMAYDRYVAICNPLLYTVTMSCQVCLLLLLGAYGMGFAGAMAHTGSIMNLTFCADNLVNHFMCDILPLLELSCNSSYMNELVVFIVVAVDVGMPIVTVFISYALILSSILHNSSTEGRSKAFSTCSSHIIVVSLFFGSGAFMYLKPLSILPLEQGKVSSLFYTIIVPVLNPLIYSLRNKDVKVALRRTLGRKIFS

SEQ ID NO: 10518 - protein, 1399 aa, Homo sapiens
VPGQPMNLRAEARSETSITLSWSPPRQESIIKYELLFREGDHGREVGRTFDPTTSYVVEDLKPNTEYAFRLAARSPQGLGAFTPVVRQRTLQSKPSAPPQDVKCVSVRSTAILVSWRPPPPETHNGALVGYSVRYRPLGSEDPEPKEVNGIPPTTTQILLEALEKWTQYRITTVAHTEVGPGPESSPVVVRTDEDVPSAPPRKVEAEALNATAIRVLWRSPAPGRQHGQIRGYQVHYVRMEGAEARGPPRIKDVMLADAQWETDDTAEYEMVITNLQPETAYSITVAAYTMKGDGARSKPKVVVTKGAVLGRPTLSVQQTPEGSLLARWEPPAGTAEDQVLGYRLQFGREDSTPLATLEFPPSEDRYTASGVHKGATYVFRLAARSRGGLGEEAAEVLSIPEDTPRGHPQILEAAGNASAGTVLLRWLPPVPAERNGAIVKYTVAVREAGALGPARETELPAAAEPGAENALTLQGLKPDTAYDLQVRAHTRRGPGPFSPPVRYRTFLRDQVSPKNFKVKMIMKTSVLLSWEFPDNYNSPTPYKIQYNGLTLDVDGRTTKKLITHLKPHTFYNFVLTNRGSSLGGLQQTVTAWTAFNLLNGKPSVAPKPDADGFIMVYLPDGQSPVPVQSYFIVMVPLRKSRGGQFLTPLGSPEDMDLEELIQDISRLQRRSLRHSRQLEVPRPYIAARFSVLPPTFHPGDQKQYGGFDNRGLEPGHRYVLFVLAVLQKSEPTFAASPFSDPFQLDNPDPQPIVDGEEGLIWVIGPVLAVVFIICIVIAILLYKNKRKDSEPRTKCLLNNADLAPHHPKDPVEMRRINFQTPDSGLRSPLREPGFHFESMLSHPPIPIADMAEHTERLKANDSLKLSQEYESIDPGQQFTWEHSNLEVNKPKNRYANVIAYDHSRVILQPIEGIMGSDYINANYVDGYRCQNAYIATQGPLPETFGDFWRMVWEQRSATIVMMTRLEEKSRIKCDQYWPNRGTETYGFIQVTLLDTIELATFCVRTFSLHKNGSSEKREVRQFQFTAWPDHGVPEYPTPFLAFLRRVKTCNPPDAGPIVVHCSAGVGRTGCFIVIDAMLERIKPEKTVDVYGHVTLMRSQRNYMVQTEDQYSFIHEALLEAVGCGNTEVPARSLYAYIQKLAQVEPGEHVTGMELEFKRLANSKAHTSRFISANLPCNKFKNRLVNIMPYESTRVCLQPIRGVEGSDYINASFIDGYRQQKAYIATQGPLAETTEDFWRMLWENNSTIVVMLTKLREMGREKCHQYWPAERSARYQYFVVDPMAEYNMPQYILREFKVTDARDGQSRTVRQFQFTDWPEQGVPKSGEGFIDFIGQVHKTKEQFGQDGPISVHCSAGVGRTGVFITLSIVLERMRYEGVVDIFQTVKMLRTQRPAMVQTE

SEQ ID NO: 10519 - protein, 856 aa, Homo sapiens
MGSLFRSETMCLAQLFLQSGTAYECLSALGEKGLVQFRDLNQNVSSFQRKFVGEVKRCEELERILVYLVQEINRADIPLPEGEASPPAPPLKQVLEMQEQLQKLEVELREVTKNKEKLRKNLLELIEYTHMLRVTKTFVKRNVEFEPTYEEFPSLESDSLLDYSCMQRLGAKLGFVSGLINQGKVEAFEKMLWRVCKGYTIVSYAELDESLEDPETGEVIKWYVFLISFWGEQIGHKVKKICDCYHCHVYPYPNTAEERREIQEGLNTRIQDLYTVLHKTEDYLRQVLCKAAESVYSRVIQVKKMKAIYHMLNMCSFDVTNKCLIAEVWCPEADLQDLRRALEEGSRESGATIPSFMNIIPTKETPPTRIRTNKFTEGFQNIVDAYGVGSYREVNPALFTIITFPFLFAVMFGDFGHGFVMFLFALLWVLNENHPRLNQSQEIMRMFFNGRYILLLMGLFSVYTGLIYNDCFSKSVNLFGSGWNVSAMYSSSHPPAEHKKMVLWNDSVVRHNSILQLDPSIPGVFRGPYPLGIDPIWNLATNRLTFLNSFKMKMSVILGIIHMTFGVILGIFNHLHFRKKFNIYLVSIPELLFMLCIFGYLIFMIFYKWLVFSAETSRVAPSILIEFINMFLFPASKTSGLYTGQEYVQRVLLVVTALSVPVLFLGKPLFLLWLHNGRSCFGVNRSGYTLIRKDSEEEVSLLGSQDIEEGNHQVEDGCREMACEEFNFGEILMTQVIHSIEYCLGCISNTASYLRLWALSLAHAQLSDVLWAMLMRVGLRVDTTYGVLLLLPVIALFAVLTIFILLIMEGLSAFLHAIRLHWVEFQNKFYVGAGTKFVPFSFSLLSSKFNNDDSVA

SEQ ID NO: 10520 - protein, 250 aa, Homo sapiens
MVAGSDAGRALGVLSVVCLLHCFGFISCFSQQIYGVVYGNVTFHVPSNVPLKEVLWKKQKDKVAELENSEFRAFSSFKNRVYLDTVSGSLTIYNLTSSDEDEYEMESPNITDTMKFFLYVLESLPSPTLTCALTNGSIEVQCMIPEHYNSHRGLIMYSWDCPMEQCKRNSTSIYFKMENDLPQKIQCTLSNPLFNTTSSIILTTCIPSSGHSRHRYALIPIPLAVITTCIVLYMNGILKCDRKPDRTNSN

SEQ ID NO: 10521 - protein, 237 aa, Homo sapiens
MVAGSDAGRALGVLSVVCLLHCFGFISCFSQQIYGVVYGNVTFHVPSNVPLKEVLWKKQKDKVAELENSEFRAFSSFKNRVYLDTVSGSLTIYNLTSSDEDEYEMESPNITDTMKFFLYVLESLPSPTLTCALTNGSIEVQCMIPEHYNSHRGLIMYSWDCPMEQCKRNSTSIYFKMENDLPQKIQCTLSNPLFNTTSSIILTTCIPSSGHSRHRYALIPIPLAVITTCIVLYMNVL

SEQ ID NO: 10522 - protein, 540 aa, Homo sapiens
MARKQNRNSKELGLVPLTDDTSHARPPGPGRALLECDHLRSGVPGGRRRKDWSCSLLVASLAGAFGSSFLYGYNLSVVNAPTPYIKAFYNESWERRHGRPIDPDTLTLLWSVTVSIFAIGGLVGTLIVKMIGKVLGRKHTLLANNGFAISAALLMACSLQAGAFEMLIVGRFIMGIDGGVALSVLPMYLSEISPKEIRGSLGQVTAIFICIGVFTGQLLGLPELLGKESTWPYLFGVIVVPAVVQLLSLPFLPDSPRYLLLEKHNEARAVKAFQTFLGKADVSQEVEEVLAESRVQRSIRLVSVLELLRAPYVRWQVVTVIVTMACYQLCGLNAIWFYTNSIFGKAGIPLAKIPYVTLSTGGIETLAAVFSGLVIEHLGRRPLLIGGFGLMGLFFGTLTITLTLQDHAPWVPYLSIVGILAIIASFCSGPGGIPFILTGEFFQQSQRPAAFIIAGTVNWLSNFAVGLLFPFIQKSLDTYCFLVFATICITGAIYLYFVLPETKNRTYAEISQAFSKRNKAYPPEEKIDSAVTDGKINGRP

SEQ ID NO: 10523 - protein, 511 aa, Homo sapiens
MKLSKKDRGEDEESDSAKKKLDWSCSLLVASLAGAFGSSFLYGYNLSVVNAPTPYIKAFYNESWERRHGRPIDPDTLTLLWSVTVSIFAIGGLVGTLIVKMIGKVLGRKHTLLANNGFAISAALLMACSLQAGAFEMLIVGRFIMGIDGGVALSVLPMYLSEISPKEIRGSLGQVTAIFICIGVFTGQLLGLPELLGKESTWPYLFGVIVVPAVVQLLSLPFLPDSPRYLLLEKHNEARAVKAFQTFLGKADVSQEVEEVLAESRVQRSIRLVSVLELLRAPYVRWQVVTVIVTMACYQLCGLNAIWFYTNSIFGKAGIPLAKIPYVTLSTGGIETLAAVFSGLVIEHLGRRPLLIGGFGLMGLFFGTLTITLTLQDHAPWVPYLSIVGILAIIASFCSGPGGIPFILTGEFFQQSQRPAAFIIAGTVNWLSNFAVGLLFPFIQKSLDTYCFLVFATICITGAIYLYFVLPETKNRTYAEISQAFSKRNKAYPPEEKIDSAVTDGKINGRP

SEQ ID NO: 10524 - protein, 322 aa, Homo sapiens
MEPQNTSTVTNFQLLGFQNLLEWQALLFVIFLLIYCLTIIGNVVIITVVSQGLRLHSPMYMFLQHLSFLEVWYTSTTVPLLLANLLSWGQAISFSACMAQLYFFVFLGATECFLLAFMAYDRYLAICSPLRYPFLMHRGLCARLVVVSWCTGVSTGFLPSLMISRLDFCGRNQINHFFCDLPPLMQLSCSRVYITEVTIFILSIAVLCICFFLTLGPYVFIVSSILRIPSTSGRRKTFSTCGSHLAVVTLYYGTMISMYVCPSPHLLPEINKIISVFYTVVTPLLNPVIYSLRNKDFKEAVRKVMRRKCGILWSTSKRKFLY

SEQ ID NO: 10525 - protein, 458 aa, Homo sapiens
MTTSHQPQDRYKAVWLIFFMLGLGTLLPWNFFMTATQYFTNRLDMSQNVSLVTAELSKDAQASAAPAAPLPERNSLSAIFNNVMTLCAMLPLLLFTYLNSFLHQRIPQSVRILGSLVAILLVFLITAILVKVQLDALPFFVITMIKIVLINSFGAILQGSLFGLAGLLPASYTAPIMSGQGLAGFFASVAMICAIASGSELSESAFGYFITACAVIILTIICYLGLPRLEFYRYYQQLKLEGPGEQETKLDLISKGEEPRAGKEESGVSVSNSQPTNESHSIKAILKNVRRGVLAFSVCFIFTITIGMFPAVTVEVKSSIAGSSTWERYFIPVSCFLTFNIFDWLGRSLTAVFMWPGKDSRWLPSLVLARLVFVPLLLLCNIKPRRYLTVVFEHDAWFIFFMAAFAFSNGYLASLCMCFGPKKVKPAEAETAGAIMAFFLCLGLALGAVFSFLFRAIV

SEQ ID NO: 10526 - protein, 350 aa, Homo sapiens
MIRQERSTSYQELSEELVQVVENSELADEQDKETVRVQGPGILPGLDSESASSSIRFSKACLKNVFSVLLIFIYLLLMAVAVFLVYRTITDFREKLKHPVMSVSYKEVDRYDAPGIALYPGQAQLLSCKHHYEVIPPLTSPGQPGDMNCTTQRINYTDPFSNQTVKSALIVQGPREVKKRELVFLQFRLNKSSEDFSAIDYLLFSSFQEFLQSPNRVGFMQACESAYSSWKFSGGFRTWVKMSLVKTKEEDGREAVEFRQETSVVNYIDQRPAAKKSAQLFFVVFEWKDPFIQKVQDIVTANPWNTIALLCGAFLALFKAAEFAKLSIKWMIKIRKRYLKRRGQATSHIS

SEQ ID NO: 10527 - protein, 267 aa, Homo sapiens
ESPKEPKQLRKLFIGGLSFETTNESLRSHFEQWGTLTDCVVMRDPNTKRSRACGFVMCATVEEVDAAMNARPHKVDGRVVEQAKRVVSRENSQRPGAQLTVKNIFVGGIKEDTEEHHLRDHFEQYGKEVIEIMTDRGIGKKRGFAFVTFDNGDSMDKTVIQKAYLNGHSCEARKALSKQEGSGNFGGGHGGGFSGNDNLGHGGNFHYSDFDNYNNQSPNFGPLKGGNFGGRSSVPCGGGGQYFAKPQNQGGYGGSSSSSSYGSGRRF

SEQ ID NO: 10528 - protein, 195 aa, Homo sapiens
SKSESPKELVQLKKLFIGGLSFETTNESLRSHSEQWGTLADCVVMRDPNTKHSRGFGFATYATEEEVDAATNARPHKVDGRVVEPKRAVSREDSQRPDAHLTMEKIFVGGINEDTEEYHLSDYFEQYGKTEVIEIMTDQGSGKKRGFAFVTFDDHDSVDKTVIQKYHTVNGHNCEIRKGLSKQEMVSASSSQRGQ

SEQ ID NO: 10529 - protein, 260 aa, Homo sapiens
MSKSESPKEPKQLRKLFIGGLSFETTNESLRSHFEQWGTLMDCVVMRDPNTKCSRGFGFVTYATVEEVDAAMNARPHKVDGRVVESKRAVSREDSQRPGAHLTVKKIFVGGIKEDTKEHHLRDYFEQYGKIEVIEIMTDRGSGKKRGFAFVTFDDHDSVDKIVIQKYHTVNGHICEVRKALSKQEMASTSSSQRGQSGSGNFYNDFGNYNNQSSNFRPMKGGNFGGRSSGPYGGGGNTLQNQGGYGSSSSSSSYGSGRRF

SEQ ID NO: 10530 - protein, 346 aa, Homo sapiens
MARPGQRWLGKWLVAMVVWALCRLATPLAKNLEPVSWSSLNPKFLSGKGLVIYPKIGDKLDIICPRAEAGRPYEYYKLYLVRPEQAAACSTVLDPNVLVTCNRPEQEIRFTIKFQEFSPNYMGLEFKKHHDYYITSTSNGSLEGLENREGGVCRTRTMKIIMKVGQDPNAVTPEQLTTSRPSKEADNTVKMATQAPGSRGSLGDSDGKHETVNQEEKSGPGASGGSSGDPDGFFNSKVALFAAVGAGCVIFLLIIIFLTVLLLKLRKRHRKHTQQRAAALSLSTLASPKGGSGTAGTEPSDIIIPLRTTENNYCPHYEKVSGDYGHPVYIVQEMPPQSPANIYYKV

SEQ ID NO: 10531 - protein, 361 aa, Homo sapiens
MAMNYNAKDEVDGGPPCAPGGTAKTRRPDNTAFKQQRLPAWQPILTAGTVLPIFFIIGLIFIPIGIGIFVTSNNIREIEIDYTGTEPSSPCNKCLSPDVTPCFCTINFTLEKSFEGNVFMYYGLSNFYQNHRRYVKSRDDSQLNGDSSALLNPSKECEPYRRNEDKPIAPCGAIANSMFNDTLELFLIGNDSYPIPIALKKKGIAWWTDKNVKFRNPPGGDNLEERFKGTTKPVNWLKPVYMLDSDPDNNGFINEDFIVWMRTAALPTFRKLYRLIERKSDLHPTLPAGRYSLNVTYNYPVHYFDGRKRMILSTISWMGGKNPFLGIAYIAVGSISFLLGVVLLVINHKYRNSSNTADITI

SEQ ID NO: 10532 - protein, 325 aa, Homo sapiens
MAMNYNAKDEVDGGPPCAPGGTAKTRRPDNTAFKQQRLPAWQPILTAGTVLPIFFIIGLIFIPIGIGIFVTSNNIREIEGNVFMYYGLSNFYQNHRRYVKSRDDSQLNGDSSALLNPSKECEPYRRNEDKPIAPCGAIANSMFNDTLELFLIGNDSYPIPIALKKKGIAWWTDKNVKFRNPPGGDNLEERFKGTTKPVNWLKPVYMLDSDPDNNGFINEDFIVWMRTAALPTFRKLYRLIERKSDLHPTLPAGRYSLNVTYNYPVHYFDGRKRMILSTISWMGGKNPFLGIAYIAVGSISFLLGVVLLVINHKYRNSSNTADITI

SEQ ID NO: 10533 - protein, 2923 aa, Homo sapiens
MRSPATGVPLPTPPPPLLLLLLLLLPPPLLGDQVGPCRSLGSRGRGSSGACAPMGWLCPSSASNLWLYTSRCRDAGTELTGHLVPHHDGLRVWCPESEAHIPLPPAPEGCPWSCRLLGIGGHLSPQGKLTLPEEHPCLKAPRLRCQSCKLAQAPGLRAGERSPEESLGGRRKRNVNTAPQFQPPSYQATVPENQPAGTPVASLRAIDPDEGEAGRLEYTMDALFDSRSNQFFSLDPVTGAVTTAEELDRETKSTHVFRVTAQDHGMPRRSALATLTILVTDTNDHDPVFEQQEYKESLRENLEVGYEVLTVRATDGDAPPNANILYRLLEGSGGSPSEVFEIDPRSGVIRTRGPVDREEVESYQLTVEASDQGRDPGPRSTTAAVFLSVEDDNDNAPQFSEKRYVVQVREDVTPGAPVLRVTASDRDKGSNAVVHYSIMSGNARGQFYLDAQTGALDVVSPLDYETTKEYTLRVRAQDGGRPPLSNVSGLVTVQVLDINDNAPIFVSTPFQATVLESVPLGYLVLHVQAIDADAGDNARLEYRLAGVGHDFPFTINNGTGWISVAAELDREEVDFYSFGVEARDHGTPALTASASVSVTVLDVNDNNPTFTQPEYTVRLNEDAAVGTSVVTVSAVDRDAHSVITYQITSGNTRNRFSITSQSGGGLVSLALPLDYKLERQYVLAVTASDGTRQDTAQIVVNVTDANTHRPVFQSSHYTVNVNEDRPAGTTVVLISATDEDTGENARITYFMEDSIPQFRIDADTGAVTTQAELDYEDQVSYTLAITARDNGIPQKSDTTYLEILVNDVNDNAPQFLRDSYQGSVYEDVPPFTSVLQISATDRDSGLNGRVFYTFQGGDDGDGDFIVESTSGIVRTLRRLDRENVAQYVLRAYAVDKGMPPARTPMEVTVTVLDVNDNPPVFEQDEFDVFVEENSPIGLAVARVTATDPDEGTNAQIMYQIVEGNIPEVFQLDIFSGELTALVDLDYEDRPEYVLVIQATSAPLVSRATVHVRLLDRNDNPPVLGNFEILFNNYVTNRSSSFPGGAIGRVPAHDPDISDSLTYSFERGNELSLVLLNASTGELKLSRALDNNRPLEAIMSVLVSDGVHSVTAQCALRVTIITDEMLTHSITLRLEDMSPERFLSPLLGLFIQAVAATLATPPDHVVVFNVQRDTDAPGGHILNVSLSVGQPPGPGGGPPFLPSEDLQERLYLNRSLLTAISAQRVLPFDDNICLREPCENYMRCVSVLRFDSSAPFIASSSVLFRPIHPVGGLRCRCPPGFTGDYCETEVDLCYSRPCGPHGRCRSREGGYTCLCRDGYTGEHCEVSARSGRCTPGVCKNGGTCVNLLVGGFKCDCPSGDFEKPYCQVTTRSFPAHSFITFRGLRQRFHFTLALSFATKERDGLLLYNGRFNEKHDFVALEVIQEQVQLTFSAGESTTTVSPFVPGGVSDGQWHTVQLKYYNKPLLGQTGLPQGPSEQKVAVVTVDGCDTGVALRFGSVLGNYSCAAQGTQGGSKKSLDLTGPLLLGGVPDLPESFPVRMRQFVGCMRNLQVDSRHIDMADFIANNGTVPGCPAKKNVCDSNTCHNGGTCVNQWDAFSCECPLGFGGKSCAQEMANPQHFLGSSLVAWHGLSLPISQPWYLSLMFRTRQADGVLLQAITRGRSTITLQLREGHVMLSVEGTGLQASSLRLEPGRANDGDWHHAQLALGASGGPGHAILSFDYGQQRAEGNLGPRLHGLHLSNITVGGIPGPAGGVARGFRGCLQGVRVSDTPEGVNSLDPSHGESINVEQGCSLPDPCDSNPCPANSYCSNDWDSYSCSCDPGYYGDNCTNVCDLNPCEHQSVCTRKPSAPHGYTCECPPNYLGPYCETRIDQPCPRGWWGHPTCGPCNCDVSKGFDPDCNKTSGECHCKENHYRPPGSPTCLLCDCYPTGSLSRVCDPEDGQCPCKPGVIGRQCDRCDNPFAEVTTNGCEVNYDSCPRAIEAGIWWPRTRFGLPAAAPCPKGSFGTAVRHCDEHRGWLPPNLFNCTSITFSELKGFAERLQRNESGLDSGRSQQLALLLRNATQHTAGYFGSDVKVAYQLATRLLAHESTQRGFGLSATQDVHFTENLLRVGSALLDTANKRHWELIQQTEGGTAWLLQHYEAYASALAQNMRHTYLSPFTIVTPNIVISVVRLDKGNFAGAKLPRYEALRGEQPPDLETTVILPESVFRETPPVVRPAGPGEAQEPEELARRQRRHPELSQGEAVASVIIYRTLAGLLPHNYDPDKRSLRVPKRPIINTPVVSISVHDDEELLPRALDKPVTVQFRLLETEERTKPICVFWNHSILVSGTGGWSARGCEVVFRNESHVSCQCNHMTSFAVLMDVSRRENGEILPLKTLTYVALGVTLAALLLTFFFLTLLRILRSNQHGIRRNLTAALGLAQLVFLLGINQADLPFACTVIAILLHFLYLCTFSWALLEALHLYRALTEVRDVNTGPMRFYYMLGWGVPAFITGLAVGLDPEGYGNPDFCWLSIYDTLIWSFAGPVAFAVSMSVFLYILAARASCAAQRQGFEKKGPVSGLQPSFAVLLLLSATWLLALLSVNSDTLLFHYLFATCNCIQGPFIFLSYVVLSKEVRKALKLACSRKPSPDPALTTKSTLTSSYNCPSPYADGRLYQPYGDSAGSLHSTSRSGKSQPSYIPFLLREESALNPGQGPPGLGDPGSLFLEGQDQQHDPDTDSDSDLSLEDDQSGSYASTHSSDSEEEEEEEEEEAAFPGEQGWDSLLGPGAERLPLHSTPKDGGPGPGKAPWPGDFGTTAKESSGNGAPEERLRENGDALSREGSLGPLPGSSAQPHKGILKKKCLPTISEKSSLLRLPLEQCTGSSRGSSASEGSRGGPPPRPPPRQSLQEQLNGVMPIAMSIKAGTVDEDSSGSEFLFFNFLH

SEQ ID NO: 10534 - protein, 383 aa, Homo sapiens
MGLGRVLLFLAVAFPFAPPAAAAEPHSLRYNLMVLSQDGSVQSGFLAEGHLDGQPFLRYDRQKRRAKPQGQWAEDVLGAETWDTETEDLTENGQDLRRTLTHIKDQKGGLHSLQEIRVCEIHEDSSTRGSRHFYYNGELFLSQNLETQESTVPQSSRAQTLAMNVTNFWKEDAMKTKTHYRAMQADCLQKLQRYLKSGVAIRRTVPPMVNVTCSEVSEGNITVTCRASSFYPRNITLTWRQDGVSLSHNTQQWGDVLPDGNGTYQTWVATRIRQGEEQRFTCYMEHSGNHGTHPVPSGKALVLQSQRTDFPYVSAAMPCFVIIIILCVPCCKKKTSAAEGPELVSLQVLDQHPVGTGDHRDAAQLGFQPLMSATGSTGSTEGA

SEQ ID NO: 10535 - protein, 361 aa, Homo sapiens [sequence omitted]

SEQ ID NO: 10536 - protein, 456 aa, Homo sapiens
MARGDAPRDSYHLVGISFFILGLGTLLPWNFFITAIPYFQARLAGAGNSTARILSTNHTGPEDAFNFNNWVTLLSQLPLLLFTLLNSFLYQCVPETVRILGSLLAILLLFALTAALVKVDMSPGPFFSITMASVCFINSFSAVLQGSLFGQLGTMPSTYSTLFLSGQGLAGIFAALAMLLSMASGVDAETSALGYFITPYVGILMSIVCYLSLPHLKFARYYLANKSSQAQAQELETKAELLQSDENGIPSSPQKVALTLDLDLEKEPESEPDEPQKPGKPSVFTVFQKIWLTALCLVLVFTVTLSVFPAITAMVTSSTSPGKWSQFFNPICCFLLFNIMDWLGRSLTSYFLWPDEDSRLLPLLVCLRFLFVPLFMLCHVPQRSRLPILFPQDAYFITFMLLFAVSNGYLVSLTMCLAPRQVLPHEREVAGALMTFFLALGLSCGASLSFLFKALL

SEQ ID NO: 10537 - protein, 680 aa, Homo sapiens
MYTFLPDNFSPAKPKPSKELKPLLGSAVLGLLLVLAAVVAWCYYSVSLRKAERLRAELLDLKAGGFSIRNQKGEQVFRLAFRSGALDLDSCSRDGALLGCSLTADGLPLHFFIQTVRPKDTVMCYRVRWEEAAPGRAVEHAMFLGDAAAHWYGGAEMRTQHWPIRLDGQQEPQPFVTSDVYSSDAAFGGILERYWLSSRAAAIKVNDSVPFHLGWNSTERSLRLQARYHDTPYKPPAGRAAAPELSYRVCVGSDVTSIHKYMVRRYFNKPSRVPAPEAFRDPIWSTWALYGRAVDQDKVLRFAQQIRLHHFNSSHLEIDDMYTPAYGDFDFDEVKFPNASDMFRRLRDAGFRVTLWVHPFVNYNSSRFGEGVERELFVREPTGRLPALVRWWNGIGAVLDFTHPKARDWFQGHLRRLRSRYSVASFKFDAGEVSYLPRDFSTYRPLPDPSVWSRRYTEMALPFFSLAEVRVGYQSQNISCFFRLVDRDSVWGYDLGLRSLIPAVLTVSMLGYPFILPDMVGGNAVPQRTAGGDVPERELYIRWLEVAAFMPAMQFSIPPWRYDAEVVAIAQKFAALRASLVAPLLLELAGEVTDTGDPIVRPLWWIAPGDETAHRIDSQFLIGDTLLVAPVLEPGKQERDVYLPAGKWRSYKGELFDKTPVLLTDYPVDLDEIAYFTWAS

SEQ ID NO: 10538 - protein, 304 aa, Homo sapiens
MASETHNVKKRNFCNKIEDHFIDLPRKKISNFTNKNMKEVKKSPKQLAAYINRTVGQTVKSPDKLRKVIYRRKKVHHPFPNPCYRKKQSPGSGGCDMANKENELACAGHLPEKLHHDSRTYLVNSSDSGSSQTESPSSKYSGFFSEVSQDHETMAQVLFSRNMRLNVALTFWRKRSISELVAYLLRIEDLGVVVDCLPVLTNCLQEEKQYISLGCCVDLLPLVKSLLKSKFEEYVIVGLNWLQAVIKRWWSELSSKTEIINDGNIQILKQQLSGLWEQENHLTLVPGYTGNIAKDVDAYLLQLH

SEQ ID NO: 10539 - protein, 183 aa, Homo sapiens
MDNCLAAAALNGVDRRSLQRSARLALEVLERAKRRAVDWHALERPKGCMGVLAREAPHLEKQPAAGPQRVLPGEKYYSSVPEEGGATHVYRYHRGESKLHMCLDIGNGQRKDRKKTSLGPGGSYQISEHAPEASQPAENISKDLYIEVYPGTYSVTVGSNDLTKKTHVVAVDSGQSVDLVFPV

SEQ ID NO: 10540 - protein, 210 aa, Homo sapiens
MDNCLAAAALNGVDRRSLQRSARLALEVLERAKRRAVDWHALERPKGCMGVLAREAPHLEKQPAAGPQRVLPGEREERPPTLSASFRTMAEFMDYTSSQCGKYYSSVPEEGGATHVYRYHRGESKLHMCLDIGNGQRKDRKKTSLGPGGSYQISEHAPEASQPAENISKDLYIEVYPGTYSVTVGSNDLTKKTHVVAVDSGQSVDLVFPV

SEQ ID NO: 10541 - protein, 210 aa, Homo sapiens
MDNCLAAAALNGVDRRSLQRSARLALEVLERAKRRAVDWHTLERPKGCMGVLAREAPHLEKQPAAGPQRVLPGEREERPPTLSASFRTMAESMDYTSSQCGKYYSSVPEEGGATHVYRYHRGESKLHMCLDIGNGQRKDRKKTSLGPGGSYQISEHAPEASQPAENISKDLYIEVYPGTYSVTVGSNDLTKKTHVVAVDSGQSVDLVFPV

SEQ ID NO: 10542 - protein, 210 aa, Homo sapiens
MDNCLAAAALNGVDRRSLQRSAKLALEVLERAKRRAVDWHALERPKGCMGVLAREAPHLEKQPAAGPQRVLPGEREERPPTLSASFRTMAEFMDYTSSQCGKYYSSVPEEGGATHVYRYHRGESKLHMCLDIGNGQRKDRKKTSLGPGGSYQISEHAPEASQPAENISKDLYIEVYPGTYSVTVGSNDLTKKTHVVAVDSGQSVDLVFPV

SEQ ID NO: 10543 - protein, 419 aa, Homo sapiens
MNVHRGSDSDRLLRQEASCLVDDTLAVAQEKEANSLASSGPHNLTYPLGPRNEDLSLDYASQPANLQFPHIMPLAEDIKGSCFQSGNKRNHEPFIAPERFGNSSVGFGSNSHSQAPEKVTLLVDGTRFVVNPQIFTAHPDTMLGRMFGPGREYNFTRPNEKGEYEIAEGISATVFRTVLDYYKTGIINCPDGISIPDLRDTCDYLCINFDFNTIRCQDLSALLHELSNDGAHKQFDHYLEELILPIMVGCAKKGERECHIVVLTDEDSVDWDEDHPPPMGEEYSQILYSSKLYRFFKYIENRDVAKTVLKERGLKNIRIGIEGYPTCKEKIKRRPGGRSEVIYNYVQRPFIQMSWEKEEGKSRHVDFQCVRSKSLTNLVAAGDDVLEDQEILMHHPPQVDELDRLNAPLSQMASNDFQD

SEQ ID NO: 10544 - protein, 817 aa, Homo sapiens
MHKHQHCCKCPECYEVTRLAALRRLEPPGYGDWQVPDPYGPGGGNGASAGYGGYSSQTLPSQAGATPTPRTKAKLIPTGRDVGPVPLKPVPGKSTPKLNGSGPSWWPECTCTNRDWYEQVNGSDGMFKYEEIVLERGNSGLGFSIAGGIDNPHVPDDPGIFITKIIPGGAAAMDGRLGVNDCVLRVNEVEVSEVVHSRAVEALKEAGPVVRLVVRRRQPPPETIMEVNLLKGPKGLGFSIAGGIGNQHIPGDNSIYITKIIEGGAAQKDGRLQIGDRLLAVNNTNLQDVRHEEAVASLKNTSDMVYLKVAKPGSLHLNDMYAPPDYASTFTALADNHISHNSSLGYLGAVESKVSYPAPPQVPPTRYSPIPRHMLAEEDFTREPRKIILHKGSTGLGFNIVGGEDGEGIFVSFILAGGPADLSGELRRGDRILSVNGVNLRNATHEQAAAALKRAGQSVTIVAQYRPEEYSRFESKIHDLREQMMNSSMSSGSGSLRTSEKRSLYVRALFDYDRTRDSCLPSQGLSFSYGDILHVINASDDEWWQARLVTPHGESEQIGVIPSKKRVEKKERARLKTVKFHARTGMIESNRDFPGLSDDYYGAKNLKGQEDAILSYEPVTRQEIHYARPVIILGPMKDRVNDDLISEFPHKFGSCVPHTTRPRRDNEVDGQDYHFVVSREQMEKDIQDNKFIEAGQFNDNLYGTSIQSVRAVAERGKHCILDVSGNAIKRLQQAQLYPIAIFIKPKSIEALMEMNRRQTYEQANKIYDKAMKLEQEFGEYFTAIVQGDSLEEIYNKIKQIIEDQSGHYIWVPSPEKL

SEQ ID NO: 10545 - protein, 406 aa, Homo sapiens
MSGAPTAGAALMLCAATAVLLSAQGGPVQSKSPRFASWDEMNVLAHGLLQLGQGLREHAERTRSQLSALERRLSACGSACQGTEGSTDLPLAPESRVDPEVLHSLQTQLKAQNSRIQQLFHKVAQQQRHLEKQHLRIQHLQSQFGLLDHKHLDHEVAKPARRKRLPEMAQPVDPAHNVSRLHRLPRDCQELFQVGERQSGLFEIQPQGSPPFLVNCKMTSDGGWTVIQRRHDGSVDFNRPWEAYKAGFGDPHGEFWLGLEKVHSITGDRNSRLAVQLRDWDGNAELLQFSVHLGGEDTAYSLQLTAPVAGQLGATTVPPSGLSVPFSTWDQDHDLRRDKNCAKSLSGGWWFGTCSHSNLNGQYFRSIPQQRQKLKKGIFWKTWRGRYYPLQATTMLIQPMAAEAAS

SEQ ID NO: 10546 - protein, 125 aa, Homo sapiens
MKALMLLTLSVLLCWVSADIRCHSCYKVPVLGCVDRQSCRLEPGQQCLTTHAYLGKMWVFSNLRCGTPEEPCQEAFNQTNRKLGLTYNTTCCNKDNCNSAGPRPTPALGLVFLTSLAGLGLWLLH

SEQ ID NO: 10547 - protein, 343 aa, Homo sapiens
MPRRSLHAAAVLLLVILKEQPSSPAPVNGSKWTYFGPDGENSWSKKYPSCGGLLQSPIDLHSDILQYDASLTPLEFQGYNLSANKQFLLTNNGHSVKLNLPSDMHIQGLQSRYSATQLHLHWGNPNDPHGSEHTVSGQHFAAELHIVHYNSDLYPDASTASNKSEGLAVLAVLIEMGSFNPSYDKIFSHLQHVKYKGQEAFVPGFNIEELLPERTAEYYRYRGSLTTPPCNPTVLWTVFRNPVQISQEQLLALETALYCTHMDDPSPREMINNFRQVQKFDERLVYTSFSQGIILSLALAGILGICIVVVVSIWLFRRKSIKKGDNKGVIYKPATKMETEAHA

SEQ ID NO: 10548 - protein, 354 aa, Homo sapiens
MPRRSLHAAAVLLLVILKEQPSSPAPVNGSKWTYFGPDGENSWSKKYPSCGGLLQSPIDLHSDILQYDASLTPLEFQGYNLSANKQFLLTNNGHSVKLNLPSDMHIQGLQSRYSATQLHLHWGNPNDPHGSEHTVSGQHFAAELHIVHYNSDLYPDASTASNKSEGLAVLAVLIEMGSFNPSYDKIFSHLQHVKYKGQEAFVPGFNIEELLPERTAEYYRYRGSLTTPPCNPTVLWTVFRNPVQISQEQLLALETALYCTHMDDPSPREMINNFRQVQKFDERLVYTSFSQVQVCTAAGLSLGIILSLALAGILGICIVVVVSIWLFRRKSIKKGDNKGVIYKPATKMETEAHA

SEQ ID NO: 10549 - protein, 615 aa, Homo sapiens
HEAMAAAGRLPSSWALFSPLLAGLALLGVGPVPARALHNVTAELFGAEAWGTLAAFGDLNSDKQTDLFVLRERNDLIVFLADQNAPYFKPKVKVSFKNHSALITSVVPGDYDGDSQMDVLLTYLPKNYAKSELGAVIFWGQNQTLDPNNMTILNRTFQDEPLIMDFNGDLIPDIFGITNESNQPQILLGGNLSWHPALTTTSKMRIPHSHAFIDLTEDFTADLFLTTLNATTSTFQFEIWENLDGNFSVSTILEKPQNMMVVGQSAFADFDGDGHMDHLLPGCEDKNCQKSTIYLVRSGMKQWVPVLQDFSNKGTLWGFVPFVDEQQPTEIPIPITLHIGDYNMDGYPDALVILKNTSGSNQQAFLLENVPCNNASCEEARRMFKVYWELTDLNQIKDAMVATFFDIYEDGILDIVVLSKGYTKNDFAIHTLKNNFEADAYFVKVIVLSGLCSNDCPRKITPFGVNQPGPYIMYTTVDANGYLKNGSAGQLSQSAHLALQLPYNVLGLGRSANFLDHLYVGIPRPSGEKSIRKQEWTAIIPNSQLIVIPYPHNVPRSWSAKLYLTPSNIVLLTAIALIGVCVFILAIIGILHWQEKKADDREKRQEAHRFHFDAM

SEQ ID NO: 10550 - protein, 609 aa, Homo sapiens
MRRRAAPELWALFSRSPGLHYWESGRSQRGRAQRHGRALWGRGWGTLAAFGDLNSDKQTDLFVLRERNDLIVFLADQNAPYFKPKVKVSFKNHSALITSVVPGDYDGDSQMDVLLTYLPKNYAKSELGAVIFWGQNQTLDPNNMTILNRTFQDEPLIMDFNGDLIPDIFGITNESNQPQILLGGNLSWHPALTTTSKMRIPHSHAFIDLTEDFTADLFLTTLNATTSTFQFEIWENLDGNFSVSTILEKPQNMMVVGQSAFADFDGDGHMDHLLPGCEDKNCQKSTIYLVRSGMKQWVPVLQDFSNKGTLWGFVPFVDEQQPTEIPIPITLHIGDYNMDGYPDALVILKNTSGSNQQAFLLENVPCNNASCEEARRMFKVYWELTDLNQIKDAMVATFFDIYEDGILDIVVLSKGYTKNDFAIHTLKNNFEADAYFVKVIVLSGLCSNDCPRKITPFGVNQPGPYIMYTTVDANGYLKNGSAGQLSQSAHLALQLPYNVLGLGRSANFLDHLYVGIPRPSGEKSIRKQEWTAIIPNSQLIVIPYPHNVPRSWSAKLYLTPSNIVLLTAIALIGVCVFILAIIGILHWQEKKADDREKRQEAHRFHFDAM

SEQ ID NO: 10551 - protein, 1037 aa, Homo sapiens
MDLNRFIQALKGTIDPKLRIAAENELNQSYKIINFAPSLLRIIVSDHVEFPVRQAAAIYLKNMVTQYWPDREPPPGEAIFPFNIHENDRQRIRDNIVEGIIRSPDLVRVQLTMCLRAIIKHDFPGHWPGVVDKIDYYLQSQSSASWLGSLLCLYQLVKTYEYKKAEEREPLIIAMQIFLPRIQQQIVQLLPDSSYYSVLLQKQILKIFYALVQYALPLQLVNNQTMTTWMEIFRTIIDRTVPPETLHIDEDDRPELVWWKCKKWALHIVARLFERYGSAGNVTKEYFEFSEFFLKTYAVGIQQVLLKILDQYRQKEYVAPRVLQQAFNYLNQGVVHSITWKQMKPHIQNISEDVIFSVMCYKDEDEELWQEDPYEYIRMKFDIFEDYASPTTAAQTLLYTAAKKRKEVLPKMMAFCYQILTDPNFDPRKKDGALHVIGSLAEILLKKSLFKDQMELFLQNHVFPLLLSNLGYLRARSCWVLHAFSSLKFHNELNLRNAVELAKKSLIEDKEMPVKVEAALALQSLISNQIQAKEYMKPHVRPIMQELLHIVRETENDDVTNVIQKMICEYSQEVASIAVDMTQHLAEIFGKVLQSDEYEEVEDKTVMAMGILHTIDTILTVVEDHKEITQQLENICLRIIDLVLQKHVIEFYEEILSLAYSLTCHSISPQMWQLLGILYEVFQQDCFEYFTDMMPLLHNYVTIDTDTLLSNAKHLEILFTMCRKVLCGDAGEDAECHAAKLLEVIILQCKGRGIDQCIPLFVQLVLERLTRGVKTSELRTMCLQVAIAALYYNPDLLLHTLERIQLPHNPGPITVQFINQWMNDTDCFLGHHDRKMCIIGLSILLELQNRPPAVDAVVGQIVPSILFLFLGLKQVCATRQLVNREDRSKAEKADMEENEEISSDEEETNVTAQAMQSNNGRGEDEEEEDDDWDEEVLEETALEGFSTPLDLDNSVDEYQFFTQALITVQSRDAAWYQLLMAPLSEDQRTALQEVYTLAEHRRTVAEAKKKIEQQGGFTFENKGVLSAFNFGTVPSNN

SEQ ID NO: 10552 - protein, 359 aa, Homo sapiens
MPSLLLLFTAALLSSWAQLLTDANSWWSLALNPVQRPEMFIIGAQPVCSQLPGLSPGQRKLCQLYQEHMAYIGEGAKTGIKECQHQFRQRRWNCSTADNASVFGRVMQIGSRETAFTHAVSAAGVVNAISRACREGELSTCGCSRTARPKDLPRDWLWGGCGDNVEYGYRFAKEFVDAREREKNFAKGSEEQGRVLMNLQNNEAGRRAVYKMADVACKCHGVSGSCSLKTCWLQLAEFRKVGDRLKEKYDSAAAMRVTRKGRLELVNSRFTQPTPEDLVYVDPSPDYCLRNESTGSLGTQGRLCNKTSEGMDGCELMCCGRGYNQFKSVQVERCHCKFHWCCFVRCKKCTEIVDQYICK

SEQ ID NO: 10553 - protein, 365 aa, Homo sapiens
MAGSAMSSKFFLVALAIFFSFAQVVIEANSWWSLGMNNPVQMSEVYIIGAQPLCSQLAGLSQGQKKLCHLYQDHMQYIGEGAKTGIKECQYQFRHRRWNCSTVDNTSVFGRVMQIGSRETAFTYAVSAAGVVNAMSRACREGELSTCGCSRAARPKDLPRDWLWGGCGDNIDYGYRFAKEFVDARERERIHAKGSYESARILMNLHNNEAGRRTVYNLADVACKCHGVSGSCSLKTCWLQLADFRKVGDALKEKYDSAAAMRLNSRGKLVQVNSRFNSPTTQDLVYIDPSPDYCVRNESTGSLGTQGRLCNKTSEGMDGCELMCCGRGYDQFKTVQTERCHCKFHWCCYVKCKKCTEIVDQFVCK

SEQ ID NO: 10554 - protein, 486 aa, Homo sapiens
SAPFPFPGGQAADPSVFIPLLHSQLLQLSRASMAAWKSWTALRLCATVVVLDMVVCKGFVEDLDESFKENRNDDIWLVDFYAPWCGHCKKLEPIWNEVGLEMKSIGSPVKVGKMDATSYSSIASEFGVRGYPTIKLLKGDLAYNYRGPRTKDDIIEFAHRVSGALIRPLPSQQMFEHMQKRHRVFFVYVGGESPLKEKYIDAASELIVYTYFFSASEEVVPEYVTLKEMPAVLVFKDETYFVYDEYEDGDLSSWINRERFQNYLAMDGFLLYELGDTGKLVALAVIDEKNTSVEHTRLKSIIQEVARDYRDLFHRDFQFGHMDGNDYINTLLMDELTVPTVVVLNTSNQQYFLLDRQIKNVEDMVQFINNILDGTVEAQGGDSILQRLKRIVFDAKSTIVSIFKSSPLMGCFLFGLPLGVISIMCYGIYTADTDGGYIEERYEVSKSENENQEQIEESKEQQEPSSGGSVVPTVQEPKDVLEKKKD

SEQ ID NO: 10555 - protein, 262 aa, Homo sapiens
MAAASAGATRLLLLLLMAVAAPSRARGSGCRAGTGARGAGAEGREGEACGTVGLLLEHSFEIDDSANFRKRGSLLWNQQDGTLSLSQRQLSEEERGRLRDVAALNGLYRVRIPRRPGALDGLEAGGYVSSFVPACSLVESHLSDQLTLHVDVAGNVVGVSVVTHPGGCRGHEVEDVDLELFNTSVQLQPPTTAPGPETAAFIERLEMEQAQKAKNPQEQKSFFAKYWMYIIPVVLFLMMSGAPDAGGQGGGGGGGGGGGSGR

SEQ ID NO: 10556 - protein, 266 aa, Homo sapiens
MAAASAGATRLLLLLLMAVAAPSRARGSGCRAGTGARGAGAEGREGEACGTVGLLLEHSFEIGDSANFRKRGSLLWNQQDGTLSLSQRQLSEEERGRLRDVAALNGLYRVRIPRRPGALDGLEAGGYVSSFVPACSLVESHLSDQLTLHVDVAGNVVGVSVVTHPGGCRGHEVEDVDLELFNTSVQLQPPTTAPALRRRPSLSAWRWNRPRRPRTPRSRSPSSPNTGTSSWGGPCCSQPCVLLRQGPRHRHRRPDGCTSFPSSCSS

SEQ ID NO: 10557 - protein, 234 aa, Homo sapiens
MLTNETGFEISSSDATVKILITTVPPNLRKLDPELHLDIKVLQSALAAIRHARWFEENASQSTVKVLIRLLKDLRIRFPGFEPLTPWILDLLGHYAVMNNPTRQPLALNVAYRRCLQILAAGLFLPGSVGITDPCESGNFRVHTVMTLEQQDMVCYTAQTLVRILSHGGFRKILGQEGDASYLASEISTWDGVIVTPSEKAYEKPPEKKEGEEEEENTEEPPQGEEEESMETQE

SEQ ID NO: 10558 - protein, 390 aa, Homo sapiens
MRGDRGRGRGGRFGSRGGPGGGFRPFVPHIPFDFYLCEMAFPRVKPAPDETSFSEALLKRNQDLAPNSAEQASILSLVTKINNVIDNLIVAPGTFEVQIEEVRQVGSYKKGTMTTGHNVADLVVILKILPTLEAVAALGNKVVESLRAQDPSEVLTMLTNETGFEISSSDATVKILITTVPPNLRKLDPELHLDIKVLQSALAAIRHARWFEENASQSTVKVLIRLLKDLRIRFPGFEPLTPWILDLLGHYAVMNNPTRQPLALNVAYRRCLQILAAGLFLPGSVGITDPCESGNFRVHTVMTLEQQDMVCYTAQTLVRILSHGGFRKILGQEGDASYLASEISTWDGVIVTPSEKAYEKPPEKKEGEEEEENTEEPPQGEEEESMETQE

SEQ ID NO: 10559 - protein, 406 aa, Homo sapiens
MRGDRGRGRGGRFGSRGGPGGGFRPFVPHIPFDFYLCEMAFPRVKPAPDETSFSEALLKRNQDLAPNSAEQASILSLVTKINNVIDNLIVAPGTFEVQIEEVRQVGSYKKGTMTTGHNVADLVVILKILPTLEAVAALGNKVVESLRAQDPSEVLTMLTNETGFEISSSDATVKILITTVPPNLRKLDPELHLDIKVLQSALAAIRHARWFEENASQSTVKVLIRLLKDLRIRFPGFEPLTPWILDLLGHYAVMNNPTRQPLALNVAYRRCLQILAAGLFLPGSVGITDPCESGNFRVHTVMTLEQQDMVCYTAQTLVRILSHGGFRKILGQEGDASYLASEISTWDGVIVTPSEKAYEKPPEKKEGEEEEENTERTTSRRGRRKHGNSGVTFPSLLFLPKGKTGA

SEQ ID NO: 10560 - protein, 247 aa, Homo sapiens
MQAPRELAVGIDLGTTYSCVGVFQQGRVEILANDQGNRTTPSYVAFTDTERLVGDAAKNQAALNPHNTVFDAKRLIGRKFADTTVQSDMKHWPFKVVSGGGKPKVRVCYRGEDKTFYPEEISSMVLTKMKETAEAYLGQPVKHAVITVPTYFSNSQRQATKDAGAIAGLKVLPIINEATAAAIAYGLDRRRAGKRNVLIFDLGGGTFDVSVLTIDAGVFEVKATAGDTHLGGEDFDNRLVNHFMEEF

SEQ ID NO: 10561 - protein, 643 aa, Homo sapiens
MQAPRELAVGIDLGTTYSCVGVFQQGRVEILANDQGNRTTPSYVAFTDTERLVGDAAKSQAALNPHNTVFDAKRLIGRKFADTTVQSDMKHWPFRVVSEGGKPKVRVCYRGEDKTFYPEEISSMVLSKMKETAEAYLGQPVKHAVITVPAYFNDSQRQATKDAGAIAGLNVLRIINEPTAAAIAYGLDRRGAGERNVLIFDLGGGTFDVSVLSIDAGVFEVKATAGDTHLGGEDFDNRLVNHFMEEFRRKHGKDLSGNKRALRRLRTACERAKRTLSSSTQATLEIDSLFEGVDFYTSITRARFEELCSDLFRSTLEPVEKALRDAKLDKAQIHDVVLVGGSTRIPKVQKLLQDFFNGKELNKSINPDEAVAYGAAVQAAVLMGDKCEKVQDLLLLDVAPLSLGLETAGGVMTTLIQRNATIPTKQTQTFTTYSDNQPGVFIQVYEGERAMTKDNNLLGRFELSGIPPAPRGVPQIEVTFDIDANGILSVTATDRSTGKANKITITNDKGRLSKEEVERMVHEAEQYKAEDEAQRDRVAAKNSLEAHVFHVKGSLQEESLRDKIPEEDRRKMQDKCREVLAWLEHNQLAEKEEYEHQKRELEQICRPIFSRLYGGPGVPGGSSCGTQARQGDPSTGPIIEEVD

SEQ ID NO: 10562 - protein, 1101 aa, Homo sapiens
MATVPVYCVCRLPYDVTRPRAARPPARPGPTRAAQRRGRAAAPDIDIYHCPNCEKTHGKSTVKKKRTWHKHGPGQAPDVKPVQNGSQLFIKELRSRTFPSAEDVVARVPGSQLTLGYMEEHGFTEPILVPKKDGLGLAVPAPTFYVSDVENYVGPERSVDVTDVTKQKDCKMKLKEFVDYYYSTNRKRVLNVTNLEFSDTRMSSFVEPPDIVKKLSWVENYWPDDALLAKPKVTKYCLICVKDSYTDFHIDSGGASAWYHVLKGEKTFYLIRPASANISLYERWRSASNHSEMFFADQVDKCYKCIVKQGQTLFIPSGWIYATLTPVDCLAFAGHFLHSLSVEMQMRAYEVERRLKLGSLTQFPNFETACWYMGKHLLEAFKGSHKSGKQLPPHLVQGAKILNGAFRSWTKKQALAEHEDELPEHFKPSQLIKDLAKEIRLSENASKAVRPEVNTVASSDEVCDGDREKEEPPSPIEATPPQSLLEKVSKKKTPKTVKMPKPSKIPKPPKPPKPPRPPKTLKLKDGGKKKGKKSRESASPTIPNLDLLEAHTKEALTKMEPPKKGKATKSVLSVPNKDVVHMQNDVERLEIREQTKSKSEAKWKYKNSKPDSLLKMEEEQKLEKSPLAGNKDNKFSFSFSNKKLLGSKALRPPTSPGVFGALQNFKEDKPKPVRDEYEYVSDDGELKIDEFPIRRKKNAPKRDLSFLLDKKAVLPTPVTKPKLDSAAYKSDDSSDEGSLHIDTDTKPGRNARVKKESGSSAAGILDLLQASEEVGALEYNPSSQPPASPSTQEAIQGMLSMANLQASDSCLQTTWGAGQAKGSSLAAHGARKNGGGSGKSAGKRLLKRAAKNSVDLDDYEEEQDHLDACFKDSDYVYPSLESDEDNPIFKSRSKKRKGSDDAPYSPTARVGPSVPRQDRPVREGTRVASIETGLAAAAAKLSQQEEQKSKKKKSAKRKLTPNTTSPSTSTSISAGTTSTSTTPASTTPASTTPASTTPASTSTASSQASQEGSSPEPPPESHSSSLADHEYTAAGTFTGAQAGRTSQPMAPGVFLTQRRPSASSPNNNTAAKGKRTKKGMATAKQRLGKILKIHRNGKLLL

SEQ ID NO: 10563 - protein, 1101 aa, Homo sapiens
MATVPVYCVCRLPYDVTRFMIECDACKDWFHGSCVGVEEEEAPDIDIYHCPNCEKTHGKSTLKKKRTWHKHGPGQAPDVKPVQNGSQLFIKELRSRTFPSAEDVVARVPGSQLTLGYMEEHGFTEPILVPKKDGLGLAVPAPTFYVSDVENYVGPERSVDVTDVTKQKDCKMKLKEFVDYYYSTNRKRVLNVTNLEFSDTRMSSFVEPPDIVKKLSWVENYWPDDALLAKPKVTKYCLICVKDSYTDFHIDSGGASAWYHVLKGEKTFYLIRPASANISLYERWRSASNHSEMFFADQVDKCYKCIVKQGQTLFIPSGWIYATLTPVDCLAFAGHFLHSLSVEMQMRAYEVERRLKLGSLTQFPNFETACWYMGKHLLEAFKGSHKSGKQLPPHLVQGAKILNGAFRSWTKKQALAEHEDELPEHFKPSQLIKDLAKEIRLSENASKAVRPEVNTVASSDEVCDGDREKEEPPSPIEATPPQSLLEKVSKKKTPKTVKMPKPSKIPKPPKPPKPPRPPKTLKLKDGGKKKGKKSRESASPTIPNLDLLEAHTKEALTKMEPPKKGKATKSVLSVPNKDVVHMQNDVERLEIREQTKSKSEAKWKYKNSKPDSLLKMEEEQKLEKSPLAGNKDNKFSFSFSNKKLLGSKALRPPTSPGVFGALQNFKEDKPKPVRDEYEYVSDDGELKIDEFPIRRKKNAPKRDLSFLLDKKAVLPTPVTKPKLDSAAYKSDDSSDEGSLHIDTDTKPGRNARVKKESGSSAAGILDLLQASEEVGALEYNPSSQPPASPSTQEAIQGMLSMANLQASDSCLQTTWGAGQAKGSSLAAHGARKNGGGSGKSAGKRLLKRAAKNSVDLDDYEEEQDHLDACFKDSDYVYPSLESDEDNPIFKSRSKKRKGSDDAPYSPTARVGPSVPRQDRPVREGTRVASIETGLAAAAAKLSQQEEQKSKKKKSAKRKLTPNTTSPSTSTSISAGTTSTSTTPASTTPASTTPASTTPASTSTASSQASQEGSSPEPPPESHSSSLADHEYTAAGTFTGAQAGRTSQPMAPGVFLTQRRPSASSPNNNTAAKGKRTKKGMATAKQRLGKILKIHRNGKLLL

SEQ ID NO: 10564 - protein, 795 aa, Homo sapiens
MYHSLSETRHPLQPEEQEVGIDPLSSYSNKSGGDSNKNGRRTSSTLDSEGTFNSYRKEWEELFVNNNYLATIRQKGINGQLRSSRFRSICWKLFLCVLPQDKSQWISRIEELRAWYSNIKEIHITNPRKVVGQQDLMINNPLSQDEGSLWNKFFQDKELRSMIEQDVKRTFPEMQFFQQENVRKILTDVLFCYARENEQLLYKQGMHELLAPIVFVLHCDHQAFLHASESAQPSEEMKTVLNPEYLEHDAYAVFSQLMETAEPWFSTFEHDGQKGKETLMTPIPFARPQDLGPTIAIVTKVNQIQDHLLKKHDIELYMHLNRLEIAPQIYGLRWVRLLFGREFPLQDLLVVWDALFADGLSLGLVDYIFVAMLLYIRDALISSNYQTCLGLLMHYPFIGDVHSLILKALFLRDPKRNPRPVTYQFHPNLDYYKARGADLMNKSRTNAKGAPLNINKVSNSLINFGRKLISPAMAPGSAGGPVPGGNSSSSSSVVIPTRTSAEAPSHHLQQQQQQQRLMKSESMPVQLNKGLSSKNISSSPSVESLPGGREFTGSPPSSATKKDSFFSNISRSRSHSKTMGRKESEEELEAQISFLQGQLNDLDAMCKYCAKVMDTHLVNIQDVILQENLEKEDQILVSLAGLKQIKDILKGSLRFNQSQLEAEENEQITIADNHYCSSGQGQGRGQGQSVQMSGAIKQASSETPGCTDRGNSDDFILISKDDDGSSARGSFSGQAQPLRTLRSTSGKSQAPVCSPLVFSDPLMGPASASSSNPSSSPDDDSSKDSGFTIVSPLDI

SEQ ID NO: 10565 - protein, 850 aa, Homo sapiens
MIANISPSHVATEHTLNTLRYADRVKELKKGIKCCTSVTSRNRTSGNSSPKRIQSSPGALSEDKCSPKKVKLGFQQSLTVAAPGSTRGKVHPLTSHPPNIPFTSAPKVSGKRGGSRGSPSQEWVIHASPVKGTVRSGHVAKKKPEESAPLCSEKNRMGNKTVLGWESRASGPGEGLVRGKLSTKCKKVQTVQPVQKQLVSRVELSFGNAHHRAEYSQDSQRGTPARPASEAWTNIPPHQKEREEHLRFYHQQFQQPPLLQQKLKYQPLKRSLRQYRPPEGQLTNETPPLFHSYSENHDGAQVEELDDSDFSEDSFSHIFSQRATKQRNTLENSEDSFFLHQTWGQGPEKQVAERQQSLFSSPRTGDKKDLTKSWVDSRDPINHRRAALDHSCSPSKGPVDWSRENSTSSGPSPRDSLAEKPYCSQVDFIYRQERGGGSSFDLRKDASQSEVSGENEGNLPSPEEDGFTISLSHVAVPGSPDQRDTVTTPLREVSADGPIQVTSTVKNGHAVPGEDPRGQLGTHAEYASGLMSPLTMSLLENPDNEGSPPSEQLVQDGATHSLVAESTGGPVVSHTVPSGDQEAALPVSSATRHLWLSSSPPDNKPGGDLPALSPSPIRQHPADKLPSREADLGEACQSRETVLFSHEHMGSEQYDADAEETGLDGSWGFPGKPFTTIHMGVPHSGPTLTPRTGSSDVADQLWAQERKHPTRLGWQEFGLSTDPIKLPCNSENVTWLKPRPISRCLARPSSPLVPSCSPKTAGTLRQPTLEQAQQVVIRAHQEQLDEMAELGFKEETLMSQLASNDFEDFVTQLDEIMVLKSKCIQSLRSQLQLYLTCHGPTAAPEGTVPS

SEQ ID NO: 10566 - protein, 926 aa, Homo sapiens
MIVTIFPQYLKMPVYKHIRQNTSEKQNPWTEMEKIRVCVRKRPLGMREVRRGEINIITVEDKETLLVHEKKEAVDLTQYILQTGAGKTYTMIGTHENPGLYALAAKDIFRQLEVSQPRKHLFVWISFYEIYCGQLYDLLNRRKRLFAREDSKHMVQIVGLQELQVDSVELLLEVILKGSKERSTGATGVNADSSRSHAVIQIQIKDSAKRTFGRISFIDLAGSERAADARDSDRQTKMEGAEINQSLLALKECIRALDQEHTHTPFRQSKLTQVLKDSFIGNAKTCMIANISPSHVATEHTLNTLRYADRVKELKKGIKCCTSVTSRNRTSGNSSPKRIQSSPGALSEDKCSPKKVKLGFQQSLTVAAPGSTRGKVHPLTSHPPNIPFTSAPKVSGKRGGSRGSPSQEWVIHASPVKGTVRSGHVAKKKPEESAPLCSEKNRMGNKTVLGWESRASGPGEGLVRGKLSTKCKKVQTVQPVQKQLVSRVELSFGNAHHRAEYSQDSQRGTPARPASEAWTNIPPHQKEREEHLRFYHQQFQQPPLLQQKLKYQPLKRSLRQYRPPEGQLTNETPPLFHSYSENHDGAQVEELDDSDFSEDSFSHISSQRATKQRNTLENSEDSFFLHQTWGQGPEKQVAERQQSLFSSPRTGDKKDLTKSWVDSRDPINHRRAALDHSCSPSKGPVDWSRENSTSSGPSPRDSLAEKPYCSQVDFIYRQERGGGSSFDLRKDASQSEVSGENEGNLPSPEEDGFTISLSHVAVPGSPDQRDTVTTPLREVSADGPIQVTSTVKNGHAVPGEDPRGQLGTHAEYASGLMSPLTMSLLENPDNEGSPPSEQLVQDGATHSLVAESTGGPVVSHTVPSGDQEAALPVSSATRHLWLSSSPPDNKPGGDLPALGPGEKTSYKAWLAGVWFVHRPHQVALQQ

SEQ ID NO: 10567 - protein, 181 aa, Homo sapiens
MLLPQAVTQFEELVGMAEALLKGGGTMSTSASTLWRATNNSSPDSFASTCSNSNSNSSSPVSLKPEEEHQTDEKQFQIEKWQIARCNKSKPQKFINDLMQVLYTNEYMATHSLTGAKSSTSRDKAVKPAMNQNEVQEIIGVTKQLFPNTDDVSIRRMIGQKLNNCTKKPNLSKNLNSQDIK

SEQ ID NO: 10568 - protein, 189 aa, Homo sapiens
MQKIVQTDEITNTQAFRKGKRKRTETMDSENANSDMDKGQRDPYSGNAFLPGESSSEDEEPLAELSKEELCAKIKSLKEKLTNTRKENSRLRQSLVMLQVLPQAVTQFEELVGMAEALLKGGGTMSTSASTLWRATNNSSPDSFASTCSNSNSNSSSPVSLKPEEEHQTDEKQFQIEKWQNPLLQGTKL

SEQ ID NO: 10569 - protein, 167 aa, Homo sapiens
MSEWMKKGPLEWQDYIYKEVRVTASEKNEYKGWVLTTDPVSANIVLVNFLEDGSMSVTGIMGHAVQTVETMNEGDHRVREKLMHLFTSGDCKAYSPEDLEERKNSLKKWLEKNHIPITEQGDAPRTLCVAGVLTIDPPYGPENCSSSNEIILSRVQDLIEGHLTASQ

SEQ ID NO: 10570 - protein, 432 aa, Homo sapiens
QLNSKDLLEHNLTFTKSPAKKLTNALSKSLSCASSREPLHPMFPDQPEKPLNLAHIVPPRPVTSMNDTLFSHSVPSSGSPFITRSSPPKDSEVEQNKLLARAAPAFLKGKGMLESSNRLDEEHRLIARYAARLAAESSSSQPPQQRSAPDISFTIDANKQQRQLIAELENKNREILQEIQRLRLEHEQASQPTPEKAQQNPTLLAELRLLRQRKDELEQRMSALQESRRELMVQLEGLMKLLKTQGAGSPRSSPSHTISRPIPMPIRSASACSTPTHTPQDSLTGVGGDVQEAFAQSSRRNLRNDLLVAADSITNTMSSLVKELNSEVGSETESNVDSEFARTQFEDLVPSPTSEKAFLAQIHARKPGYIHSGATTSTMRGDMVTEDADPYVQPEDENYENDSVRQLENELQMEEYLKQKLQDEAYQVSLQG

SEQ ID NO: 10571 - protein, 188 aa, Homo sapiens
MLLQQQLDDARNKADNQEKAILNIQARCDARVQNLQAECRKHRLLLEEDNKMLVNELNHSKEKECQYEKEKAEREVAVRQLQQKRDDVLNKGSATKALLDASSRHCTYLENGMQDSRKKLDQMRSQFQEIQDQLTATIRCTKEMEGDTQKLEVEHVMMRKIIKKQDDQIERLEKILQHSSLMLQVFES

SEQ ID NO: 10572 - protein, 1053 aa, Homo sapiens
MQQVSPQKQRAEKATSDDKDSVSNIATEIKEGPISGTVSSQKQPAEKATSDEKDSVSNIATEIKEGQQSGTVSPQKQSAQKVIFKKKVSLLNIATRIMGGGKSGTVSSQKQPASKTASDKTDSALNTATEIKDGLQCGTVSSQKQQALKATTDEEGSVSNIATEIKDGEKSGTVSSQKKPALKATSDEKDSFSNITREKKDGEISRTVSSQKPPALKATSVKEDSVLNIAREKKDGEKSRTVSFEQPPGLKATRDEKDSLLNIARGKKDGEKTRRVSSHKQPSLKATSDKEDSVPNMATETKDEQISGTVSCQKQPALKATSDKKDSVSNIPTEIKDGQQSGTVSSQKQPAWKATSVKKDSVSNIATEIKDGQIRGTVSSQRRPALKTTGDEKDSVSNIAREIKDGEKSGTVSPQKQSAQKVIFKKKVSLLNIATRITGGGKSGTEYPENLRTLKATIENKDSVLNTATKMKEVQTSTPAEQDLEMASEGEQKRLEEYENNQPQVKNQIHSRDDLDDIIQSSQTVSEDGDSLCCNCKNVILLIDQHEMKCKDCVHLLKIKNTFCLWKRLIKLKDNHCEQLRVKIRKLKNKASVLQKRISEKEEIKSQLKHEILELEKELCSLRFAIQQEKKKRRNVEELHQKVREKLRITEEQYRIEADVTKPIKPALKSAEVELKTGGNNSNQVSETDEKEDLLHENRLMQDEIARLRLEKDTIKNQNLEKKYLKDFEIVKRKHEDLQKALKRNGETLAKTIACYSGQLAALTDENTTLRSKLEKQRESRQRLETEMQSYRCRLNAARCDHDQSHSSKRDQELAFQGTVDKCRHLQENLNSHVLILSLQLSKAESKSRVLKTELHYTGEALKEKALVFEHVQSELKQKQSQMKDIEKMYKSGYNTMEKCIEKQERFCQLKKQNMLLQQQLDDARNKADNQEKAILNIQARCDARVQNLQAECRKHRLLLEEDNKMLVNELNHSKEKECQYEKEKAEREVAVRQLQQKRDDVLNKGSATKALLDASSRHCTYLENGMQDSRKKLDQMRSQVCMQLCTPTTVNL

SEQ ID NO: 10573 - protein, 187 aa, Homo sapiens
RGFEHVQSELKQKQSQMKDIEKMYKSGYNTMEKCIEKQERFCQLKKQNMLLQQQLDDARNKADNQEKAILNIQARCDARVQNLQAECRKHRLLLEEDNKMLVNELNHSKEKECQYEKEKAEREVAVRQLQQKRDDVLNKGSATKALLDASSRHCTYLENGMQDSRKKLDQMRSQVCMQLCTPTTVNL

SEQ ID NO: 10574 - protein, 498 aa, Homo sapiens
MDVTDHYEDVRKIYDDFLKNSNMLDLIDVYQKCRALTSNCENYNTVSPSQLLDFLSGKQYAVGDETDLSIPTSPTSKYNRDNEKVQLLARKIIFSYLNLLVNSKNDLAVAYILNIPDRGLGREAFTDLKHAAREKQMSIFLVATSFIRTIELGGKGYAPPPSDPLRTHVKGLSNFINFIDKLDEILGEIPNPSIAGGQILSVIKMQLIKGQNSRDPFCKAIEEVAQDLDLRIKNIINSQEGVVALSTTDISPARPKSHAINHGTAYCGRDTVKALLVLLDEEAANAPTKNKAELLYDEEDTIHHHGTSILTLFRSPTQVNNLIKPLRERICVSMQEKKIKMKQTLIRSQFACTYKDDYMISKDNWNNVNLASKPLCVLYMENDLSEGVNPSVGRSTIGTSFGNVHLDRSKNEKVSRKSTSQTGNKSSKRKQVDLDGENILCDNRNEPPQHKNAKIPKKSNDSQNRLYGKLAKVAKSNKCTAKDKLISGQAKLTQFFRL

SEQ ID NO: 10575 - protein, 154 aa, Homo sapiens
MPRISSRGAASGPPSPEMRSMWKTGRSFGLMSCGENITRNKGMNLRTSWRNKTMSRKRGAGRLWSSGASGTMTACTHPISTTATTRDPILKPAKKTKLVAPLASPCSSNLSHANRPFRGSQLGVCSGQQLLKRRMPFLPVCESVLTFTSLQTII

SEQ ID NO: 10576 - protein, 1327 aa, Homo sapiens
MAASRRSQHHHHHHQQQLQPAPGASAPPPPPPPPLSPGLAPGTTPASPTASGLAPFASPRHGLALPEGDGSRDPPDRPRSPDPVDGTSCCSTTSTICTVAAAPVVPAVSTSSAAGVAPNPAGSGSNNSPSSSSSPTSSSSSSPSSPGSSLAESPEAAGVSSTAPLGPGAAGPGTGVPAVSGALRELLEACRNGDVSRVKRLVDAANVNAKDMAGRKSSPLHFAAGFGRKDVVEHLLQMGANVHARDDGGLIPLHNACSFGHAEVVSLLLCQGADPNARDNWNYTPLHEAAIKGKIDVCIVLLQHGADPNIRNTDGKSALDLADPSAKAVLTGEYKKDELLEAARSGNEEKLMALLTPLNVNCHASDGRKSTPLHLAAGYNRVRIVQLLLQHGADVHAKDKGGLVPLHNACSYGHYEVTELLLKHGACVNAMDLWQFTPLHEAASKNRVEVCSLLLSHGADPTLVNCHGKSAVDMAPTPELRERLTYEFKGHSLLQAAREADLAKVKKTLALEIINFKQPQSHETALHCAVASLHPKRKQVTELLLRKGANVNEKNKDFMTPLHVAAERAHNDVMEVLHKHGAKMNALDTLGQTALHRAALAGHLQTCRLLLSYGSDPSIISLQGFTAAQMGNEAVQQILSESTPIRTSDVDYRLLEASKAGDLETVKQLCSSQNVNCRDLEGRHSTPLHFAAGYNRVSVVEYLLHHGADVHAKDKGGLVPLHNACSYGHYEVAELLVRHGASVNVADLWKFTPLHEAAAKGKYEICKLLLKHGADPTKKNRDGNTPLDLVKEGDTDIQDLLKGDAALLDAAKKGCLARVQKLCTPENINCRDTQGRNSTPLHLAAGYNNLEVAEYLLEHGADVNAQDKGGLIPLHNAASYGHVDIAALLIKYNTCVNATDKWAFTPLHEAAQKGRTQLCALLLAHGADPTMKNQEGQTPLDLATADDIRALLIDAMPPEALPTCFKPQATVVSASLISPASTPSCLSAASSIDNLTGPLAELAVGGASNAGDGAAGTERKEGEVAGLDMNISQFLKSLGLEHLRDIFETEQITLDVLADMGHEELKEIGINAYGHRHKLIKGVERLLGGQQGTNPYLTFHCVNQGTILLDLAPEDKEYQSVEEEMQSTIREHRDGGNAGGIFNRYNVIRIQKVVNKKLRERFCHRQKEVSEENHNHHNERMLFHGSPFINAIIHKGFDERHAYIGGMFGAGIYFAENSSKSNQYVYGIGGGTGCPTHKDRSCYICHRQMLFCRVTLGKSFLQFSTMKMAHAPPGHHSVIGRPSVNGLAYAEYVIYRGEQAYPEYLITYQIMKPEAPSQTATAAEQKT

SEQ ID NO: 10577 - protein, 822 aa, Homo sapiens
MTTDSEIFGQIFRERTSHKQQLLSSVEDASGTSTQESSGVLLKRNSMGTVPDPLRSAKTSLIAASGKEDDLGEPQAASPRHRPALLCKNANGFSGAPAEPDLSPRAAAEALMQVCEHETTQPDMSSPGVFNEVQKAPATFNSPGNPQLPGSSQPAASAPSSAAGRDLIHTPLTMPANQHTCQSIPGDQPNAITSSMPEDSLMRSQRTSNREQPEKPSCPVGGVLSSSKDQVSCEFPSPETIQGTVQTPVTAARVVSHSSSPVGGPEGERQGAICDSEMRSCKPLTRESGCSENKQPSVTASGPQGTTSVTPQPTPLTSEPSACPPGPEKVPLPAQRQMSRFKEASTMTNQAESEIKEVPSRAWQDAEVQAVASVESRSVSTSPSILTAFLKESRAPEHFEQEQLRVICHSSGSHTLELSDSTLAPQESSQCPGIMPQVHIQAAAAESTAFQRENKLASLPGGVLKTSSINLVSSNAQHTCKEDGRLAGMTPVREESTAKKLAGTNSSSLKATAIDQISISACSQAETSYGLGKFETRPSEFAEKTTNGHKTDPDCKLSDSCGSISKADHSGSLDPTNKGDAREKKPASPQVVKEKESTGTDTSDAKTLLLNPKSQESGGTESAANPTPSPIRKNQESTLEENRQTKTATSLSLPSDPMGDSSPGSGKKTPSRSVKASPRRPSRVSEFLKEQKLNVTAAAAQVGLTPGDKKKQLGADSKLQLKQSKRVRDVVWDEQGMTWEVYGASLDAESLGIAIQNHLQRQIREHEKLIKTQNSQTRRSISSDTSSNKKLRGRQHSVFQSMLQNFRRPNCCVRPAPSSVLD

SEQ ID NO: 10578 - protein, 776 aa, Homo sapiens
MGTVPDPLRSAKTSLIAASGKEDDLGEPQAASPRHRPALLCKNANGFSGAPAEPDLSPRAAAEALMQVCEHETTQPDMSSPGVFNEVQKAPATFNSPGNPQLPGSSQPAASAPSSAAGRDLIHTPLTMPANQHTCQSIPGDQPNAITSSMPEDSLMRSQRTSNREQPEKPSCPVGGVLSSSKDQVSCEFPSPETIQGTVQTPVTAARVVSHSSSPVGGPEGERQGAICDSEMRSCKPLTRESGCSENKQPSVTASGPQGTTSVTPQPTPLTSEPSACPPGPEKVPLPAQRQMSRFKEASTMTNQAESEIKEVPSRAWQDAEVQAVASVESRSVSTSPSILTAFLKESRAPEHFEQEQLRVICRSSGSHTLELSDSTLAPQESSQCPGIMPQVHIQAAAAESTAFQRENKLASLPGGVLKTSSINLVSSNAQHTCKEDGRLAGMTPAREESTAKKLAGTNSSSLKATAIDQISISACSQAETSYGLGKFETRPSEFAEKTTNGHKTDPDCKLSDSCGSISKADHSGSLDPTNKGDAREKKPASPQVVKEKESTGTDTSDAKTLLLNPKSQESGGTESAANPTPSPIRKNQESTLEENRQTKTATSLSLPSDPMGDSSPGSGKKTPSRSVKASPRRPSRVSEFLKEQKLNVTAAAAQVGLTPGDKKKQLGADSKLQLKQSKRVRDVVWDEQGMTWEVYGASLDAESLGIAIQNHLQRQIREHEKLIKTQNSQTRRSISSDTSSNKKLRGRQHSVFQSMLQNFRRPNCCVRPAPSSVLD

SEQ ID NO: 10579 - protein, 518 aa, Homo sapiens
MDQTPPARPEYLVSGIRTPPVRRNSKLATLGRIFKPWKWRKKKNEKLKQTTSALEKKMAGRQGREELIKKGLLEMMEQDAESKTCNPDGGPRSVQSEPPTPKSETLTSEDAQPGSPLATGTDQVSLDKPLSSAAHLDDAAKMPSASSGEEADAGSLLPTTNELSQALAGADSLDSPPRPLERSVGQLPSPPLLPTPPPKASSKTTKNVTGQATLFQASSMKSADPSLRGQLSTPTGSPHLTTVHRPLPPSRVIEELHRALATKHRQDSFQGRESKGSPKKRLDVRLSRTSSVERGKEREEAWSFDGALENKRTAAKESEENKENLIINSELKDDLLLYQDEEALNDSIISGTLPRKCKKELLAVKLRNRPSKQELEDRNIFPRRTDEERQEIRQQIEMKLSKRLSQRPAVEELERRNILKQRNDQTEQEERREIKQRLTRKLNQRPTVDELRDRKILIRFSDYVEVAKAQDYDRRADKPWTRLSAADKAAIRKELNEYKSNEMEVHASSKHLTRFHRP

SEQ ID NO: 10580 - protein, 559 aa, Homo sapiens
MAASEDGSGCLVSRGRSQSDPSVLTDSSATSSADAGENPDEMDQTPPARPEYLVSGIRTPPVRRNSKLATLGRIFKPWKWRKKKNEKLKQTTSALEKKMAGRQGREELIKKGLLEMMEQDAESKTCNPDGGPRSVQSEPPTPKSETLTSEDAQPGSPLATGTDQVSLDKPLSSAAHLDDAAKMPSASSGEEADAGSLLPTTNELSQALAGADSLDSPPRPLERSVGQLPSPPLLPTPPPKASSKTTKNVTGQATLFQASSMKSADPSLRGQLSTPTGSPHLTTVHRPLPPSRVIEELHRALATKHRQDSFQGRESKGSPKKRLDVRLSRTSSVERGKEREEAWSFDGALENKRTAAKESEENKENLIINSELKDDLLLYQDEEALNDSIISGTLPRKCKKELLAVKLRNRPSKQELEDRNIFPRRTDEERQEIRQQIEMKLSKRLSQRPAVEELERRNILKQRNDQTEQEERREIKQRLTRKLNQRPTVDELRDRKILIRFSDYVEVAKAQDYDRRADKPWTRLSAADKAAIRKELNEYKSNEMEVHASSKHLTRFHRP

SEQ ID NO: 10581 - protein, 982 aa, Homo sapiens
MSSKMVISEPGLNWDISPKNGLKTFFSRENYKDHSMAPSLKELRVLSNRRIGENLNASASSVENEPAVSSATQAKEKVKTTIGMVLLPKPRVPYPRFSRFSQREQRSYVDLLVKYAKIPANSKAVGINKNDYLQYLDMKKHVNEEVTEFLKFLQNSAKKCAQDYNMLSDDARLFTEKILRACIEQVKKYSEFYTLHEVTSLMGFFPFRVEMGLKLEKTLLALGSVKYVKTVFPSMPIKLQLSKDDIATIETSEQTAEAMHYDISKDPNAEKLVSRYHPQIALTSQSLFTLLNNHGPTYKEQWEIPVCIQVIPVAGSKPVKVIYINSPLPQKKMTMRERNQIFHEVPLKFMMSKNTSVPVSAVFMDKPEEFISEMDMSCEVNECRKIESLENLYLDFDDDVTELETFGVTTTKVSKSPSPASTSTVPNMTDAPTAPKAGTTTVAPSAPDISANSRSLSQILMEQLQKEKQLVTGMDGGPEECKNKDDQGFESCEKVSNSDKPLIQDSDLKTSDALQLENSQEIETSNKNDMTIDILHADGERPNVLENLDNSKEKTVGSEAAKTEDTVLCSSDTDEECLIIDTECKNNSDGKTAVVGSNLSSRPASPNSSSGQASVGNQTNTACSPEESCVLKKPIKRVYKKFDPVGEILKMQDELLKPISRKVPELPLMNLENSKQPSVSEQLSGPSDSSSWPKSGWPSAFQKPKGRLPYELQDYVEDTSEYLAPQEGNFVYKLFSLQDLLLLVRCSVQRIETRPRSKKRKKIRRQFPVYVLPKVEYQACYGVEALTESELCRLWTESLLHSNSSFYVGHIDAFTSKLFLLEEITSEELKEKLSALKISNLFNILQHILKKLSSLQEGSYLLSHAAEDSSLLIYKASDGKVTRTAYNLYKTHCGLPGVPSSLSVPWVPLDPSLLLPYHIHHGRIPCTFPPKSLDTTTQQKIGGTRMPTRSHRNPVSMETKSSCLPAQQVETEGVAPHKRKIT

SEQ ID NO: 10582 - protein, 445 aa, Homo sapiens
MYPNPLIYCTCWDPWNLGPRKLIKTPQLPRKNSTGSSKLTPLLPAPKNHNYLQPTKPVVSPKMKIHSARQEETNKSFYEVINVSPGYQLVRNREQISVTLGDEMFDRKKRWESEIPDKGRFSRTNIISDLEEQISELTAIIEQMNRDHQSAQKLLSSEMDLRCAEMKQNFENKNRELKEAHEAELSELENNYKAALKAEKLAAQEKLEEMGKEYKYLKNMFRTYQDSIYDEMEEKWSKQKAKWKKDEKFERENILLQQKKKMTKKFEMESGEEDKKINESCSAVFENFIQEKEELLKQHQSDTLQLEELRKTKEVPWRRDQINRHWHDVLQQLLLMQVMQEELHAQALILESLNTNLYYTQLELQKEKAIVGNLEKMLQTKFAETEEKYKHTIQILTEENIHLKQKIISKNEEICEGCSGRLASITVSKDDSDTVQDGSKKGQES

SEQ ID NO: 10583 - protein, 871 aa, Homo sapiens
MDGESEVDFSSNSITPLWRRRSIPQPHQLLGRSKPRPQSYQSPNGLLITDFPVEDGGTLSAAQIPAQVPTASDSRTVHRSPLLLGAQRRAVANGGTASPEYRAASPRLRRPKSPKLPKAVPGGSPKSPANGAVTLPAPPPPPVLRPPRTPNAPAPCTPEEDLTGLTASPVPSPTANGLAANNDSPGSGSQSGRKAKDPERGLFPGPQKSSSEQKLPLQRLPSQENELLENPSVVLSTNSPAALKVGKQQIIPKSLASEIKISKSNNQNVEPHKRLLKVRSMVEGLGGPLGHAGEESEVDNDVDSPGSLRRGLRSTSYRRAVVSGFDFDSPTSSKKKNRMSQPVLKVVMEDKEKFSSLGRIKKKMLKGQGTFDGEENAVLYQNYKEKALDIDSDEESEPKEQKSDEKIVIHHKPLRSTWSQLSAVKRKGLSQTVSQEERKRQEAIFEVISSEHSYLLSLEILIRMFKNSKELSDTMTKTERHHLFSNITDVCEASKKFFIELEARHQNNIFIDDISDIVEKHTASTFDPYVKYCTNEVYQQRTLQKLLATNPSFKEVLSRIESHEDCRNLPMISFLILPMQRVTRLPLLMDTICQKTPKDSPKYEVCKRALKEVSKLVRLCNEGARKMERTEMMYTINSQLEFKIKPFPLVSSSRWLVKRGELTAYVEDTVLFSRRTSKQQVYFFLFNDVLIITKKKSEESYNVNDYSLRDQLLVESCDNEELNSSPGKNSSTMLYSRQSSASHLFTLTVLSNHANEKVEMLLGAETQSERARWITALGHSRGKPPADRTSLTQVEIVRSFTAKQPDELSLQVADVVLIYQRVSDGWYEGERLRDGERGWFPMECAKEITCQATIDKNVERMGRLLGLETNV

SEQ ID NO: 10584 - protein, 224 aa, Homo sapiens
MPTKKMSHSKTVFPVINKKDGITENEKSREGKGERGFNSPLHTGEDWRGGEDKRRNRYHLVIEGPNTQELAVVVLFLPGLGNSAEEVVYECTNQPPLSLSRMIPKMKLPGQENKTAVVVGTITDDVWVQEVPKLKVCALGVTSRARSHIFRVGGKNLTFDQLALDSPKVCGTVLLSGPRKGREVYWHFDKALGTPHSHTKPYVRSKGRKFEYARGQGASQGYKN

SEQ ID NO: 10585 - protein, 224 aa, Homo sapiens [sequence omitted]

SEQ ID NO: 10586 - protein, 291 aa, Homo sapiens
MAKSLLKTASLSGRTKLLHQTGLSLYSTSHGFYEEEVKKTLQQFPGGSIDLQKEDNGIGILTLNNPSRMNAFSGVMMLQLLEKVIELENWTEGKGLIVRGAKNTFSSGSDLNAVKSLGTPEAIFSSIYRLPLISVALVQGWALGGGAEFTTACDFRLMTPESKIRFVHKEMGIIPSWGGTTRLVEIIGSRQALKVLSGALKLDSKNALNIGMVEEVLQSSDETKSLEEAQEWLKQFIQGPPEVIRALKKSVCSGRELYLEEALQNERDLLGTVWGGPANLEAIAKKGKFNK

SEQ ID NO: 10587 - protein, 303 aa, Homo sapiens
MAKSLLKTASLSGRTKLLHQTGLSLYSTSHGFYEEEVKKTLQQFPGGSIDLQKEDNGIGILTLNNPSRMNAFSGVMMLQLLEKVIELENWTEGKGLIVRGAKNTFSSGSDLNAVKSLGTPEASDGMAVCMFMQNTLTRFMRLPLISVALVQGWALGGGAEFTTACDFRLMTPESKIRFVHKEMGIIPSWGGTTRLVEIIGSRQALKVLSGALKLDSKNALNIGMVEEVLQSSDETKSLEEAQEWLKQFIQGPPEVIRALKKSVCSGRELYLEEALQNERDLLGTVWGGPANLEAIAKKGKFNK

SEQ ID NO: 10588 - protein, 650 aa, Homo sapiens
MPQHHGLGDLQAACTLRQRVDVSLIGEQHPTRIPVIIGYKSEEQLPVLDKTKFLVLANQAFFLLVTGHRMMSATSLISEVYEEAFRGLAFAVPDLLQQTSFKMSHQEGSTDGLPDLGTESLFSSPEEQSGAVAATEASSDIDIATSELSVTVTGDGSDSRDGGFPNDASTENRSSDQESASEDIELESLEDFEHFLMSGESLFHYPLVVTALHQRQLGSRPRFVYEACGARAFVQRFRLQYRLADHVGCVNTVHFNQRGTRLASSGDDLKVIVWDWVRQRPVLNFESGHTNNVFQAKFLPNCGDSTLAMCARDGQVRVAELINASYFNNTKCVAQHRGPAHKLALEPDSPYKFLTSGEDAVVFTIDLRQDRPASKVVVTRENDKKVGLYTITVNPANTYQFAVGGQDQFVRIYDQRKIDKKENNGVLKKFTPHHLVNCDFPTNITCVVYSHDGTELLASYNDDDIYLFNSSHSDGAQYSKRFKGHRNNTTVKGVNFYGPRSEFVVSGSDCGHIFFWEKSSCQIIQFLKGSREGTINCLEPHPYLPVLACSGLDHDVKIWTPTAKAATELTGLKKVIKKNKWERDEDSLHHGSLFDQYMLWFLLRHVTQRGRHQDWRSGEAEFPDEESDESSSTSETSEEEVQDRVQCMPS

SEQ ID NO: 10589 - protein, 490 aa, Homo sapiens
MSQTRKKTSSEGETKPQTSTVNKFLRGSNAESRKEDNDLKTSDSQPSDWIQKTATSETAKPLSSEMEWRSSMEKNEHFLQKLGKKAVNKCLDLNNCGLTTADMKEMGEAFEMIPELEELNLSWNSKVGGNLPLILQKFQKGSKIQMIELVDCSLTSEDGTFLGQLLPMLQSLEVLDLSINRDIVGSLNSIAQGLKSTSNLKVLKLHSCGLSQKSVKILDAAFRYLGELRKLDLSCNKDLGGGFEDSPAQLVMLKHLQVLDLHQCSLTADDVMSLTQVIPLLSNLQELDLSANKKMGSSSENLLSRLRFLPALKSLVINNCALESETFTALAEASVHLSALEVFNLSWNKCVGGNLELLLETLKLSMSLQVLRLSSCSLVTEDVALLASVIQTGHLAKLQKLDLSYNDSICDAGWTMFCQNVRFLKELIELDISLRPSNFRDCGQWFRHLLYAVTKLPQITEIGMKRWILPASQEEELECFDQEKKKKHSL

SEQ ID NO: 10590 - protein, 736 aa, Homo sapiens
MGSPLRFDGRVVLVTGAGAGLGRAYALAFAERGALVVVNDLGGDFKGVGKGSLAADKVVEEIRRRGGKAVANYDSVEEGEKVVKTALDAFGRIDVVVNNAGILRDRSFARISDEDWDIIHRVHLRGSFQVTRAAWEHMKKQKYGRIIMTSSASGIYGNFGQANYSAAKLGLLGLANSLAIEGRKSNIHCNTIAPNAGSRMTQTVMPEDLVEALKPEYVAPLVLWLCHESCEENGGLFEVGAGWIGKLRWERTLGAIVRQKNHPMTPEAVKANWKKICDFENASKPQSIQESTGSIIEVLSKIDSEGGVSANHTSRATSTATSGFAGAIGQKLPPFSYAYTELEAIMYALGVGASIKDPKDLKFIYEGSSDFSCLPTFGVIIGQKSMMGGGLAEIPGLSINFAKVLHGEQYLELYKPLPRAGKLKCEAVVADVLDKGSGVVIIMDVYSYSEKELICHNQFSLFLVGSGGFGGKRTSDKVKVAVAIPNRPPDAVLTDTTSLNQAALYRLSGDWNPLHIDPNFASLAGFDKPILHGLCTFGFSARRVLQQFADNDVSRFKAIKARFAKPVYPGQTLQTEMWKEGNRIHFQTKVQETGDIVISNAYVDLAPTSGTSAKTPSEGGKLQSTFVFEEIGRRLKDIGPEVVKKVNAVFEWHITKGGNIGAKWTIDLKSGSGKVYQGPAKGAADTTIILSDEDFMEVVLGKLDPQKAFFSGRLKARGNIMLSQKLQMILKDYAKL

SEQ ID NO: 10591 - protein, 563 aa, Homo sapiens
MGSLSNYALLQLTLTAFLTILVQPQHLLAPVFRTLSILTNQSNCWLCEHLDNAEQPELVFVPASASTWWTYSGQWMYERVWYPQAEVQNHSTSSYRKVTWHWEASMEAQGLSFAQVRLLEGNFSLCVENKNGSGPFLGNIPKQYCNQILWFDSTDGTFMPSIDVTNESRNDDDDTSVCLGTRQCSWFAGCTNRTWNSSAVPLIGLPNTQDYKWVDRNSGLTWSGNDTCLYSCQNQTKGLLYQLFRNLFCSYGLTEAHGKWRCADASITNDKGHDGHRTPTWWLTGSNLTLSVNNSGLFFLCGNGVYKGFPPKWSGRCGLGYLVPSLTRYLTLNASQITNLRSFIHKVTPHRCTQGDTDNPPLYCNPKDNSTIRALFPSLGTYDLEKAILNISKAMEQEFSATKQTLEAHQSKVSSLASASRKDHVLDIPTTQRQTACGTVGKQCCLYINYSEEIKSNIQRLHEASENLKNVPLLDWQGIFAKVGDWFRSWGYVLLIVLFCLFIFVLIYVRVFRKSRRSLNSQPLNLALSPQQSAQLLVSETSCQVSNRAMKGLTTHQYDTSLL

SEQ ID NO: 10592 - protein, 321 aa, Homo sapiens
MDVRALPWLPWLLWLLCRGGGDADSRAPFTPTWPRSREREAAAFRESLNRHRYLNSLFPSENSTAFYGINQFSYLFPEEFKAIYLRSKPSKFPRYSAEVHMSIPNVSLPLRFDWRDKQVVTQVRNQQMCGGCWAFSVVGAVESAYAIKGKPLEDLSVQQVIDCSYNNYGCNGGSTLNALNWLNKMQVKLVKDSEYPFKAQNGLCHYFSGSHSGFSIKGYSAYDFSDQEDEMAKALLTFGPLVVIVDAVSWQDYLGGIIQHHCSSGEANHAVLITGFDKTGSTPYWIVRNSWGSSWGVDGYAHVKMGSNVCGIADSVSSIFV

SEQ ID NO: 10593 - protein, 650 aa, Homo sapiens
MGPASPAARGLSRRPGQPPLPLLLPLLLLLLRAQPAIGSLAGGSPGAAEAPGSAQVAGLCGRLTLHRDLRTGRWEPDPQRSRRCLRDPQRVLEYCRQMYPELQIARVEQATQAIPMERWCGGSRSGSCAHPHHQVVPFRCLPGEFVSEALLVPEGCRFLHQERMDQCESSTRRHQEAQEACSSQGLILHGSGMLLPCGSDRFRGVEYVCCPPPGTPDPSGTAVGDPSTRSWPPGSRVEGAEDEEEEESFPQPVDDYFVEPPQAEEEEETVPPPSSHTLAVVGKVTPTPRPTDGVDIYFGMPGEISEHEGFLRAKMDLEERRMRQINEVMREWAMADNQSKNLPKADRQALNEHFQSILQTLEEQVSGERQRLVETHATRVIALINDQRRAALEGFLAALQADPPQAERVLLALRRYLRAEQKEQRHTLRHYQHVAAVDPEKAQQMRFQVHTHLQVIEERVNQSLGLLDQNPHLAQELRPQIQELLHSEHLGPSELEAPAPGGSSEDKGGLQPPDSKDDTPMTLPKGSTEQDAASPEKEKMNPLEQYERKVNASVPRGFPFHSSEIQRDELAPAGTGVSREAVSGLLIMGAGGGSLIVLSMLLLRRKKPYGAISHGVVEVDPMLTLEEQQLRELQRHGYENPTYRFLEERP

SEQ ID NO: 10594 - protein, 955 aa, Homo sapiens
MLPGRLCWVPLLLALGVGSGSGGGGDSRQRRLLAAKVNKHKPWIETSYHGVITENNDTVILDPPLVALDKDAPVPFAGEICAFKIHGQELPFEAVVLNKTSGEGRLRAKSPIDCELQKEYTFIIQAYDCGAGPHETAWKKSHKAVVHIQVKDVNEFAPTFKEPAYKAVVTEGKIYDSILQVEAIDEDCSPQYSQICNYEIVTTDVPFAIDRNGNIRNTEKLSYDKQHQYEILVTAYDCGQKPAAQDTLVQVDVKPVCKPGWQDWTKRIEYQPGSGSMPLFPSIHLETCDGAVSSLQIVTELQTNYIGKGCDRETYSEKSLQKLCGASSGIIDLLPSPSAATNWTAGLLVDSSEMIFKFDGRQGAKIPDGIVPKNLTDQFTITMWMKHGPSPGVRAEKETILCNSDKTEMNRHHYALYVHNCRLVFLLRKDFDQADTFRPAEFHWKLDQICDKEWHYYVINVEFPVVTLYMDGATYEPYLVTNDWPIHPSHIAMQLTVGACWQGGEVTKPQFAQFFHGSLASLTIRPGKMESQKVISCLQACKEGLDINSLESLGQGIKYHFNPSQSILVMEGDDIGNINRALQKVSYINSRQFPTAGVRRLKVSSKVQCFGEDVCISIPEVDAYVMVLQAIEPRITLRGTDHFWRPAAQFESARGVTLFPDIKIVSTFAKTEAPGDVKTTDPKSEVLEEMLHNLDFCDILVIGGDLDPRQECLELNHSELHQRHLDATNSTAGYSIYGVGSMSRYEQVLHHIRYRNWRPASLEARRFRIKCSELNGRYTSNEFNLEVSILHEDQVSDKEHVNHLIVQPPFLQSVHHPESRSSIQHSSVVPSIATVVIIISVCMLVFVVAMGVYRVRIAHQHFIQETEAAKESEMDWDDSALTITVNPMEKHEGPGHGEDETEGEEEEEAEEEMSSSSGSDDSEEEEEEEGMGRGRHGQNGARQAQLEWDDSTLPY

SEQ ID NO: 10595 - protein, 666 aa, Homo sapiens
MTPPPPGRAAPSAPRARVPGPPARLGLPLRLRLLLLLWAAAASAQGHLRSGPRIFAVWKGHVGQDRVDFGQTEPHTVLFHEPGSSSVWVGGRGKVYLFDFPEGKNASVRTVNIGSTKGSCLDKRDCENYITLLERRSEGLLACGTNARHPSCWNLVNGTVVPLGEMRGYAPFSPDENSLVLFEGDEVYSTIRKQEYNGKIPRFRRIRGESELYTSDTVMQNPQFIKATIVHQDQAYDDKIYYFFREDNPDKNPEAPLNVSRVAQLCRGDQGGESSLSVSKWNTFLKAMLVCSDAATNKNFNRLQDVFLLPDPSGQWRDTRVYGVFSNPWNYSAVCVYSLGDIDKVFRTSSLKGYHSSLPNPRPGKCLPDQQPIPTETFQVADRHPEVAQRVEPMGPLKTPLFHSKYHYQKVAVHRMQASHGETFHVLYLTTDRGTIHKVVEPGEQEHSFAFNIMEIQPFRRAAAIQTMSLDAERRKLYVSSQWEVSQVPLDLCEVYGGGCHGCLMSRDPYCGWDQGRCISIYSSERSVLQSINPAEPHKECPNPKPDKAPLQKVSLAPNSRYYLSCPMESRHATYSWRHKENVEQSCEPGHQSPNCILFIENLTAQQYGHYFCEAQEGSYFREAQHWQLLPEDGIMAEHLLGHACALAASLWLGVLPTLTLGLLVH

SEQ ID NO: 10596 - protein, 318 aa, Homo sapiens
MWLPLLLGALLWAVLWLLRDRQSLPASNAFVFITGCDSGFGRLLALQLDQRGFRVLASCLTPSGAEDLQRVASSRLHTTLLDITDPQSVQQAAKWVEMHVKEAGLFGLVNNAGVAGIIGPTPWLTRDDFQRVLNVNTMGPIGVTLALLPLLQQARGRVINITSVLGRLAANGGGYCVSKFGLEAFSDSLRRDVAHFGIRVSIVEPGFFRTPVTNLESLEKTLQACWARLPPATQAHYGGAFLTKYLKMQQRIMNLICDPDLTKVSRCLEHALTARHPRTRYSPGWDAKLLWLPASYLPASLVDAVLTWVLPKPAQAVY

SEQ ID NO: 10597 - protein, 212 aa, Homo sapiens
MGPGPRLLLPLVLCVGLGALVFSSGAEGFRKRGPSVTAKVFFDVRIGDKDVGRIVIGLFGKVVPKTVENFVALATGEKGYGYKGSKFHRVIKDFMIQGGDITTGDGTGGVSIYGETFPDENFKLKHYGIGWVSMANAGPDTNGSQFFITLTKPTWLDGKHVVFGKVIDGMTVVHSIELQATDGHDRPLTNCSIINSGKIDVKTPFVVEIADW

SEQ ID NO: 10598 - protein, 751 aa, Homo sapiens
MAFRTICVLVGVFICSICVKGSSQPQARVYLTFDELRETKTSEYFSLSHHPLDYRILLMDEDQDRIYVGSKDHILSLNINNISQEALSVFWPASTIKVEECKMAGKDPTHGCGNFVRVIQTFNRTHLYVCGSGAFSPVCTYLNRGRRSEDQVFMIDSKCESGKGRCSFNPNVNTVSVMINEELFSGMYIDFMGTDAAIFRSLTKRNAVRTDQHNSKWLSEPMFVDAHVIPDGTDPNDAKVYFFFKEKLTDNNRSTKQIHSMIARICPNDTGGLRSLVNKWTTFLKARLVCSVTDEDGPETHFDELEDVFLLETDNPRTTLVYGIFTTSSSVFKGSAVCVYHLSDIQTVFNGPFAHKEGPNHQLISYQGRIPYPRPGTCPGGAFTPNMRTTKEFPDDVVTFIRNHPLMYNSIYPIHKRPLIVRIGTDYKYTKIAVDRVNAADGRYHVLFLGTDRGTVQKVVVLPTNNSVSGELILEELEVFKNHAPITTMKISSKKQQLYVSSNEGVSQVSLHRCHIYGTACADCCLARDPYCAWDGHSCSRFYPTGKRRSRRQDVRHGNPLTQCRGFNLKAYRNAAEIVQYGVKNNTTFLECAPKSPQASIKWLLQKDKDRRKEVKLNERIIATSQGLLIRSVQGSDQGLYHCIATENSFKQTIAKINFKVLDSEMVAVVTDKWSPWTWASSVRALPFHPKDIMGAFSHSEMQMINQYCKDTRQQHQQGDESQKMRGDYGKLKALINSRKSRNRRNQLPES

SEQ ID NO: 10599 - protein, 439 aa, Homo sapiens
MYLSRFLSIHALWVTVSSVMQPYPLVWGHYDLCKTQIYTEEGKVWDYMACQPESTDMTKYLKVKLDPPDITCGDPPETFCAMGNPYMCNNECDASTPELAHPPELMFDFEGRHPSTFWQSATWKEYPKPLQVNITLSWSKTIELTDNIVITFESGRPDQMILEKSLDYGRTWQPYQYYATDCLDAFHMDPKSVKDLSQHTVLEIICTEEYSTGYTTNSKIIHFEIKDRFAFFAGPRLRNMASLYGQLDTTKKLRDFFTVTDLRIRLLRPAVGEIFVDELHLARYFYAISDIKVRGRCKCNLHATVCVYDNSKLTCECEHNTTGPDCGKCKKNYQGRPWSPGSYLPIPKGTANTCCLCCPGDRNANVCDNELLHCQNGGTCHNNVRCLCPAAYTGILCEKLRCEEAGSCGSDSGQGAPPHGSPALLLLTTLLGTASPLVF

SEQ ID NO: 10600 - protein, 364 aa, Homo sapiens
MYLSRFLSIHALWVTVSSVMQPYPLVWGHYDLCKTQIYTEEGKVWDYMACQPESTDMTKYLKVKLDPPDITCGDPPETFCAMGNPYMCNNECDASTPELAHPPELMFDFEGRHPSTFWQSATWKEYPKPLQVNITLSWSKTIELTDNIVITFESGRPDQMILEKSLDYGRTWQPYQYYATDCLDAFHMDPKSVKDLSQHTVLEIICTEEYSTGYTTNSKIIHFEIKDRFAFFAGPRLRNMASLYGQLDTTKKLRDFFTVTDLRIRLLRPAVGEIFVDELHLARYFYAISDIKVRGRCKCNLHATVCVYDNSKLTCECEHNTTGPDCGKCKKNYQGRPWSPGSYLPIPKGTANTCIPSISSIGSK

SEQ ID NO: 10601 - protein, 232 aa, Homo sapiens
CKCNLHATVCVYDNSKLTCECEHNTTGPDCGKCKKNYQGRPWSPGSYLPIPKGTANTYCECFGHSNRCSYIDLLNTVICVSCKHNTRGQHCELCRLGYFRNASAQLDDENVCIECYCNPLGSIHDRCNGSGFCECKTGTTGPKCDECLPGNSWHYGCQPNVCDNELLHCQNGGTCHNNVRCLCPAAYTGILCEKLRCEEAGSCGSDSGQGAPPHGSPALLLLTTLLGTASPL

SEQ ID NO: 10602 - protein, 1024 aa, Homo sapiens
MERRSRRKSRRNGRSTAGKAAATQPAKSPGAQLWLFPSAAGLHRALLRRVEVTRQLCCSPGRLAVLERGGAGVQVHQLLAGSGGARTPKCIKLGKNMKIHSVDQGAEHMLILSSDGKPFEYDNYSMKHLRFESILQEKKIIQITCGDYHSLALSKGGELFAWGQNLHGQLGVGRKFPSTTTPQIVEHLAGVPLAQISAGEAHSMALSMSGNIYSWGKNECGQLGLGHTESKDDPSLIEGLDNQKVEFVACGGSHSALLTQDGLLFTFGAGKHGQLGHNSTQNELRPCLVAELVGYRVTQIACGRWHTLAYVSDLGKVFSFGSGKDGQLGNGGTRDQLMPLPVKVSSSEELKLESHTSEKELIMIAGGNQSILLWIKKENSYVNLKRTIPTLNEGTVKRWIADVETKRWQSTKREIQEIFSSPACLTGSFLRKRRTTEMMPVYLDLNKARNIFRELTQKDWITNMITTCLKDNLLKRLPFHSPPQEALEIFFLLPECPVMHISNNWESLVVPFAKVVCKMSDQSSLVLEEYWATLQESTFSKLVQMFKTAVICQLDYWDESAEENGNVQALLEMLKKLHRVNQVKCQLPESIFQVDELLHRLNFFVEVCRRYLWKMTVDASENVQCCVIFSHFPFIFNNLSKIKLLHTDTLLKIESKKHKAYLRSAAIEEERESEFALRPTFDLTVRRNHLIEDVLNQLSQFENEDLRKELWVSFSGEIGYDLGGVKKEFFYCLFAEMIQPEYGMFMYPEGASCMWFPVKPKFEKKRYFFFGVLCGLSLFNCNVANLPFPLALFKKLLDQMPSLEDLKELSPDLGKNLQTLLDDEGDNFEEVFYIHFNVHWDRNDTNLIPNGSSITVNQTNKRDYVSKYINYIFNDSVKAVYEEFRRGFYKMCDEDIIKLFHPEELKDVIVGNTDYDWKTFEKNARYEPGYNSSHPTIVMFWKAFHKLTLEEKKKFLVFLTGTDRLQMKDLNNMKITFCCPESWNERDPIRALTCFSVLFLPKYSTMETVEEALQEAINNNRGFG

SEQ ID NO: 10603 - protein, 500 aa, Homo sapiens
MKCTAREWLRVTTVLFMARAIPAMVVPNATLLEKLLEKYMDEDGEWWIAKQRGKRAITDNDMQSILDLHNKLRSQVYPTASNMEYMTWDVELERSAESWAESCLWEHGPASLLPSIGQNLGAHWGRYRPPTFHVQSWYDEVKDFSYPYEHECNPYCPFRCSGPVCTHYTQVVWATSNRIGCAINLCHNMNIWGQIWPKAVYLVCNYSPKGNWWGHAPYKHGRPCSACPPSFGGGCRENLCYKEGSDRYYPPREEETNEIERQQSQVHDTHVRTRSDDSSRNEVISAQQMSQIVSCEVRLRDQCKGTTCNRYECPAGCLDSKAKVIGSVHYEMQSSICRAAIHYGIIDNDGGWVDITRQGRKHYFIKSNRNGIQTIGKYQSANSFTVSKVTVQAVTCETTVEQLCPFHKPASHCPRVYCPRNCMQANPHYARVIGTRVYSDLSSICRAAVHAGVVRNHGGYVDVMPVDKRKTYIASFQNGIFSESLQNPPGGKAFRVFAVV

SEQ ID NO: 10604 - protein, 629 aa, Homo sapiens [sequence omitted]

SEQ ID NO: 10605 - protein, 573 aa, Homo sapiens
MPRYGASLRQSCPRSGREQGQDGTAGAPGLLWMGLVLALALALALALSDSRVLWAPAEAHPLSPQGHPARLHRIVPRLRDVFGWGNLTCPICKGLFTAINLGLKKEPNVARVGSVAIKLCNLLKIAPPAVCQSIVHLFEDDMVEVWRRSVLSPSEACGLLLGSTCGHWDIFSSWNISLPTVPKPPPKPPSPPAPGAPVSRILFLTDLHWDHDYLEGTDPDCADPLCCRRGSGLPPASRPGAGYWGEYSKCDLPLRTLESLLSGLGPAGPFDMVYWTGDIPAHDVWHQTRQDQLRALTTVTALVRKFLGPVPVYPAVGNHESTPVNSFPPPFIEGNHSSRWLYEAMAKAWEPWLPAEALRTLRKVHIIGHIPPGHCLKSWSWNYYRIVARYENTLAAQFFGHTHVDEFEVFYDEETLSRPLAVAFLAPSATTYIGLNPGYRVYQIDGNYSRSSHVVLDHETYILNLTQANIPGAIPHWQLLYRARETYGLPNTLPTAWHNLVYRMRGDMQLFQTFWFLYHKGHPPSEPCGTPCRLATLCAQLSARADSPALCRHLMPDGSLPEAQSLWPRPLFC

SEQ ID NO: 10606 - protein, 585 aa, Homo sapiens
MPRYGASLRQSCPRSGREQGQDGTAGAPGLLWMGLVLALALALALALSDSRVLWAPAEAHPLSPQGHPARLHRIVPRLRDVFGWGNLTCPICKGLFTAINLGLKKEPNVARVGSVAIKLCNLLKIAPPAVCQSIVHLFEDDMVEVWRRSVLSPSEACGLLLGSTCGHWDIFSSWNISLPTVPKPPPKPPSPPAPGAPVSRILFLTDLHWDHDYLEGTDPDCADPLCCRRGSGLPPASRPGAGYWGEYSKCDLPLRTLESLLSGLGPAGPFDMVYWTGDIPAHDVWHQTRQDQLRALTTVTALVRKFLGPVPVYPAVGNHESTPVNSFPPPFIEGNHSSRWLYEAMAKAWEPWLPAEALRTLRYLSSVETQEGKRKVHIIGHIPPGHCLKSWSWNYYRIVARYENTLAAQFFGHTHVDEFEVFYDEETLSRPLAVAFLAPSATTYIGLNPGYRVYQIDGNYSRSSHVVLDHETYILNLTQANIPGAIPHWQLLYRARETYGLPNTLPTAWHNLVYRMRGDMQLFQTFWFLYHKGHPPSEPCGTPCRLATLCAQLSARADSPALCRHLMPDGSLPEAQSLWPRPLFC

SEQ ID NO: 10607 - protein, 1052 aa, Homo sapiens
MKLVNIWLLLLVVLLCGKKHLGDRLEKKSFEKAPCPGCSHLTLKVEFSSTVVEYEYIVAFNGYFTAKARNSFISSALKSSEVDNWRIIPRNNPSSDYPSDFEVIQIKEKQKAGLLTLEDHPNIKRVTPQRKVFRSLKYAESDPTVPCNETRWSQKWQSSRPLRRASLSLGSGFWHATGRHSSRRLLRAIPRQVAQTLQADVLWQMGYTGANVRVAVFDTGLSEKHPHFKNVKERTNWTNERTLDDGLGHGTFVAGVIASMRECQGFAPDAELHIFRVFTNNQVSYTSWFLDAFNYAILKKIDVLNLSIGGPDFMDHPFVDKVWELTANNVIMVSAIGNDGPLYGTLNNPADQMDVIGVGGIDFEDNIARFSSRGMTTWELPGGYGRMKPDIVTYGAGVRGSGVKGGCRALSGTSVASPVVAGAVTLLVSTVQKRELVNPASMKQALIASARRLPGVNMFEQGHGKLDLLRAYQILNSYKPQASLSPSYIDLTECPYMWPYCSQPIYYGGMPTVVNVTILNGMGVTGRIVDKPDWQPYLPQNGDNIEVAFSYSSVLWPWSGYLAISISVTKKAASWEGIAQGHVMITVASPAETESKNGAEQTSTVKLPIKVKIIPTPPRSKRVLWDQYHNLRYPPGYFPRDNLRMKNDPLDWNGDHIHTNFRDMYQHLRSMGYFVEVLGAPFTCFDASQYGTLLMVDSEEEYFPEEIAKLRRDVDNGLSLVIFSDWYNTSVMRKVKFYDENTRQWWMPDTGGANIPALNELLSVWNMGFSDGLYEGEFTLANHDMYYASGCSIAKFPEDGVVITQTFKDQGLEVLKQETAVVENVPILGLYQIPAEGGGRIVLYGDSNCLDDSHRQKDCFWLLDALLQYTSYGVTPPSLSHSGNRQRPPSGAGSVTPERMEGNHLHRYSKVLEAHLGDPKPRPLPACPRLSWAKPQPLNETAPSNLWKHQKLLSIDLDKVVLPNFRSNRPQVRPLSPGESGAWDIPGGIMPGRYNQEVGQTIPVFAFLGAMVVLAFFVVQINKAKSRPKRRKPRVKRPQLMQQVHPPKTPSV

SEQ ID NO: 10608 - protein, 364 aa, Homo sapiens
MPPPPPLLLLTVLVVAAARPGCEFERNPAGECHRPPAADSATCVDLQLRTCSDAAYNHTTFPNLLQHRSWEVVEASSEYILLSVLHQLLEGQCNPDLRLLGCAVLAPRCEGGWVRRPCRHICEGLREVCQPAFDAIDMAWPYFLDCHRYFTREDEGCYDPLEKLRGGLEADEALPSGLPPTFIRFSHHSYAQMVRVLRRTASRCAHVARTYSIGRSFDGRELLVIEFSSRPGQHELMEPEVKLIGNIHGNEVAGREMLIYLAQYLCSEYLLGNPRIQRLLNTTRIHLLPSMNPDGYEVAAAEGAGYNGWTSGRQNAQNLDLNRNFPDLTSEYYRLAETRGARSDHIPIPQHYWWGKVPRRQRQS

SEQ ID NO: 10609 - protein, 679 aa, Homo sapiens
PSERRAPAPRGPSATSLRWPSKVRRPTMPPPLPLLLLTVLVVAAARPGCEFERNPAGECHRPPAADSATCVDLQLRTCSDAAYNHTTFPNLLQHRSWEVVEASSEYILLSVLHQLLEGQCNPDLRLLGCAVLAPRCEGGWVRRPCRHICEGLREVCQPAFDAIDMAWPYFLDCHRYFTREDEGCYDPLEKLRGGLEADEALPSGLPPTFIRFSHHSYAQMVRVLRRTASRCAHVARTYSIGRSFDGRELLVIEFSSRPGQHELMEPEVKLIGNIHGNEVAGREMLIYLAQYLCSEYLLGNPRIQRLLNTTRIHLLPSMNPDGYEVAAAEGAGYNGWTSGRQNAQNLDLNRNFPDLTSEYYRLAETRGARSDHIPIPQHYWWGKVAPETKAIMKWMQTIPFVLSASLHGGDLVVSYPFDFSKHPQEEKMFSPTPDEKMFKLLSRAYADVHPMMMDRSENRCGGNFLKRGSIINGADWYSFTGGMSDFNYLHTNCFEITVELGCVKFPPEEALYTLWQHNKESLLNFVETVHRGIKGVVTDKFGKPVKNARISVKGIRHDITTAPDGDYWRLLPPGIHIVIAQAPGYAKVIKKVIIPARMKRAGRVDFILQPLGMGPKNFIHGLRRTGPHDPLGGASSLGEATEPDPLRARRQPSADGSKPWWWSYFTSLSTHRPRWLLKY

SEQ ID NO: 10610 - protein, 641 aa, Homo sapiens
MPPPPLLLLLTVLVVAAARPGCEFERNPAATCVDLQLRTCSDAAYNHTTFPNLLQHRSWEVVEASSEYILLSVLHQLLEGQCNPDLRLLGCAVLAPRCEGGWVRRPCRHICEGLREVCQPAFDAIDMAWPYFLDCHRYFTREDEGCYDPLEKLRGGLEADEALPSGLPPTFIRFSHHSYAQMVRVLRRTASRCAHVARTYSIGRSFDGRELLVIEFSSRPGQHELMEPEVKLIGNIHGNEVAGREMLIYLAQYLCSEYLLGNPRIQRLLNTTRIHLLPSINPDGYEVAAAEGAGYNGWTSGRQNAQNLDLNRNFPDLTSEYYRLAETRGARSDHIPIPQHYWWGKVAPETKAIMKWMQTIPFVLSASLHGGDLVVSYPFDFSKHPQEEKMFSPTPDEKMFKLLSRAYADVHPMMMDRSENRCGGNFLKRGSIINGADWYSFTGGMSDFNYLHTNCFEITVELGCVKFPPEEALYTLWQHNKESLLNFVETVHRGIKGVVTDKFGKPVKNARISVKGIRHDITTAPDGDYWRLLPPGIHIVIAQAPGYAKVIKKVIIPARMKRAGRVDFILQPLGMGPKNFIHGLRRTGPHDPLGGASSLGEATEPDPLRARRQPSADGSKPWWWSYFTSLSTHRPRWLLKY

SEQ ID NO: 10611 - protein, 207 aa, Homo sapiens
MYSAPSACTCLCLHFLLLCFQVQVLVAEENVDFRIHVENQTRARDDVSRKQLRLYQLYSRTSGKHIQVLGRRISARGEDGDKYAQLLVETDTFGSQVRIKGKETEFYLCMNRKGKLVGKPDGTSKECVFIEKVLENNYTALMSAKYSGWYVGFTKKGRPRKGPKTRENQQDVHFMKRYPKGQPELQKPFKYTTVTKRSRRIRPTHPA

SEQ ID NO: 10612 - protein, 218 aa, Homo sapiens
MKVGVLWLISFFTFTDGHGGFLGKNDDIKTKKELIVNKKKHLGPVEEYQLLLQVTYRDSKEKRDLRNFLKLLKPPLLWSHGLIRIIRAKATTDCNSLNGVLQCTCEDSYTWFPPSCLDPQNCYLHTAGALPSCECHLNNLSQSVNFCERTKIWGTFKINERFTNDLLNSSSAIYSKYANGIEIQLKKAYERIQGFESVQVTQFRMSLLSPKLECNGTI

SEQ ID NO: 10613 - protein, 141 aa, Homo sapiens
MGFQKFSPFLALSILVLLQAGSLHAAPFRSALESSPADPATLSEDEARLLLAALVQDYVQMKASELEQEQEREGSSLDSPRSKRCGNLSTCMLGTYTQDFNKFHTFPQTAIGVGAPGKKRDMSSDLERDHRPHVSMPQNAN

SEQ ID NO: 10614 - protein, 141 aa, Homo sapiens
MGFQKFSPFLALSILVLLQAGSLHAAPFRSALESSPADPATLSEDEARLLLAALVQDYVQMKASELEQEQEREGSSLDSPRSKRCGNLSTCMLGTYTQDFNKFHTFPQTAIGVGAPGKKRDMSSDLERDHRPHNHCPEESL

SEQ ID NO: 10615 - protein, 468 aa, Homo sapiens
MGRGWGFLFGLLGAVWLLSSGHGEEQPPETAAQRCFCQVSGYLDDCTCDVETIDRFNNYRLFPRLQKLLESDYFRYYKVNLKRPCPFWNDISQCGRRDCAVKPCQSDEVPDGIKSASYKYSEEANNLIEECEQAERLGAVDESLSEETQKAVLQWTKHDDSSDNFCEADDIQSPEAEYVDLLLNPERYTGYKGPDAWKIWNVIYEENCFKPQTIKRPLNPLASGQGTSEENTFYSWLEGLCVEKRAFYRLISGLHASINVHLSARYLLQETWLEKKWGHNITEFQQRFDGILTEGEGPRRLKNLYFLYLIELRALSKVLPFFERPDFQLFTGNKIQDEENKMLLLEILHEIKSFPLHFDENSFFAGDKKEAHKLKEDFRLHFRNISRIMDCVGCFKCRLWGKLQTQGLGTALKILFSEKLIANMPESGPSYEFHLTRQEIVSLFNAFGRISTSVKKLENFRNLLQNIH

SEQ ID NO: 10616 - protein, 468 aa, Homo sapiens
MGRGWGFLFGLLGAVWLLSSGHGEEQPPETAAQRCFCQVSGYLDDCTCDVETIDRFNNYRLFPRLQKLLESDYFRYYKVNLKRPCPFWNDISQCGRRDCAVKPCQSDEVPDGIKSASYKYSEEANNLIEECEQAERLGAVDESLSEETQKAVLQWTKHDDSSDNFCEADDIQSPEAEYVDLLLNPERYTGYKGPDAWKIWNVIYEENCFKPQTIKRPLNPLASGQGTSEENTFYSWLEGLCVEKRAFYRLISGLHASINVHLSARYLLQETWLEKKWGHNITEFQQRFDGILTEGEGPRRLKNLYFLYLIELRALSKVLPFFERPDFQLFTGNKIQDEENKMLLLEILHEIKSFPLHFDENSFFAGDKKEAHKLKEDFRLHFRNISRIMDCVGCFKCRLWGKLQTQGLGTALKILFSEKLIANMPESGPSYEFHLTRQEIVSLFNAFGRISTSVKELENFRNLLQNIH

SEQ ID NO: 10617 - protein, 963 aa, Homo sapiens
LCSHLWQPGLGSCWSEGFPEAGSTHSRLCLLLCWTLIEAVGSRAKKEAAAEEAKVGWGCPALRPEVPLTLRARAISLMASSGRKLWLRYPSFLPAAWICLLPGWERLGRPRWGCQGQRLFQKCPLLPIRGFGWHLLVAWGAGSRGARLRAVEPQGSCPSAAMLTPAELATVVRRFSQTGIQDFLTLTLTEPTGLLYVGAREALFAFSMEALELQGAISWEAPVEKKTECIQKGKNNQTECFNFIRFLQPYNASHLYVCGTYAFQPKCTYVNMLTFTLEHGEFEDGKGKCPYDPAKGHAGLLVDGELYSATLNNFLGTEPIILRNMGPHHSMKTEYLAFWLNEPHFVGSAYVPESVGSFTGDDDKVYFFFRERAVESDCYAEQVVARVARVCKGDMGGARTLQRKWTTFLKARLACSAPNWQLYFNQLQAMHTLQDTSWHNTTFFGVFQAQWGDMYLSAICEYQLEEIQRVFEGPYKEYHEEAQKWDRYTDPVPSPRPGSCINNWHRRHGYTSSLELPDNILNFVKKHPLMEEQVGPRWSRPLLVKKGTNFTHLVADRVTGLDGATYTVLFIGTGDGWLLKAVSLGPWVHLIEELQLFDQEPMRSLVLSQSKKLLFAGSRSQLVQLPVADCMKYRSCADCVLARDPYCAWSVNTSRCVAVGGHSGSLLIQHVMTSDTSGICNLRGSKKVRPTPKNITVVAGTDLVLPCHLSSNLAHARWTFGGRDLPAEQPGSFLYDARLQALVVMAAQPRHAGAYHCFSEEQGARLAAEGYLVAVVAGPSVTLEARAPLENLGLVWLAVVALGAVCLVLLLLVLSLRRRLREELEKGAKATERTLVYPLELPKEPTSPPFRPCPEPDEKLWDPVGYYYSDGSLKIVPGHARCQPGGGPPSPPPGIPGQPLPSPTRLHLGGGRNSNANGYVRLQLGGEDRGGLGHPLPELADELRRKLQQRQPLPDSNPEESSV

SEQ ID NO: 10618 - protein, 1745 aa, Homo sapiens
MGNRRDLGQPRAGLCLLLAALQLLPGTQADPVDVLKALGVQGGQAGVPEGPGFCPQRTPEGDRAFRIGQASTLGIPTWELFPEGHFPENFSLLITLRGQPANQSVLLSIYDERGARQLGLALGPALGLLGDPFRPLPQQVNLTDGRWHRVAVSIDGEMVTLVADCEAQPPVLGHGPRFISIAGLTVLGTQDLGEKTFEGDIQELLISPDPQAAFQACERYLPDCDNLAPAATVAPQGEPETPRPRRKGKGKGRKKGRGRKGKGRKKNKEIWTSSPPPDSAENQTSTDIPKTETPAPNLPPTPTPLVVTSTVTTGLNATILEGSLDPDSGTELGTLETKAAREDEEGDDSTMGPDFRAAEYPSRTQFQIFPGAGEKGAKGEPAVIEKGQQFEGPPGAPGPQGVVGPSGPPGPPGFPGDPGPPGPAGLPGIPGIDGIRGPPGTVIMMPFQFAGGSFKGPPVSFQQAQAQAVLQQTQLSMKGPPGPVGLTGRPGPVGLPGHPGLKGEEGAEGPQGPRGLQGPHGPPGRVGKMGRPGADGARGLPGDTGPKGDRGFDGLPGLPGEKGQRGDFGHVGQPGPPGEDGERGAEGPPGPTGQAGEPGPRGLLGPRGSPGPTGRPGVTGIDGAPGAKGNVGPPGEPGPPGQQGNHGSQGLPGPQGLIGTPGEKGPPGNPGIPGLPGSDGPLGHPGHEGPTGEKGAQGPPGSAGPPGYPGPRGVKGTSGNRGLQGEKGEKGEDGFPGFKGDVGLKGDQGKPGAPGPRGEDGPEGPKGQAGQAGEEGPPGSAGEKGKLGVPGLPGYPGRPGPKGSIGFPGPLGPIGEKGKSGKTGQPGLEGERGPPGSRGERGQPGATGQPGPKGDVGQDGAPGIPGEKGLPGLQGPPGFPGPKGPPGHQGKDGRPGHPGQRGELGFQGQTGPPGPAGVLGPQGKTGEVGPLGERGPPGPPGPPGEQGLPGLEGREGAKGELGPPGPLGKEGPAGLRGFPGPKGGPGDPGPTGLKGDKGPPGPVGANGSPGERGPLGPAGGIGLPGQSGSEGPVGPAGKKGSRGERGPPGPTGKDGIPGPLGPLGPPGAAGPSGEEGDKGDVGAPGHKGSKGDKGDAGPPGQPGIRGPAGHPGPPGADGAQGRRGPPGLFGQKGDDGVRGFVGVIGPPGLQGLPGPPGEKGEVGDVGSMGPHGAPGPRGPQGPTGSEGTPGLPGGVGQPGAVGEKGERGDAGDPGPPGAPGIPGPKGDIGEKGDSGPSGAAGPPGKKGPPGEDGAKGSVGPTGLPGDLGPPGDPGVSGIDGSPGEKGDPGDVGGPGPPGASGEPGAPGPPGKRGPSGHMGREGREGEKGAKGEPGPDGPPGRTGPMGARGPPGRVGPEGLRGIPGPVGEPGLLGAPGQMGPPGPLGPSGLPGLKGDTGPKGEKGHIGLIGLIGPPGEAGEKGDQGLPGVQGPPGPKGDPGPPGPIGSLGHPGPPGVAGPLGQKGSKGSPGSMGPRGDTGPAGPPGPPGAPAELHGLRRRRRFVPVPLPVVEGGLEEVLASLTSLSLELEQLRRPPGTAERPGLVCHELHRNHPHLPDGEYWIDPNQGCARDSFRVFCNFTAGGETCLYPDKKFEIVKLASWSKEKPGGWYSTFRRGKKFSYVDADGSPVNVVQLNFLKLLSATARQNFTYSCQNAAAWLDEATGDYSHSARFLGTNGEELSFNQTTATTVSVPQDGCRLRKGQTKTLFEFSSSRAGFLPLWDVAATDFGQTNQKFGFELGPVCFSS

SEQ ID NO: 10619 - protein, 392 aa, Homo sapiens
MEWWASSPLRLWLLLFLLPSAQGRQKESGSKWKVFIDQINRSLENYEPCSSQNCSCYHGVIEEDLTPFRGGISRKMMAEVVRRKLGTHYQITKNRLYRENDCMFPSRCSGVEHFILEVIGRLPDMEMVINVRDYPQVPKWMEPAIPVFSFSKTSEYHDIMYPAWTFWEGGPAVWPIYPTGLGRWDLFREDLVRSAAQWPWKKKNSTAYFRGSRTSPERDPLILLSRKNPKLVDAEYTKNQAWKSMKDTLGKPAAKDVHLVDHCKYKYLFNFRGVAASFRFKHLFLCGSLVFHVGDEWLEFFYPQLKPWVHYIPVKTDLSNVQELLQFVKANDDVAQEIAERGSQFIRNHLQMDDITCYWENLLSEYSKFLSYNVTRRKGYDQIIPKMLKTEL

SEQ ID NO: 10620 - protein, 392 aa, Homo sapiens
MEWWASSPLRLWLLLFLLPSAQGRQKESGSKWKVFIDQINRSLENYEPCSSQNCSCYHGVIEEDLTPFRGGISRRMMAEVVRRKLGTHYQITKNRLYRENDCMFPSRCSGVEHFILEVIGRLPDMEMVINVRDYPQVPKWMEPAIPVFSFSKTSEYHDIMYPAWTFWEGGPAVWPIYPTGLGRWDLFREDLVRSAAQWPWKKKNSTAYFRGSRTSPERDPLILLSRKNTKLVDAEYTKNQAWKSMKDTLGKPAAKDVHLVDHCKYKYLFNFRGVAASFRFKHLFLCGSLVFHVGDEWLEFFYPQLKPWVHYIPVKTDLSNVQELLQFVKANDDVAQEIAERGSQFIRNHLQMDDITCYWENLLSEYSKFLSYNVTRRKGYDQIIPKMLKTEL

SEQ ID NO: 10621 - protein, 272 aa, Homo sapiens
MAAKMFEFIGKFGLALVVAGGVVNSALYSVDAGHRAVVFDRFRGVQDIVVGKGTHCLIPWLTEINIFDCRSQPRNVPVITGSKDLQNVNLTLRIIFRPVASQLPHIFTSSGEDHDERVPPSITNKILKSVVARFEAGELITQREQISRQVSDDLTEPAATFGLILDDVSLTYLTFGKEFIEAVEAKQIAQQEAERARFVVEKAEQQKKAAIISAEGDSKVAELITNSLATAGDALIELRKLEAVEDITYQLLRSRNITYLRAGQSMPLQLRW

SEQ ID NO: 10622 - protein, 1464 aa, Homo sapiens
LQRWSQPSAAPGGSGSSLSLCLSATMVLESVVADLLNRFLGDYVENLNKSQLKLGIWGGNVALDNLQIKENALSELDVPFKVKAGQIDKLTLKIPWKNLYGEAVVATLEGLYLLVVPGASIKYDAVKEEKSLQDVKQKELSRIEEALQKAAEKGTHSGEFIYGLENFVYKDIKPGRKRKKHKKHFKKPFKGLDRSKDKPKEAKKDTFVEKLATQVIKNVQVKITDIHIKYEDDVTDPKRPLSFGVTLGELSLLTANEHWTPCILNEADKIIYKLIRLDSLSAYWNVNCSMSYQRSREQILDQLKNEILTSGNIPPNYQYIFQPISASAKLYMNPYAESELKTPKLDCNIEIQNIAIELTKPQYLSMIDLLESVDYMVRNAPYRKYKPYLPLHTNGRRWWKYAIDSVLEVHIRRYTQMWSWSNIKKHRQLLKSYKIAYKNKLTQSKVSEEIQKEIQDLEKTLDVFNIILARQQAQVEVIRSGQKLRKKSADTGEKRGGWFSGLWGKKESKKKDEESLIPETIDDLMTPEEKDKLFTAIGYSESTHNLTLPKQYVAHIMTLKLVSTSVTIRENKNIPEILKIQIIGLGTQVSQRPGAQALKVEAKLEHWYITGLRQQDIVPSLVASIGDTTSSLLKIKFETNPEDSPADQTLIVQSQPVEVIYDAKTVNAVVEFFQSNKGLDLEQITSATLMKLEEIKERTATGLTHIIETRKVLDLRINLKPSYLVVPQTGFHHEKSDLLILDFGTFQLNSKDQGLQKTTNSSLEEIMDKAYDKFDVEIKNVQLLFARAEETWKKCRFQHPSTMHILQPMDIHVELAKAMVEKDIRMARFKVSGGLPLMHVRISDQKMKDVLYLMNSIPLPQKSSAQSPERQVSSIPIISGGTKGLLGTSLLLDTVESESDDEYFDAEDGEPQTCKSMKGSELKKAAEVPNEELINLLLKFEIKEVILEFTKQQKEEDTILVFNVTQLGTEATMRTFDLTVVSYLKKISLDYHEIEGSKRKPLHLISSSDKPGLDLLKVEYIKADKNGPSFQTAFGKTEQTVKVAFSSLNLLLQTQALVASINYLTTIIPSDDQSISVAKEVQISTEKQQKNSTLPKAIVSSRDSDIIDFRLFAKLNAFCVIVCNEKNNIAEIKIQGLDSSLSLQSRKQSLFARLENIIVTDVDPKTVHKKAVSIMGNEVFRFNLDLYPDATEGDLYTDMSKVDGVLSLNVGCIQIVYLHKFLMSLLNFLNNFQTAKESLSAATAQAAERAATSVKDLAQRSFRVSINIDLKAPVIVIPQSSISTNAVVVDLGLIRVHNQFSLVSDEDYLNPPVIDRMDVQLTKLTLYRTVIQPGIYHPDIQLLHPINLEFLVNRNLAASWYHKVPVVEIKGHLDSMNVSLNQEDLNLLFRILTENLCEGTEDLDKVKPRVQETGEIKEPLEISISQDVHDSKNTLTTGVEEIRSVDIINMLLNFEIKEVVVTLM

SEQ ID NO: 10623 - protein, 302 aa, Homo sapiens
MPGVARLPLLLGLLLLPRPGRPLDLADYTYDLAEEDDSEPLNYKDPCKAAAFLGDIALDEEDLRAFQVQQAVDLRRHTARKSSIKAAVPGNTSTPSCQSTNGQPQRGACGRWRGRSRSRRAATSRPERVWPDGVIPFVIGGNFTGSQRAVFRQAMRHWEKHTCVTFLERTDEDSYIVFTYRPCGCCSYVGRRGGGPQAISIGKNCDKFGIVVHELGHVVGFWHEHTRPDRDRHVSIVRENIQPGVLHSSLLLLSCGSRNGASFPCSLESSTHQALCWTGLFLRPSPFPRLPLAAPRTLRAGV

SEQ ID NO: 10624 - protein, 183 aa, Homo sapiens
MKLLSLVAVVGCLLVPPAEANKSSEDIRCKCICPPYRNISGHIYNQNVSQKDCNCLHVVEPMPVPGHDVEAYCLLCECRYEERSTTTIKVIIVIYLSVVGALLLYMAFLMLVDPLIRKPDAYTEQLHNEEENEDARSMAAAAASLGGPRANTVLERVEGAQQRWKLQVQEQRKTVFDRHKMLS

SEQ ID NO: 10625 - protein, 620 aa, Homo sapiens
ECEVSGLCRHGGRCVNTHGSFECYCMDGYLPRNGPEPFHPTTDATSCTEIDCGTPPEVPDGYIIGNYTSSLGSQVRYACREGFFSVPEDTVSSCTGLGTWESPKLHCQEINCGNPPEMRHAILVGNHSSRLGGVARYVCQEGFESPGGKITSVCTEKGTWRESTLTCTEILTKINDVSLFNDTCVRWQINSRRINPKISYVISIKGQRLDPMESVREETVNLTTDSRTPEVCLALYPGTNYTVNISTAPPRRSMPAVIGFQTAEVDLLEDDGSFNISIFNETCLKLNRRSRKVGSEHMYQFTVLGQRWYLANFSHATSFNFTTREQVPVVCLDLYPTTDYTVNVTLLRSPKRHSVQITIATPPAVKQTISNISGFNETCLRWRSIKTADMEEMYLFHIWGQRWYQKEFAQEMTFNISSSSRDPEVCLDLRPGTNYNVSLRALSSELPVVISLTTQITEPPLPEVEFFTVHRGPLPRLRLRKAKEKNGPISSYQVLVLPLALQSTFSCDSEGASSFFSNASDADGYVAAELLAKDVPDDAMEIPIGDRLYYGEYYNAPLKRGSDYCIILRITSEWNKVRRHSCAVWAQVKDSSLMLLQMAGVGLGSLAVVIILTFLSFSAV

SEQ ID NO: 10626 - protein, 592 aa, Homo sapiens
MAVAGPAPGAGARPRLDLQFLQRFLQILKVLFPSWSSQNALMFLTLLCLTLLEQFVIYQVGLIPSQYYGVLGNKDLEGFKTLTFLAVMLIVLNSTLKSFDQFTCNLLYVSWRKDLTEHLHRLYFRGRAYYTLNVLRDDIDNPDQRISQDVERFCRQLSSMASKLIISPFTLVYYTYQCFQSTGWLGPVSIFGYFILGTVVNKTLMGPIVMKLVHQEKLEGDFRFKHMQIRVNAEPAAFYRAGHVEHMRTDRRLQRLLQTQRELMSKELWLYIGINTFDYLGSILSYVVIAIPIFSGVYGDLSPAELSTLVSKNAFVCIYLISCFTQLIDLSTTLSDVAGYTHRIGQLRETLLDMSLKSQDCEILGESEWGLDTPPGWPAAEPADTAFLLERVSISAPSSDKPLIKDLSLKISEGQSLLITGNTGTGKTSLLRVLGGLWTSTRGSVQMLTDFGPHGVLFLPQKPFFTDGTLREQVIYPLKEVYPDSGSADDERILRFLELAGLSNLVARTEGLDQQVDWNWYDVLSPGEMQRLSFARLFYLQPKYAVLDEATSALTEEVESELYRIGQQLGMTFISVGHRQSLEKVPVLTRMA

SEQ ID NO: 10627 - protein, 497 aa, Homo sapiens
MAVAGPAPGAGARPRLDLQFLQRFLQILKVLFPSWSSQNALMFLTLLCLTLLEQFVIYQVGLIPSQYYGVLGNKDLEGFKTLTFLAVMLIVLNSTLKSFDQFTCNLLYVSWRKDLTEHLHRLYFRGRAYYTLNVLRDDIDNPDQRISQDVERFCRQLSSMASKLIISPFTLVYYTYQCFQSTGWLGPVSIFGYFILGTVVNKTLMGPIVMKLVHQEKLEGDFRFKHMQIRVNAEPAAFYRAGHVEHMRTDRRLQRLLQTQRELMSKELWLYIGINTFDYLGSILSYVVIAIPIFSGVYGDLSPAELSTLVSKNAFVCIYLISCFTQLIDLSTTLSDVAGYTHRIGQLRETLLDMSLKSQDCEILGESEWGLDTPPGWPAAEPADTAFLLERVSISAPSSDKPLIKDLSLKISEGQSLLITGNTGTGKTSLLRVLGGLWTSTRGSVQMLTDFGPHGVLFLPQKPFFTDGTLREQVSLVQGAHSSLLNPAHPQLGPLAL

SEQ ID NO: 10628 - protein, 606 aa, Homo sapiens
MAVAGPAPGAGARPRLDLQFLQRFLQILKVLFPSWSSQNALMFLTLLCLTLLEQFVIYQVGLIPSQYYGVLGNKDLEGFKTLTFLAVMLIVLNSTLKSFDQFTCNLLYVSWRKDLTEHLHRLYFRGRAYYTLNVLRDDIDNPDQRISQDVERFCRQLSSMASKLIISPFTLVYYTYQCFQSTGWLGPVSIFGYFILGTVVNKTLMGPIVMKLVHQEKLEGDFRFKHMQIRVNAEPAAFYRAGHVEHMRTDRRLQRLLQTQRELMSKELWLYIGINTFDYLGSILSYVVIAIPIFSGVYGDLSPAELSTLVSKNAFVCIYLISCFTQLIDLSTTLSDVAGYTHRIGQLRETLLDMSLKSQDCEILGESEWGLDTPPGWPAAEPADTAFLLERVSISAPSSDKPLIKDLSLKISEGQSLLITGNTGTGKTSLLRVLGGLWTSTRGSVQMLTDFGPHGVLFLPQKPFFTDGTLREQVIYPLKEVYPDSGSADDERILRFLELAGLSNLVARTEGLDQQVDWNWYDVLSPGEMQRLSFARLFYLQPKYAVLDEATSALTEEVESELYRIGQQLGMTFISVGHRQSLEKFHSLVLKLCGGGRWELMRIKVE

SEQ ID NO: 10629 - protein, 839 aa, Homo sapiens
MGPRAKTICSLFFLLWVLAEPAENSDFYLPGDYLLGGLFSLHANMKGIVHLNFLQVPMCKEYEVKVIGYNLMQAMRFAVEEINNDSSLLPGVLLGYEIVDVCYISNNVQPVLYFLAHEDNLLPIQEDYSNYISRVVAVIGPDNSESVMTVANFLSLFLLPQITYSAISDELRDKVRFPALLRTTPSADHHVEAMVQLMLHFRWNWIIVLVSSDTYGRDNGQLLGERVARRDICIAFQETLPTLQPNQNMTSEERQRLVTIVDKLQQSTARVVVVFSPDLTLYHFFNEVLRQNFTGAVWIASESWAIDPVLHNLTELGHLGTFLGITIQSVPIPGFSEFREWGPQAGPPPLSRTSQSYTCNQECDNCLNATLSFNTILRLSGERVVYSVYSAVYAVAHALHSLLGCDKSTCTKRVVYPWQLLEEIWKVNFTLLDHQIFFDPQGDVALHLEIVQWQWDRSQNPFQSVASYYPLQRQLKNIQDISWHTVNNTIPMSMCSKRCQSGQKKKPVGIHVCCFECIDCLPGTFLNHTEDEYECQACPNNEWSYQSETSCFKRQLVFLEWHEAPTIAVALLAALGFLSTLAILVIFWRHFQTPIVRSAGGPMCFLMLTLLLVAYMVVPVYVGPPKVSTCLCRQALFPLCFTICISCIAVRSFQIVCAFKMASRFPRAYSYWVRYQGPYVSMAFITVLKMVIVVIGMLATGLSPTTRTDPDDPKITIVSCNPNYRNSLLFNTSLDLLLSVVGFSFAYMGKELPTNYNEAKFITLSMTFYFTSSVSLCTFMSAYSGVLVTIVDLLVTVLNLLAISLGYFGPKCYMILFYPERNTPAYFNSMIQGYTMRRD

SEQ ID NO: 10630 - protein, 309 aa, Homo sapiens
MITFLPIIFSILIVVIFVIGNFANGFIALVNSIEWVKRQKISFVDQILTALAVSRVGLLWVLLLHWYATQLNPAFYSVEVRITAYNVWAVTNHFSSWLATSLSMFYLLRIANFSNLIFLRIKRRVKSVVLVILLGPLLFLVCHLFVINMDETVWTKEYEGNVTWKIKLRSAMYHSNMTLTMLANFVPLTLTLISFLLLICSLCKHLKKMQLHGKGSQDPSTKVHIKALQTVTSFLLLCAIYFLSMIISVCNFGRLEKQPVFMFCQAIIFSYPSTHPFILILGNKKLKQIFLSVLRHVRYWVKDRSLRLH

SEQ ID NO: 10631 - protein, 2146 aa, Homo sapiens [sequence omitted]

SEQ ID NO: 10632 - protein, 2008 aa, Homo sapiens
MVCLGTGQSAGPLVSVQNHCPPCGLSPQESLGLALGQAQEPLHSLLEAAEDLAQELLALRSLVELRALLQRPRGTSGPLELLSEALCSVRGPSSTVGPSLNWYEASDLMELVGQEPESALPDSSLSPACSELIGALDSHPLSRLLWRRLKPLILGKLLFAPDTPFTRKLMAQVNRTFEELTLLRDVREVWEMLGPRIFTFMNDSSNVAMLQRLLQMQDEGRRQPRPGGRDHMEALRSFLDPGSGGYSWQDAHADVGHLVGTLGRVTECLSLDKLEAAPSEAALVSRALQLLAEHRFWAGVVFLGPEDSSDPTEHPTPDLGPGHVRIKIRMDIDVVTRTNKIRDRFWDPGPAADPLTDLRYVWGGFVYLQDLVERAAVRVLSGANPRAGLYLQQMPYPCYVDDVFLRVLSRSLPLFLTLAWIYSVTLTVKAVVREKETRLRDTMRAMGLSRAVLWLGWFLSCLGPFLLSAALLVLVLKLGDILPYSHPGVVFLFLAAFAVATVTQSFLLSAFFSRANLAAACGGLAYFSLYLPYVLCVAWRDRLPAGGRVAASLLSPVAFGFGCESLALLEEQGEGAQWHNVGTRPTADVFSLAQVSGLLLLDAALYGLATWYLEAVCPGQYGIPEPWNFPFRRSYWCGPRPPKSPAPCPTPLDPKVLVEEAPPGLSPGVSVRSLEKRFPGSPQPALRGLSLDFYQGHITAFLGHNGAGKTTTLSILSGLFPPSGGSAFILGHDVRSSMAAIRPHLGVCPQYNVLFDMLTVDEHVWFYGRLKGLSAAVVGPEQDRLLQDVGLVSKQSVQTRHLSGGMQRKLSVAIAFVGGSQVVILDEPTAGVDPASRRGIWELLLKYREGRTLILSTHHLDEAELLGDRVAVVAGGRLCCCGSPLFLRRHLGSGYYLTLVKARLPLTTNEKADTDMEGSVDTRQEKKNGSQGSRVGTPQLLALVQHWVPGARLVEELPHELVLVLPYTGAHDGSFATLFRELDTRLAELRLTGYGISDTSLEEIFLKVVEECAADTDMEDGSCGQHLCTGIAGLDVTLRLKMPPQETALENGEPAGSAPETDQGSGPDAVGRVQGWALTRQQLQALLLKRFLLARRSRRGLFAQIVLPALFVGLALVFSLIVPPFGHYPALRLSPTMYGAQVSFFSEDAPGDPGRARLLEALLQEAGLEEPPVQHSSHRFSAPEVPAEVAKVLASGNWTPESPSPACQCSQPGARRLLPDCPAAAGGPPPPQAVTGSGEVVQNLTGRNLSDFLVKTYPRLVRQGLKTKKWVNEVRYGGFSLGGRDPGLPSGQELGRSVEELWALLSPLPGGALDRVLKNLTAWAHSLDAQDSLKIWFNNKGWHSMVAFVNRASNAILRAHLPPGRARHAHSITTLNHPLNLTKEQLFEAALMASSVDVLVSICVVFAMSFVPASFTLVLIEERVTRAKHLQLMGGLSPTLYWLGNFLWDMCNYLVPACIVVLIFLAFQQRAYVAPANLPALLLLLLLYGWSITPLMYPASFFFSVPSTAYVVLTCINLFIGINGSMATFVLELFSDQKLQEVSRILKQVFLIFPHFCLGRGLIDMVRNQAMADAFERLGDRQFQSPLRWEVVGKNLLAMVIQGPLFLLFTLLLQHRSQLLPQPRVRSLPLLGEEDEDVARERERVVQGATQGDVLVLRNLTKVYRGQRMPAVDRLCLGIPPGECFGLLGVNGAGKTSTFRMVTGDTLASRGEAVLAGHSVAREPSAAHLSMGYCPQSDAIFELLTGREHLELLARLRGVPEAQVAQTAGSGLARLGLSWYADRPAGTYSGGNKRKLATALALVGDPAVVFLDEPTTGMDPSARRFLWNSLLAVVREGRSVMLTSHSMEECEALCSRLAIMVNGRFRCLGSPQHLKGRFAAGHTLTLRVPAARSQPAAAFVAAEFPGSELREAHGGRLRFQLPPGGRCALARVFGELAVHGAEHGVEDFSVSQTMLEEVFLYFSKDQGKDEDTEEQKEAGVGVDPAPGLQHPKRVSQFLDDPSTAETVL

SEQ ID NO: 10633 - protein, 142 aa, Homo sapiens
MNCSESQRLRTLLSRLLLELHHRGNASGLGAGPRPSMGMGVVPDPFVGREVTSAKGDDAYLYILLIMIFYACLAGGLILAYTRSRKLVEAKDEPSQACAEHEWAPGGALTADAEAAAGSQAEGRRQLASEGLPALAQGAERV

SEQ ID NO: 10634 - protein, 350 aa, Homo sapiens
MEKQPQNSRRGLAPREVPPAVGLLLIMALMNTLLYLCLDHFFIAPRQSTVDPTHCPYGHFRIGQMKNCSPWLSCEELRTEVRQLKRVGEGAVKRVFLSEWKEHKVALSQLTSLEMKDDFLHGLQMLKSLQGTHVVTLLGYCEDDNTMLTEYHPLGSLSNLEETLNLSKYQNVNTWQHRLELAMDYVSIINYLHHSPVGTRVMCDSNDLPKTLSQYLLTSNFSILANDLDALPLVNHSSGMLVKCGHRELHGDFVAPEQLWPYGEDVPFHDDLMPSYDEKIDIWKIPDISSFLLGHIEGSDMVRFHLFDIHKACKSQTPSERPTAQDVLETYQKVLDTLRDAMMSQAREML

SEQ ID NO: 10635 - protein, 2005 aa, Homo sapiens
MAQSVLVPPGPDSFRFFTRESLAAIEQRIAEEKAKRPKQERKDEDDENGPKPNSDLEAGKSLPFIYGDIPPEMVSVPLEDLDPYYINKKTFIVLNKGKAISRFSATPALYILTPFNPIRKLAIKILVHSLFNMLIMCTILTNCVFMTMSNPPDWTKNVEYTFTGIYTFESLIKILARGFCLEDFTFLRDPWNWLDFTVITFAYVTEFVNLGNVSALRTFRVLRALKTISVIPGLKTIVGALIQSVKKLSDVMILTVFCLSVFALIGLQLFMGNLRNKCLQWPPDNSSFEINITSFFNNSLDGNGTTFNRTVSIFNWDEYIEDKSHFYFLEGQNDALLCGNSSDAGQCPEGYICVKAGRNPNYGYTSFDTFSWAFLSLFRLMTQDFWENLYQLTLRAAGKTYMIFFVLVIFLGSFYLINLILAVVAMAYEEQNQATLEEAEQKEAEFQQMLEQLKKQQEEAQAAAAAASAESRDFSGAGGIGVFSESSSVASKLSSKSEKELKNRRKKKKQKEQSGEEEKNDRVRKSESEDSIRRKGFRFSLEGSRLTYEKRFSSPHQSLLSIRGSLFSPRRNSRASLFSFRGRAKDIGSENDFADDEHSTFEDNDSRRDSLFVPHRHGERRHSNVSQASRASRVLPILPMNGKMHSAVDCNGVVSLVGGPSTLTSAGQLLPEGTTTETEIRKRRSSSYHVSMDLLEDPTSRQRAMSIASILTNTMEELEESRQKCPPCWYKFANMCLIWDCCKPWLKVKHLVNLVVMDPFVDLAITICIVLNTLFMAMEHYPMTEQFSSVLSVGNLVFTGIFTAEMFLKIIAMDPYYYFQEGWNIFDGFIVSLSLMELGLANVEGLSVLRSFRLLRVFKLAKSWPTLNMLIKIIGNSVGALGNLTLVLAIIVFIFAVVGMQLFGKSYKECVCKISNDCELPRWHMHDFFHSFLIVFRVLCGEWIETMWDCMEVAGQTMCLTVFMMVMVIGNLVVLNLFLALLLSSFSSDNLAATDDDNEMNNLQIAVGRMQKGIDFVKRKIREFIQKAFVRKQKALDEIKPLEDLNNKKDSCISNHTTIEIGKDLNYLKDGNGTTSGIGSSVEKYVVDESDYMSFINNPSLTVTVPIAVGESDFENLNTEEFSSESDMEESKEKLNATSSSEGSTVDIGAPAEGEQPEVEPEESLEPEACFTEDCVRKFKCCQISIEEGKGKLWWNLRKTCYKIVEHNWFETFIVFMILLSSGALAFEDIYIEQRKTIKTMLEYADKVFTYIFILEMLLKWVAYGFQVYFTNAWCWLDFLIVDVSLVSLTANALGYSELGAIKSLRTLRALRPLRALSRFEGMRVVVNALLGAIPSIMNVLLVCLIFWLIFSIMGVNLFAGKFYHCINYTTGEMFDVSVVNNYSECKALIESNQTARWKNVKVNFDNVGLGYLSLLQVATFKGWMDIMYAAVDSRNVELQPKYEDNLYMYLYFVIFIIFGSFFTLNLFIGVIIDNFNQQKKKFGGQDIFMTEEQKKYYNAMKKLGSKKPQKPIPRPANKFQGMVFDFVTKQVFDISIMILICLNMVTMMVETDDQSQEMTNILYWINLVFIVLFTGECVLKLISLRYYYFTIGWNIFDFVVVILSIVGMFLAELIEKYFVSPTLFRVIRLARIGRILRLIKGAKGIRTLLFALMMSLPALFNIGLLLFLVMFIYAIFGMSNFAYVKREVGIDDMFNFETFGNSMICLFQITTSAGWDGLLAPILNSGPPDCDPDKDHPGSSVKGDCGNPSVGIFFFVSYIIISFLVVVNMYIAVILENFSVATEESAEPLSEDDFEMFYEVWEKFDPDATQFIEFAKLSDFADALDPPLLIAKPNKVQLIAMDLPMVSGDRIHCLDILFAFTKRVLGESGEMDALRIQMEERFMASNPSKVSYEPITTTLKRKQEEVSAIIIQRAYRRYLLKQKVKKVSSIYKKDKGKECDGTPIKEDTLIDKLNENSTPEKTDMTPSTTSPPSYDSVTKPEKEKFEKDKSEKEDKGKDIRESKK

SEQ ID NO: 10636 - protein, 2005 aa, Homo sapiens
MAQSVLVPPGPDSFRFFTRESLAAIEQRIAEEKAKRPKQERKDEDDENGPKPNSDLEAGKSLPFIYGDIPPEMVSVPLEDLDPYYINKKTFIVLNKGKAISRFSATPALYILTPFNPIRKLAIKILVHSLFNMLIMCTILTNCVFMTMSNPPDWTKNVEYTFTGIYTFESLIKILARGFCLEDFTFLRDPWNWLDFTVITFAYVTEFVDLGNVSALRTFRVLRALKTISVIPGLKTIVGALIQSVKKLSDVMILTVFCLSVFALIGLQLFMGNLRNKCLQWPPDNSSFEINITSFFNNSLDGNGTTFNRTVSIFNWDEYIEDKSHFYFLEGQNDALLCGNSSDAGQCPEGYICVKAGRNPNYGYTSFDTFSWAFLSLFRLMTQDFWENLYQLTLRAAGKTYMIFFVLVIFLGSFYLINLILAVVAMAYEEQNQATLEEAEQKEAEFQQMLEQLKKQQEEAQAAAAAASAESRDFSGAGGIGVFSESSSVASKLSSKSEKELKNRRKKKKQKEQSGEEEKNDRVRKSESEDSIRRKGFRFSLEGSRLTYEKRFSSPHQSLLSIRGSLFSPRRNSRASLFSFRGRAKDIGSENDFADDEHSTFEDNDSRRDSLFVPHRHGERRHSNVSQASRASRVLPILPMNGKMHSAVDCNGVVSLVGGPSTLTSAGQLLPEGTTTETEIRKRRSSSYHVSMDLLEDPTSRQRAMSIASILTNTMEELEESRQKCPPCWYKFANMCLIWDCCKPWLKVKHLVNLVVMDPFVDLAITICIVLNTLFMAMEHYPMTEQFSSVLSVGNLVFTGIFTAEMFLKIIAMDPYYYFQEGWNIFDGFIVSLSLMELGLANVEGLSVLRSFRLLRVFKLAKSWPTLNMLIKIIGNSVGALGNLTLVLAIIVFIFAVVGMQLFGKSYKECVCKISNDCELPRWHMHDFFHSFLIVFRVLCGEWIETMWDCMEVAGQTMCLTVFMMVMVIGNLVVLNLFLALLLSSFSSDNLAATDDDNEMNNLQIAVGRMQKGIDFVKRKIREFIQKAFVRKQKALDEIKPLEDLNNKKDSCISNHTTIEIGKDLNYLKDGNGTTSGIGSSVEKYVVDESDYMSFINNPSLTVTVPIAVGESDFENLNTEEFSSESDMEESKEKLNATSSSEGSTVDIGAPAEGEQPEVEPEESLEPEACFTEDCVRKFKCCQISIEEGKGKLWWNLRKTCYKIVEHNWFETFIVFMILLSSGALAFEDIYIEQRKTIKTMLEYADKVFTYIFILEMLLKWVAYGFQVYFTNAWCWLDFLIVDVSLVSLTANALGYSELGAIKSLRTLRALRPLRALSRFEGMRVVVNALLGAIPSIMNVLLVCLIFWLIFSIMGVNLFAGKFYHCINYTTGEMFDVSVVNNYSECKALIESNQTARWKNVKVNFDNVGLGYLSLLQVATFKGWMDIMYAAVDSRNVELQPKYEDNLYMYLYFVIFIIFGSFFTLNLFIGVIIDNFNQQKKKFGGQDIFMTEEQKKYYNAMKKLGSKKPQKPIPRPANKFQGMVFDFVTKQVFDISIMILICLNMVTMMVETDDQSQEMTNILYWINLVFIVLFTGECVLKLISLRYYYFTIGWNIFDFVVVILSIVGMFLAELIEKYFVSPTLFRVIRLARIGRILRLIKGAKGIRTLLFALMMSLPALFNIGLLLFLVMFIYAIFGMSNFAYVKREVGIDDMFNFETFGNSMICLFQITTSAGWDGLLAPILNSGPPDCDPDKDHPGSSVKGDCGNPSVGIFFFVSYIIISFLVVVNMYIAVILENFSVATEESAEPLSEDDFEMFYEVWEKFDPDATQFIEFAKLSDFADALDPPLLIAKPNKVQLIAMDLPMVSGDRIHCLDILFAFTKRVLGESGEMDALRIQMEERFMASNPSKVSYEPITTTLKRKQEEVSAIIIQRAYRRYLLKQKVKKVSSIYKKDKGKECDGTPIKEDTLIDKLNENSTPEKTDMTPSTTSPPSYDSVTKPEKEKFEKDKSEKEDKGKDIRESKK

SEQ ID NO: 10637 - protein, 1386 aa, Homo sapiens
QCIMYATDSRGHSPAFLQPQNGNSRHPSGYVPGKVVPLRPPPPPKSQASAKFTSIRREDRATFAFSPEEQQAQRESQKQKRHKNTFICFAITSFSFFIALAIILGISSKYAPDENCPDQNPRLRNWDPGQDSAKQVVIKEGDMLRLTSDATVHSIVIQDGGLLVFGDNKDGSRNITLRTHYILIQDGGALHIGAEKCRYKSKATITLYGKSDEGESMPTFGKKFIGVEAGGTLELHGARKASWTLLARTLNSSGLPFGSYTFEKDFSRGLNVRVIDQDTAKILESERFDTHEYRNESRRLQEFLRFQDPGRIVAIAVGDSAAKSLLQGTIQMIQERLGSELIQGLGYRQAWALVGVIDGGSTSCNESVRNYENHSSGGKALAQREFYTVDGQKFSVTAYSEWIEGVSLSGFRVEVVDGVKLNLLDDVSSWKPGDQIVVASTDYSMYQAEEFTLLPCSECSHFQVKVKETPQFLHMGEIIDGVDMRAEVGILTRNIVIQGEVEDSCYAENQCQFFDYDTFGGHIMIMKNFTSVHLSYVELKHMGQQQMGRYPVHFHLCGDVDYKGGYRHATFVDGLSIHHSFSRCITVHGTNGLLIKDTIGFDTLGHCFFLEDGIEQRNTLFHNLGLLTKPGTLLPTDRNNSMCTTMRDKVFGNYIPVPATDCMAVSTFWIAHPNNNLINNAAAGSQDAGIWYLFHKEPTGESSGLQLLAKPELTPLGIFYNNRVHSNFKAGLFIDKGVKTTNSSAADPREYLCLDNSARFRPHQDANPEKPRVAALIDRLIAFKNNDNGAWVRGGDIIVQNSAFADNGIGLTFASDGSFPSDEGSSQEVSESLFVGESRNYGFQGGQNKYVGTGGIDQKPRTLPRNRTFPIRGFQIYDGPIHLTRSTFKKYVPTPDRYSSAIGFLMKNSWQITPRNNISLVKFGPHVSLNVFFGKPGPWFEDCEMDGDKNSIFHDIDGSVTGYKDAYVGRMDNYLIRHPSCVNVSKWNAVICSGTYAQVYVQTWSTQNLSMTITRDEYPSNPMVLRGINQKAAFPQYQPVVMLEKGYTIHWNGPAPRTTFLYLVNFNKNDWIRVGLCYPSNTSFQVTFGYLQRQNGSLSKIEEYEPVHSLEELQRKQSERKFYFDSSTGLLFLYLKAKSHRHGHSYCSSQGCERVKIQAATDSKDISNCMAKAYPQYYRKPSVVKRMPAMLTGLCQGCGTRQVVFTSDPHKSYLPVQFQSPDKAETQRGDPSVISVNGTDFTFRSAGVLLLVVDPCSVPFRLTEKTVFPLADVSRIEEYLKTGIPPRSIVLLSTRGEIKQLNISHLLVPLGLAKPAHLYDKGSTIFLGFSGNFKPSWTKLFTSPAGQGLGVLEQFIPLQLDEYGCPRATTVRRRDLELLKQASKAH

SEQ ID NO: 10638 - protein, 512 aa, Homo sapiens
MWFVTEPILWAFFLFLMLMTIHCWSSYLFTQKHKLTLILVFQDVISIADNILNSASVTNWTVLLREEKYASSRLLETLENISTLVPPTALPLNFSRKFIDWKGIPVNKSQLKRGYSYQIKMCPQNTSIPIRGRVLIGSDQFQRSLPETIISMASLTLGNILPVSKNGNAQVNGPVISTVIQNYSINEVFLFFSKIESNLSQPHCVFWDFSHLQWNDAGCHLVNETQDIVTCQCTHLTSFSILMSPFVPSTIFPVVKWITYVGLGISIGSLILCLIIEALFWKQIKKSQTSHTRRICMVNIALSLLIADVWFIVGATVDTTVNPSGVCTAAVFFTHFFYLSLFFWMLMLGILLAYRIILVFHHMAQHLMMAVGFCLGYGCPLIISVITIAVTQPSNTYKRKDVCWLNWSNGSKPLLAFVVPALAIVAVNFVVVLLVLTKLWRPTVGERLSRDDKATIIRVGKSLLILTPLLGLTWGFGIGTIVDSQNLAWHVIFALLNAFQVRTVTITYCIVK

SEQ ID NO: 10639 - protein, 713 aa, Homo sapiens
MDISIQRNGSIVAGYEVVGSSSASELLSAIEHVAEKAKTALHKLFPLEDGSFRVFGKAQCNDIVFGFGSKDDEYTLPCSSGYRGNITAKCESSGWQVIRETCVLSLLEELNKNFSMIVGNATEAAVSSFVQNLSVIIRQNPSTTVGNLASVVSILSNISSLSLASHFRVSNSTMEDVISIADNILNSASVTNWTVLLREEKYASSRLLETLENISTLVPPTALPLNFSRKFIDWKGIPVNKSQLKRGYSYQIKMCPQNTSIPIRGRVLIGSDQFQRSLPETIISMASLTLGNILPVSKNGNAQVNGPVISTVIQNYSINEVFLFFSKIESNLSQPHCVFWDFSHLQWNDAGCHLVNETQDIVTCQCTHLTSFSILMSPFVPSTIFPVVKWITYVGLGISIGSLILCLIIEALFWKQIKKSQTSHTRRICMVNIALSLLIADVWFIVGATVDTTVNPSGVCTAAVFFTHFFYLSLFFWMLMLGILLAYRIILVFHHMAQHLMMAVGFCLGYGCPLIISVITIAVTQPSNTYKRKDVCWLNWSNGSKPLLAFVVPALAIVAVNFVVVLLVLTKLWRPTVGERLSRDDKATIIRVGKSLLILTPLLGLTWGFGIGTIVDSQNLAWHVIFALLNAFQGFFILCFGILLDSKLRQLLFNKLSALSSWKQTEKQNSSDLSAKPKFSKPFNPLQNKGHYAFSHTGDSSDNIMLTQFVSNE

SEQ ID NO: 10640 - protein, 417 aa, Homo sapiens
MGHLSAPLHRVRVPWQGLLLTASLLTFWNPPTTAQLTTESMPFNVAEGKEVLLLVHNLPQQLFGYSWYKGERVDGNRQIVGYAIGTQQATPGPANSGRETIYPNASLLIQNVTQNDTGFYTLQVIKSDLVNEEATGQFHVYPELPKPSISSNNSNPVEDKDAVAFTCEPETQDTTYLWWINNQSLPVSPRLQLSNGNRTLTLLSVTRNDTGPYECEIQNPVSANRSDPVTLNVTYGPDTPTISPSDTYYRPGANLSLSCYAASNPPAQYSWLINGTFQQSTQELFIPNITVNNSGSYTCHANNSVTGCNRTTVKTIIVTELSPVVAKPQIKASKTTVTGDKDSVNLTCSTNDTGISIRWFFKNQSLPSSERMKLSQGNTTLSINPVKREDAGTYWCEVFNPISKNQSDPIMLNVNCK

SEQ ID NO: 10641 - protein, 226 aa, Homo sapiens
NSGSYTCHANNSVTGCNRTTVKTIIVTELSPVVAKPQIKASKTTVTGDKDSVNLTCSTNDTGISIRWFFKNQSLPSSERMKLSQGNTTLSINPVKREDAGTYWCEVFNPISKNQSDPIMLNEMAFHHVAKAGLKLLSSSNPPASTSQSAKITERQNLTMLPRLDSNSWAQAILPSVSQSAEITDNALPQENGLSPGAIAGIVIGVVALVALIAVALACFLHFGKTG

SEQ ID NO: 10642 - protein, 526 aa, Homo sapiens
MGHLSAPLHRVRVPWQGLLLTASLLTFWNPPTTAQLTTESMPFNVAEGKEVLLLVHNLPQQLFGYSWYKGERVDGNRQIVGYAIGTQQATPGPANSGRETIYPNASLLIQNVTQNDTGFYTLQVIKSDLVNEEATGQFHVYPELPKPSISSNNSNPVEDKDAVAFTCEPETQDTTYLWWINNQSLPVSPRLQLSNGNRTLTLLSVTRNDTGPYECEIQNPVSANRSDPVTLNVTYGPDTPTISPSDTYYRPGANLSLSCYAASNPPAQYSWLINGTFQQSTQELFIPNITVNNSGSYTCHANNSVTGCNRTTVKTIIVTELSPVVAKPQIKASKTTVTGDKDSVNLTCSTNDTGISIRWFFKNQSLPSSERMKLSQGNTTLSINPVKREDAGTYWCEVFNPISKNQSDPIMLNVNYNALPQENGLSPGAIAGIVIGVVALVALIAVALACFLHFGKTGRASDQRDLTEHKPSVSNHTQDHSNDPPNKMNEVTYSTLNFEAQQPTQPTSASPSLTATEIIYSEVKKQ

SEQ ID NO: 10643 - protein, 468 aa, Homo sapiens
MGHLSAPLHRVRVPWQGLLLTASLLTFWNPPTTAQLTTESMPFNVAEGKEVLLLVHNLPQQLFGYSWYKGERVDGNRQIVGYAIGTQQATPGPANSGRETIYPNASLLIQNVTQNDTGFYTLQVIKSDLVNEEATGQFHVYPELPKPSISSNNSNPVEDKDAVAFTCEPETQDTTYLWWINNQSLPVSPRLQLSNGNRTLTLLSVTRNDTGPYECEIQNPVSANRSDPVTLNVTYGPDTPTISPSDTYYRPGANLSLSCYAASNPPAQYSWLINGTFQQSTQELFIPNITVNNSGSYTCHANNSVTGCNRTTVKTIIVTELSPVVAKPQIKASKTTVTGDKDSVNLTCSTNDTGISIRWFFKNQSLPSSERMKLSQGNTTLSINPVKREDAGTYWCEVFNPISKNQSDPIMLNVNYNALPQENGLSPGAIAGIVIGVVALVALIAVALACFLHFGKTGRTTPMTHLTR

SEQ ID NO: 10644 - protein, 571 aa, Homo sapiens
MSRVAGTRTDVNELLQRWTPRCVRWHTGGARRVALDRPLVTACLPPAGDVVDVYQREFLALRDRLHAAEQESLKRSKELNLVLDEIKRAVSERQALRDGDGNRTWGRLTEDPRLKPWNGSHRHVLHLPTVFHHLPHLLAKESSLQPAVRVGQGRTGVSVVMGIPSVRREVHSYLTDTLHSLISELSPQEKEDSVIVVLIAEARCLVSPQTDSQYTSAVTENIKALFPTEIHSGLLEVISPSPHFYPDFSRLRESFGDPKERVRWRTKQNLDYCFLMMYAQSKGIYYVQLEDDIVAKPNYLSTMKNFALQQPSEDWMILEFSQLGFIGKMFKSLDLSLIVEFILMFYRDKPIDWLLDHILWVKVCNPEKDAKHCDRQKANLRIRFKPSLFQHVGTHSSLAGKIQKLKDKDFGKQALRKEHVNPPAEVSTSLKTYQHFTLEKAYLREDFFWAFTPAAGDFIRFRFFQPLRLERFFFRSGNIEHPEDKLFNTSVEVLPFDNPQSDKEALQEGRTATLRYPRSPDGYLQIGSFYKGVAEGEVDPAFGPLEALRLSIQTDSPVWVILSEIFLKKAD

SEQ ID NO: 10645 - protein, 616 aa, Homo sapiens
GAAGALPGPVPARPRAPRPSPTRGRGPCRRRRRLPTPAPRPRSPGPCSLGPAGARRAPEEMRLRNGTFLTLLLFCLCAFLSLSWYAALSGQKGDVVDVYQREFLALRDRLHAAEQESLKRSKELNLVLDEIKRAVSERQALRDGDGNRTWGRLTEDPRLKPWNGSHRHVLHLPTVFHHLPHLLAKESSLQPAVRVGQGRTGVSVVMGIPSVRREVHSYLTDTLHSLISELSPQEKEDSVIVVLIAEARCLVSPQTDSQYTSAVTENIKALFPTEIHSGLLEVISPSPHFYPDFSRLRESFGDPKERVRWRTKQNLDYCFLMMYAQSKGIYYVQLEDDIVAKPNYLSTMKNFALQQPSEDWMILEFSQLGFIGKMFKSLDLSLIVEFILMFYRDKPIDWLLDHILWVKVCNPEKDAKHCDRQKANLRIRFKPSLFQHVGTHSSLAGKIQKLKDKDFGKQALRKEHVNPPAEVSTSLKTYQHFTLEKAYLREDFFWAFTPAAGDFIRFRFFQPLRLERFFFRSGNIEHPEDKLFNTSVEVLPFDNPQSDKEALQEGRTATLRYPRSPDGYLQIGSFYKGVAEGEVDPAFGPLEALRLSIQTDSPVWVILSEIFLKKAD

SEQ ID NO: 10646 - protein, 470 aa, Homo sapiens
MADSGLREPQEDSQKDLENDPSVNSQAQETTIIASNAEEAEILHSACGLSKDHQEVETEGPESADTGDKSESPDEANVGKHPKDKTEDENKQSFLDGGKGHHLPSENLGKEPLDPDPSHSPSDKVGRADAHLGSSSVALPKEASDGTGASQEPPTTDSQEAQSPGHSSAGQEGEDTLRRRLLAPEAGSHPQQTQKLEEIKENAQDTMRQINKKGFWSYGPVILVVLVVAVVASSVNSYYSSPAQQVPKNPALEAFLAQFSQLEDKFPGQSSFLWQRGRKFLQKHLNASNPTEPATIIFTAAREGRETLKCLSHHVADAYTSSQKVSPIQIDGAGRTWQDSDTVKLLVDLELSYGFENGQKAAVVHHFESFPAGSTLIFYKYCDHENAAFKDVALVLTVLLEEETLEASVGPRETEEKVRDLLWAKFTNSDTPTSFNHMDSDKLSGLWSRISHLVLPVQPVSSIEEQGCLF

SEQ ID NO: 10647 - protein, 388 aa, Homo sapiens
MAGCCSALAAFLFEYDTPRIVLIRSRKVGLMNRAVQLLILAYVIGWVFVWEKGYQETDSVVSSVTTKVKGVAVTNTSKLGFRIWDVADYVIPAQEENSLFVMTNVILTMNQTQGLCPEIPDATTVCKSDASCTAGSAGTHSNGVSTGRCVAFNGSVKTCEVAAWCPVEDDTHVPQPAFLKAAENFTLLVKNNIWYPKFNFSKRNILPNITTTYLKSCIYDAKTDPFCPIFRLGKIVENAGHSFQDMAVEGGIMGIQVNWDCNLDRAASLCLPRYSFRRLDTRDVEHNVSPGYNFRFAKYYRDLAGNEQRTLIKAYGIRFDIIVFGKAGKFDIIPTMINIGSGLALLGMATVLCDIIVLYCMKKRLYYREKKYKYVEDYEQGLASELDQ

SEQ ID NO: 10648 - protein, 388 aa, Homo sapiens [sequence omitted]

SEQ ID NO: 10649 - protein, 370 aa, Homo sapiens
DGCGHTVLGPESGTLTSINYPQTYPNSTVCEWEIRVKMGERVRIKFGDFDIEDSDSCHFNYLRIYNGIGVSRTEIGKYCGLGLQMNHSIESKGNEITLLFMSGIHVSGRGFLASYSVIDKQVFYFCFSRSNYLFGHCIQFWNLSSVSTPAGCLLPFAEISGTIPHGYRDSSPLCMAGVHAGVVSNTLGGQISVVISKGIPYYESSLANNVTSVVSTCILKLYLETKFSLFFVSGCYGTLGMESGVIADPQITASSVLEWTDHTGQENSWKPKKARLKKPGPPWAAFATDEYQWLQIDLNKEKKITGIITTGSTMVTITMCLPTESCTVMMGRNGLCTESLVEQDKIFQGNKDYHQDVRNNFLPPIIARFI

SEQ ID NO: 10650 - protein, 775 aa, Homo sapiens
  VARIANT 22: Xaa = Any Amino Acid
MASRAVVRARRCPQCPQVRAAXAAPAWAALPLSRSLPPCSNSSSFSMPLFLLLLLVLLLLLEDAGAQQGDGCGHTVLGPESGTLTSINYPQTYPNSTVCEWEIRVKMGERVRIKFGDFDIEDSDSCHFNYLRIYNGIGVSRTEIGKYCGLGLQMNHSIESKGNEITLLFMSGIHVSGRGFLASYSVIDKQDLITCLDTASNFLEPEFSKYCPAGCLLPFAEISGTIPHGYRDSSPLCMAGVHAGVVSNTLGGQISVVISKGIPYYESSLANNVTSVVGHLSTSLFTFKTSGCYGTLGMESGVIADPQITASSVLEWTDHTGQENSWKPKKARLKKPGPPWAAFATDEYQWLQIDLNKEKKITGIITTGSTMVEHNYYVSAYRILYSDDGQKWTVYREPGVEQDKIFQGNKDYHQDVRNNFLPPIIARFIRVNPTQWQQKIAMKMELLGCQFIPKGRPPKLTQPPPPRNSNDLKNTTAPPKIAKGRAPKFTQPLQPRSSNEFPAQTEQTTASPDIRNTTVTPNVTKDVALAAVLVPVLVMVLTTLILILVCAWHWRNRKKKTEGTYDLPYWDRAGWWKGMKQFLPAKAVDHEETPVRYSSSEVNHLSPREVTTVLQADSAEYAQPLVGGIVGTLHQRSTFKPEEGKEAGYADLDPYNSPGQEVYHAYAEPLPITGPEYATPIIMDMSGHPTTSVGQPSTSTFKATGNQPPPLVGTYNTLLSRTDSCSSAQAQYDTPKAGKPGLPAPDELVYQVPQSTQEVSGAGRDGECDVFKEIL

SEQ ID NO: 10651 - protein, 357 aa, Homo sapiens
MATTVPDGCRNGLKSKYYRLCDKAEAWGIVLETVATAGVVTSVAFMLTLPILVCKVQDSNRRKMLPTQFLFLLGVLGIFGLTFAFIIGLDGSTGPTRFFLFGILFSICFSCLLAHAVSLTKLVRGRKPLSLLVILGLAVGFSLVQDVIAIEYIVLTMNRTNVNVFSELSAPRRNEDFVLLLTYVLFLMALTFLMSSFTFCGSFTGWKRHGAHIYLTMLLSIAIWVAWITLLMLPDFDRRWDDTILSSALAANGWVFLLAYVSPEFWLLTKQRNPMDYPVEDAFCKPQLVKKSYGVENRAYSQEEITQGFEETGDTLYAPYSTHFQLQNQPPQKEFSIPRAHAWPSPYKDYEVKKEGS

SEQ ID NO: 10652 - protein, 359 aa, Homo sapiens
MDPLGPAKPQWSWRCCLTTLLFQLLMAVCFFSYLRVSQDDPTVYPNGSRFPDSTGTPAHSIPLILLWTWPFNKPIALPRCSEMVPGTADCNITADRKVYPQADAVIVHHREVMYNPSAQLPRSPRRQGQRWIWFSMESPSHCWQLKAMDGYFNLTMSYRSDSDIFTPYGWLEPWSGQPAHPPLNLSAKTELVAWAVSNWGPNSARVRYYQSLQAHLKVDVYGRSHKPLPQGTMMETLSRYKFYLAFENSLHPDYITEKLWRNALEAWAVPVVLGPSRSNYERFLPPDAFIHVDDFQSPKDLARYLQELDKDHARYLSYFRWRETLRPRSFSWALAFCKACWKLQEESRYQTRGIAAWFT

SEQ ID NO: 10653 - protein, 365 aa, Homo sapiens
MDPLGPAKPQWSWRCCLTTLLFQLLMAVCFFSYLRVSQDDPTVYPNGSRFPDSTGTPAHSIPLILLWTWPFNKPIALPRCSEMVPGTADCNITADRKVYPQADAVIVHHREVMYNPSAQLPRSPRRQGQRWIWFSMESPSHCWQLKAMDGYFNLTMSYRSDSDIFTPYGWLEPWSGQPAHPPLNLSAKTELVAWAVSNWGPNSARVRYYQSLQAHLKVDVYGRSHKPLPQGTMMETLSRYKFYLAFENSLHPDYITEKLWRNALEAWAVPVVLGPSRSNYERFLPPDAFIHVDDFQSPKDLARYLQELDKDHARYLSYFRWRETLRPRSFSWALAFCKACWKLQEESSSGGLIYLRTRLPEASPA

SEQ ID NO: 10654 - protein, 374 aa, Homo sapiens
MDPLGPAKPQWLWRRCLAGLLFQLLVAVCFFSYLRVSRDDATGSPRPGLMAVEPVTGAPNGSRCQDSMATPAHPTLLILLWTWPFNTPVALPRCSEMVPGAADCNITADSSVYPQADAVIVHHWDIMYNPSANLPPPTRPQGQRWIWFSMESPSNCRHLEALDGYFNLTMSYRSDSDIFTPYGWLEPWSGQPAHPPLNLSAKTELVAWAVSNWKPDSARVRYYQSLQAHLKVDVYGRSHKPLPKGTMMETLSRYKFYLAFENSLHPDYITEKLWRNALEAWAVPVVLGPSRSNYERFLPPDAFIHVDDFQSPKDLARYLQELDKDHARYLSYFRWRETLRPRSFSWALAFCKACWKLQQESRYQTVRSIAAWFT

SEQ ID NO: 10655 - protein, 361 aa, Homo sapiens
MDPLGAAKPQWPWRRCLAALLFQLLVAVCFFSYLRVSRDDATGSPRAPSGSSRQDTTPTRPTLLILLWTWPFHIPVALSRCSEMVPGTADCHITADRKVYPQADTVIVHHWDIMSNPKSRLPPSPRPQGQRWIWFNLEPPPNCQHLEALDRYFNLTMSYRSDSDIFTPYGWLEPWSGQPAHPPLNLSAKTELVAWAVSNWKPDSARVRYYQSLQAHLKVDVYGRSHKPLPKGTMMETLSRYKFYLAFENSLHPDYITEKLWRNALEAWAVPVVLGPSRSNYERFLPPDAFIHVDDFQSPKDLARYLQELDKDHARYLSYFRWRETLRPRSFSWALDFCKACWKLQQESRYQTVRSIAAWFT

SEQ ID NO: 10656 - protein, 190 aa, Homo sapiens [sequence omitted]

SEQ ID NO: 10657 - protein, 143 aa, Homo sapiens
MEYHPDLENLDEDGYTQLHFDSQSNTRIAVVSEKGSCAASPPWRLIAVILGILCLVILVIAVVLGTMGVLSSPCPPNWIIYEKSCYLFSMSLNSWDGSKRQCWQLGSNLLKIDSSNELISDQNHSYPRKPISKLCMDSRVSHL

SEQ ID NO: 10658 - protein, 1222 aa, Homo sapiens [sequence omitted]

SEQ ID NO: 10659 - protein, 1221 aa, Homo sapiens
MMFRSDRMWSCHWKWKPSPLLFLFALYIMCVPHSVWGCANCRVVLSNPSGTFTSPCYPNDYPNSQACMWTLRAPTGYIIQITFNDFDIEEAPNCIYDSLSLDNGESQTKFCGATAKGLSFNSSANEMHVSFSSDFSIQKKGFNASYIRVAVSLRNQKVILPQTSDAYQVSVAKSISIPELSAFTLCFEATKVGHEDSDWTAFSYSNASFTQLLSFGKAKSGYFLSISDSKCLLNNALPVKEKEDIFAESFEQLCLVWNNSLGSIGVNFKRNYETVPCDSTISKVIPGNGKLLLGSNQNEIVSLKGDIYNFRLWNFTMNAKILSNLSCNVKGNVVDWQNDFWNIPNLALKAESNLSCGSYLIPLPAAELASCADLGTLCQATVNSPSTTPPTVTTNMPVTNRIDKQRNDGIIYRISVVIQNILRHPEVKVQSKVAEWLNSTFQNWNYTVYVVNISFHLSAGEDKIKVKRSLEDEPRLVLWALLVYNATNNTNLEGKIIQQKLLKNNESLDEGLRLHTVNVRQLGHCLAMEEPKGYYWPSIQPSEYVLPCPDKPGFSASRICFYNATNPLVTYWGPVDISNCLKEANEVANQILNLTADGQNLTSANITNIVEQVKRIVNKEESIDITLGSTLMNIFSNILSSSDSDLLESSSEALKTIDELAFKIDLNSTSHVNITTRNLALSVSSLLPGTNAISNFSIGLPSNNESYSQMDFESGQVDPLASVILPPNLLENLSPEDSVLVRRAQFTFFNKTGLFQDVGPQRKTLVSYVMACSIGNITIQNLKDPVQIKIKHTRTQEVHHPICAFWDLNKNKSFGGWNTSGCVAHRDSDASETVCLCNHFTHFGVLMDLPRSASQLDARNTKVLTFISYIGCGISAIFSAATLLTYVAFEKLRRDYPSKILMNLSTALLFLNLLFLLDGWITSFNVDGLCIAVAVLLHFFLLATFTWMGLEAIHMYIALVKVFNTYIRRYILKFCIIGWGLPALVVSVVLASRNNNEVYGKESYGKEKGDEFCWIQDPVIFYVTCAGYFGVMFFLNIAMFIVVMVQICGRNGKRSNRTLREEVLRNLRSVVSLTFLLGMTWGFAFFAWGPLNIPFMYLFSIFNSLQGLFIFIFHCAMKENVQKQWRRHLCCGRFRLADNSDWSKTATNIIKKSSDNLGKSLSSSSIGSNSTYLTSKSKSSSTTYFKRNSHTDNVSYEHSFNKSGSLRQCFHGQVLVKTGPC

SEQ ID NO: 10660 - protein, 312 aa, Homo sapiens
MDGVNDSSLQGFVLMSISDHPQLEMIFFIAILFSYLLTLLGNSTIILLSRLEARLHTPMYFFLSNLSSLDLAFATSSVPQMLINLWGPGKTISYGGCITQLYVFLWLGATECILLVVMAFDRYVAVCRPLRYTAIMNPQLCWLLAVIAWLGGLGNSVIQSTFTLQLPLCGHRRVEGFLCEVPAMIKLACGDTSLNQAVLNGVCTFFTAVPLSIIVISYCLIAQAVLKIHSAEGRRKAFNTCLSHLLVVFLFYGSASYGYLLPAKNSKQDQGKFISLFYSLVTPMVNPLIYTLRNMEVKGALRRLLGKGREVG

SEQ ID NO: 10661 - protein, 1090 aa, Homo sapiens
MERFRLEKKLPGPDEEAVVDLGKTSSTVNTKFEKEELESHRAVYIGVHVPFSKESRRRHRHRGHKHHHRRRKDKESDKEDGRESPSYDTPSQRVQFILGTEDDDEEHIPHDLFTEMDELCYRDGEEYEWKETARWLKFEEDVEDGGDRWSKPYVATLSLHSLFELRSCILNGTVMLDMRASTLDEIADMVLDNMIASGQLDESIRENVREALLKRHHHQNEKRFTSRIPLVRSFADIGKKHSDPHLLERNGILASPQSAPGNLDNSKSGEIKGNGSGGSRENSTVDFSKVDMNFMRKIPTGAEASNVLVGEVDFLERPIIAFVRLAPAVLLTGLTEVPVPTRFLFLLLGPAGKAPQYHEIGRSIATLMTDEIFHDVAYKAKDRNDLLSGIDEFLDQVTVLPPGEWDPSIRIEPPKSVPSQEKRKIPVFHNGSTPTLGETPKEAAHHAGPELQRTGRLFGGLILDIKRKAPFFLSDFKDALSLQCLASILFLYCACMSPVITFGGLLGEATEGRISAIESLFGASLTGIAYSLFAGQPLTILGSTGPVLVFEKILYKFCRDYQLSYLSLRTSIGLWTSFLCIVLVATDASSLVCYITRFTEEAFAALICIIFIYEALEKLFDLGETYAFNMHNNLDKLTSYSCVCTEPPNPSNETLAQWKKDNITAHNISWRNLTVSECKKLRGVFLGSACGHHGPYIPDVLFWCVILFFTTFFLSSFLKQFKTKRYFPTKVRSTISDFAVFLTIVIMVTIDYLVGVPSPKLHVPEKFEPTHPERGWIISPLGDNPWWTLLIAAIPALLCTILIFMDQQITAVIINRKEHKLKKGAGYHLDLLMVGVMLGVCSVMGLPWFVAATVLSISHVNSLKVESECSAPGEQPKFLGIREQRVTGLMIFILMGLSVFMTSVLKFIPMPVLYGVFLYMGVSSLKGIQLFDRIKLFGMPAKHQPDLIYLRYVPLWKVHIFTVIQLTCLVLLWVIKVSAAAVVFPMMVLALVFVRKLMDLCFTKRELSWLDDLMPESKKKKEDDKKKKEKEEAERMLQDDDDTVHLPFEGGSLLQIPVKALKYSPDKPVSVKISFEDEPRKKYVDAETSL

SEQ ID NO: 10662 - protein, 1018 aa, Homo sapiens
MAVTQFIHFREEIMGNMFFIIIFSTKDKLCYRDGEEYEWKETARWLKFEEDVEDGGDRWSKPYVATLSLHSLFELRSCILNGTVMLDMRASTLDEIADMVLDNMIASGQLDESIRENVREALLKRHHHQNEKRFTSRIPLVRSFADIGKKHSDPHLLERNGILASPQSAPGNLDNSKSGEIKGNGSGGSRENSTVDFSKVDMNFMRKIPTGAEASNVLVGEVDFLERPIIAFVRLAPAVLLTGLTEVPVPTRFLFLLLGPAGKAPQYHEIGRSIATLMTDEIFHDVAYKAKDRNDLLSGIDEFLDQVTVLPPGEWDPSIRIEPPKSVPSQEKRKIPVFHNGSTPTLGETPKEAAHHAGPELQRTGRLFGGLILDIKRKAPFFLSDFKDALSLQCLASILFLYCACMSPVITFGGLLGEATEGRISAIESLFGASLTGIAYSLFAGQPLTILGSTGPVLVFEKILYKFCRDYQLSYLSLRTSIGLWTSFLCIVLVATDASSLVCYITRFTEEAFAALICIIFIYEALEKLFDLGETYAFNMHNNLDKLTSYSCVCTEPPNPSNETLAQWKKDNITAHNISWRNLTVSECKKLRGVFLGSACGHHGPYIPDVLFWCVILFFTTFFLSSFLKQFKTKRYFPTKVRSTISDFAVFLTIVIMVTIDYLVGVPSPKLHVPEKFEPTHPERGWIISPLGDNPWWTLLIAAIPALLCTILIFMDQQITAVIINRKEHKLKKGAGYHLDLLMVGVMLGVCSVMGLPWFVAATVLSISHVNSLKVESECSAPGEQPKFLGIREQRVTGLMIFILMGLSVFMTSVLKFIPMPVLYGVFLYMGVSSLKGIQLFDRIKLFGMPAKHQPDLIYLRYVPLWKVHIFTVIQLTCLVLLWVIKVSAAAVVFPMMVLALVFVRKLMDLCFTKRELSWLDDLMPESKKKKEDDKKKKEKEEAERMLQDDDDTVHLPFEGGSLLQIPVKALKYSGDPSIGNISDEMAKTAQWKALSMNTENAKVTRSNMSPDKPVSVK

SEQ ID NO: 10663 - protein, 1214 aa, Homo sapiens
MERFRLEKKLPGPDEEAVVDLGKTSSTVNTKFEKEELESHRAVYIGVHVPFSKESRRRHRHRGHKHHHRRRKDKESDKEDGRESPSYDTPSQRVQFILGTEDDDEEHIPHDLFTEMDELCYRDGEEYEWKETARWLKFEEDVEDGGDRWSKPYVATLSLHSLFELRSCILNGTVMLDMRASTLDEIADMVLDNMIASGQLDESIRENVREALLKRHHHQNEKRFTSRIPLVRSFADIGKKHSDPHLLERNGEGLSASRHSLRTGLSASNLSLRGESPLSLLLGHLLPSSRAGTPAGSRCTTPVPTPQNSPPSSPSISRLTSRSSQKSQRQAPELLVSPASDDIPTVVIHPPEEDLEAALKGEEQKNEENVDLTPGILASPQSAPGNLDNSKSGEIKGNGSGGSRENSTVDFSKVDMNFMRKIPTGAEASNVLVGEVDFLERPIIAFVRLAPAVLLTGLTEVPVPTRFLFLLLGPAGKAPQYHEIGRSIATLMTDEIFHDVAYKAKDRNDLLSGIDEFLDQVTVLPPGEWDPSIRIEPPKSVPSQEKRKIPVFHNGSTPTLGETPKEAAHHAGPELQRTGRLFGGLILDIKRKAPFFLSDFKDALSLQCLASILFLYCACMSPVITFGGLLGEATEGRISAIESLFGASLTGIAYSLFAGQPLTILGSTGPVLVFEKILYKFCRDYQLSYLSLRTSIGLWTSFLCIVLVATDASSLVCYITRFTEEAFAALICIIFIYEALEKLFDLGETYAFNMHNNLDKLTSYSCVCTEPPNPSNETLAQWKKDNITAHNISWRNLTVSECKKLRGVFLGSACGHHGPYIPDVLFWCVILFFTTFFLSSFLKQFKTKRYFPTKVRSTISDFAVFLTIVIMVTIDYLVGVPSPKLHVPEKFEPTHPERGWIISPLGDNPWWTLLIAAIPALLCTILIFMDQQITAVIINRKEHKLKKGAGYHLDLLMVGVMLGVCSVMGLPWFVAATVLSISHVNSLKVESECSAPGEQPKFLGIREQRVTGLMIFILMGLSVFMTSVLKFIPMPVLYGVFLYMGVSSLKGIQLFDRIKLFGMPAKHQPDLIYLRYVPLWKVHIFTVIQLTCLVLLWVIKVSAAAVVFPMMVLALVFVRKLMDLCFTKRELSWLDDLMPESKKKKEDDKKKKEKEEAERMLQDDDDTVHLPFEGGSLLQIPVKALKYSPDKPVSVKISFEDEPRKKYVDAETSL

SEQ ID NO: 10664 - protein, 343 aa, Homo sapiens
MWSHLNRLLFWSIFSSVTCRKAVLDCEAMKTNEFPSPCLDSKTKVVMKGQNVSMFCSHKNKSLQITYSLFRRKTHLGTQDGKGEPAIFNLSITEAHESGPYKCKAQVTSCSKYSRDFSFTIVDPVTSPVLNIMVIQTETDRHITLHCLSVNGSLPINYTFFENHVAISPAISKYDREPAEFNLTKKNPGEEEEYRCEAKNRLPNYATYSHPVTMPSTGGDSCPFCLKLLLPGLLLLLVVIILILAFWVLPKYKTRKAMRNNVPRDRGDTAMEVGIYANILEKQAKEESVPEVGSRPCVSTAQDEAKHSQELQYATPVFQEVAPREQEACDSYKSGYVYSELNF

SEQ ID NO: 10665 - protein, 348 aa, Homo sapiens
MGLAEFNPQENGSLPPGDAAASAPLGGRAGPGGGAEIQPLPPLHPGGGPHPSCCSAAAAPSLLLLDYDGSVLPFLGGLGGGYQKTLVLLTWIPALFIGFSQFSDSFLLDQPNFWCRGAGKGTELAGVTTTGRGGDMGNWTSLPTTPFATAPWEAAGNRSNSSGADGGDTPPLPSPPDKGDNASNCDCRAWDYGIRAGLVQNVVSKWDLVCDNAWKVHIAKFSLLVGLIFGYLITGCIADWVGRRPVLLFSIIFILIFGLTVALSVNVTMFSTLRFFEGFCLAGIILTLYALRIELCPPGKRFMITMVASFVAMAGQFLMPGLAALCRDWQVLQALIICPFLLMLLYWS

SEQ ID NO: 10666 - protein, 613 aa, Homo sapiens
MGALRPTLLPPSLPLLLLLMLGMGCWAREVLVPEGPLYRVAGTAVSISCNVTGYEGPAQQNFEWFLYRPEAPDTALGIVSTKDTQFSYAVFKSRVVAGEVQVQRLQGDAVVLKIARLQAQDAGIYECHTPSTDTRYLGSYSGKVELRVLPDVLQVSAAPPGPRGRQAPTSPPRMTVHEGQELALGCLARTSTQKHTHLAVSFGRSVPEAPVGRSTLQEVVGIRSDLAVEAGAPYAERLAAGELRLGKEGTDRYRMVVGGAQAGDAGTYHCTAAEWIQDPDGSWAQIAEKRAVLAHVDVQTLSSQLAVTVGPGERRIGPGEPLELLCNVSGALPPAGRHAAYSVGWEMAPAGAPGPGRLVAQLDTEGVGSLGPGYEGRHIAMEKVASRTYRLRLEAARPGDAGTYRCLAKAYVRGSGTRLREAASARSRPLPVHVREEGVVLEAVAWLAGGTVYRGETASLLCNISVRGGPPGLRLAASWWVERPEDGELSSVPAQLVGGVGQDGVAELGVRPGGGPVSVELVGPRSHRLRLHSLGPEDEGVYHCAPSAWVQHADYSWYQAGSARSGPVTVYPYMHALDTLFVPLLVGTGVALVTGATVLGTITCCFMKRLRKR

SEQ ID NO: 10667 - protein, 530 aa, Homo sapiens
MGALRPTLLPPSLPLLLLLMLGMGCWAREVLVPEGPLYRVAGTAVSISCNVTGYEGPAQQNFEWFLYRPEAPDTALGIVSTKDTQFSYAVFKSRVVAGEVQVQRLQGDAVVLKIARLQAQDAGIYECHTPSTDTRYLGSYSGKVELRVLPDVLQVSAAPPGPRGRQAPTSPPRMTVHEGQELALGCLARTSTQKHTHLAVSFGRSVPEAPVGRSTLQEVVGIRSDLAVEAGAPYAERLAAGELRLGKEGTDRYRMVVGGAQAGDAGTYHCTAAEWIQDPDGSWAQIAEKRAVLAHVDVQTLSSQLAVTVGPGERRIGPGEPLELLCNVSGALPPAGRHAAYSVGWEMAPAGAPGPGRLVAQLDTEGVGSLGPGYEGRHIAMEKVASRTYRLRLEAARPGDAGTYRCLAKAYVRGSGTRLREAASARSRPLPVHVREEGVVLEAVAWLAGGTVYRGETASLLCNISVRGGPPGLRLAASCARSGPVTVYPYMHALDTLFVPLLVGTGVALVTGATVLGTITCCFMKRLRKR

SEQ ID NO: 10668 - protein, 943 aa, Homo sapiens
TVKEFRALGTCYLDQFEASLIYWTNWQQKMKSSVAQIKPSSGHDRRENLNSYQRNSSPEDRYEEQERSPRDRDYFDYSRSDYEHSRRGRSYDSSMESRNRDREKRRERERDTDRKRSRKSPSPGRRNPETSVTQSSSAQDEPATKKKKDELDPLLTRTGGAYIPPAKLRMMQEQITDKNRHVYINHLAYQRMSWEALKKSINGLINKVNISNISIIIQELLQENIVRGRGLLSRSVLQAQSASPIFTHVYAALVAIINSKFPQIGELILKRLILNFRKGYRRNDKQLCLTASKFVAHLINQNVAHEVLCLEMLTLLLERPTDDSVEVAIGFLKECGLKLTQVSPRGINAIFERLRNILHESEIDKRVQYMIEVMFAVRKDGFKDHPIILEGLDLVEEDDQFTHMLPLEDDYNPEDVLNVFKMDPNFMENEEKYKAIKKEILDEGDTDSNTDQDAGSSEEDEEEEEEEGEEDEEGQKVTIHDKTEINLVSFRRTIYLAIQSSLDFEECAHKLLKMEFPESQTKELCNMILDCCAQQRTYEKFFGLLAGRFCMLKKEYMESFEGIFKEQYDTIHRLETNKLRNVAKMFAHLLYTDSLPWSVLECIKLSEETTTSSSRIFVKIFFQELCEYMGLPKLNARLKDETLQPFFEGLLPRDNPRNTRFAINFFTSIGLGGLTDELREHLKNTPKVIVAQKPDVEQNKSSPSSSSSASSSSESDSSDSDSDSSDSSSESSSEESDSSSISSHSSASANDVRKKGHGKTRSKEVDKLIRNQQTNDRKQKERRQEHGHQETRTERERRSEKHRDQNSSGSNWRDPITKYTSDKDVPSERNNYSRVANDRDQEMHIDLENKHGDPKKKRGERRNSFSENEKHTHRIKDSENFRRKDRSKSKEMNRKHSGSRSDEDRYQNGAERRWEKSSRYSEQSRESKKNQDRRREKSPAKQK

SEQ ID NO: 10669 - protein, 1172 aa, Homo sapiens
MVWRLVLLALWVWPSTQAGHQDKDTTFDLFSISNINRKTIGAKQFRGPDPGVPAYRFVRFDYIPPVNADDLSKITKIMRQKEGFFLTAQLKQDGKSRGTLLALEGPGLSQRQFEIVSNGPADTLDLTYWIDGTRHVVSLEDVGLADSQWKNVTVQVAGETYSLHVGCDLIGPVALDEPFYEHLQAEKSRMYVAKGSARESHFRGLLQNVHLVFENSVEDILSKKGCQQGQGAEINAISENTETLRLGPHVTTEYVGPSSERRPEVCERSCEELGNMVQELSGLHVLVNQLSENLKRVSNDNQFLWELIGGPPKTRNMSACWQDGRFFAENETWVVDSCTTCTCKKFKTICHQITCPPATCASPSFVEGECCPSCLHSVDGEEGWSPWAEWTQCSVTCGSGTQQRGRSCDVTSNTCLGPSIQTRACSLSKCDTRIRQDGGWSHWSPWSSCSVTCGVGNITRIRLCNSPVPQMGGKNCKGSGRETKACQGAPCPIDGRWSPWSPWSACTVTCAGGIRERTRVCNSPEPQYGGKACVGDVQERQMCNKRSCPVDGCLSNPCFPGAQCSSFPDGSWSCGFCPVGFLGNGTHCEDLDECALVPDICFSTSKVPRCVNTQPGFHCLPCPPRYRGNQPVGVGLEAAKTEKQVCEPENPCKDKTHNCHKHAECIYLGHFSDPMYKCECQTGYAGDGLICGEDSDLDGWPNLNLVCATNATYHCIKDNCPHLPNSGQEDFDKDGIGDACDDDDDNDGVTDEKDNCQLLFNPRQADYDKDEVGDRCDNCPYVHNPAQIDTDNNGEGDACSVDIDGDDVFNERDNCPYVYNTDQRDTDGDGVGDHCDNCPLVHNPDQTDVDNDLVGDQCDNNEDIDDDGHQNNQDNCPYISNANQADHDRDGQGDACDPDDDNDGVPDDRDNCRLVFNPDQEDLDGDGRGDICKDDFDNDNIPDIDDVCPENNAISETDFRNFQMVPLDPKGTTQIDPNWVIRHQGKELVQTANSDPGIAVGFDEFGSVDFSGTFYVNTDRDDDYAGFVFGYQSSSRFYVVMWKQVTQTYWEDQPTRAYGYSGVSLKVVNSTTGTGEHLRNALWHTGNTPGQVRTLWHDPRNIGWKDYTAYRWHLTHRPKTGYIRVLVHEGKQVMADSGPIYDQTYAGGRLGLFVFSQEMVYFSDLKYECRDI

SEQ ID NO: 10670 - protein, 631 aa, Homo sapiens
MAPPGSSTVFLLALTIIASTWALTPTHYLTKHDVERLKASLDRPFTNLESAFYSIVGLSSLGAQVPDAKKACTYIRSNLDPSNVDSLFYAAQASQALSGCEISISNETKDLLLAAVSEDSSVTQIYHAVAALSGFGLPLASQEALSALTARLSKEETVLATVQALQTASHLSQQADLRSIVEEIEDLVARLDELGGVYLQFEEGLETTALFVAATYKLMDHVGTEPSIKEDQVIQLMNAIFSKKNFESLSEAFSVASAAAVLSHNRYHVPVVVVPEGSASDTHEQAILRLQVTNVLSQPLTQATVKLEHAKSVASRATVLQKTSFTPVGDVFELNFMNVKFSSGYYDFLVEVEGDNRYIANTVELRVKISTEVGITNVDLSTVDKDQSIAPKTTRVTYPAKAKGTFIADSHQNFALFFQLVDVNTGAELTPHQTFVRLHNQKTGQEVVFVAEPDNKNVYKFELDTSERKIEFDSASGTYTLYLIIGDATLKNPILWNVADVVIKFPEEEAPSTVLSQNLFTPKQEIQHLFREPEKRPPTVVSNTFTALILSPLLLLFALWIRIGANVSNFTFAPSTIIFHLGHAAMLGLMYVYWTQLNMFQTLKYLAILGSVTFLAGNRMLAQQAVKRTAH

SEQ ID NO: 10671 - protein, 284 aa, Homo sapiens
ALTPTHYLTKHDVERLKASLDRPFTNLESAFYSIVGLSSLGAQVPDAKKACTYIRSNLDPSNVDSLFYAAQASQALSGCEISISNETKDLLLAAVSEDSSVTQIYHAVAALSGFGLPLASQEALSALTARLSKEETVLARVWSTVLESRSLFSKRTVQALQTASHLSQQADLRSIVEEIEDLVARLDELGGVYLQFEEGLETTALFVAATYKLMDHVGTEPSIKEDQVIQLMNAIFSKKNFESLSEAFSVASAAAVLSHNRYHVPVVVVPEGSASDTHEQAILR

SEQ ID NO: 10672 - protein, 1007 aa, Homo sapiens
MAAAETQSLREQPEMEDANSEKSINEENGEVSEDQSQNKHSRHKKKKHKHRSKHKKHKHSSEEDKDKKHKHKHKHKKHKRKEVIDASDKEGMSPAKRTKLDDLALLEDLEKQRALIKAELDNELMEGKVQSGMGLILQGYESGSEEEGEIHEKARNGNRSSTRSSSTKGKLELVDNKITTKKRSKSRSKERTRHRSDKKKSKGGIEIVKEKTTRSKSKERKKSKSPSKRSKSQDQARKSKSPTLRRRSQEKIGKARSPTDDKVKIEDKSKSKDRKKSPIINESRSRDRGKKSRSPVDLRGKSKDRRSRSKERKSKRSETDKEKKPIKSPSKDASSGKENRSPSRRPGRSPKRRSLSPKPRDKSRRSRSPLLNDRRSKQSKSPSRTLSPGRRAKSRSLERKRREPERRRLSSPRTRPRDDILSRRERSKDASPINRWSPTRRRSRSPIRRRSRSPLRRSRSPRRRSRSPRRRDRGRRSRSRLRRRSRSRGGRRRRSRSKVKEDKFKGSLSEGMKVEQESSSDDNLEDFDVEEEDEEALIEQRRIQRQAIVQKYKYLAEDSNMSVPSEPSSPQSSTRTRSPSPDDILERVAADVKEYERENVDTFEASVKAKHNLMTVEQNNGSSQKKLLAPDMFTESDDMFAAYFDSARLRAAGIGKDFKENPNLRDNWTDAEGYYRVNIGEVLDKRYNVYGYTGQGVFSNVVRARDNARANQEVAVKIIRNNELMQKTGLKELEFLKKLNDADPDDKFHCLRLFRHFYHKQHLCLVFEPLSMNLREVLKKYGKDVGLHIKAVRSYSQQLFLALKLLKRCNILHADIKPDNILVNESKTILKLCDFGSASHVADNDITPYLVSRFYRAPEIIIGKSYDYGIDMWSVGCTLYELYTGKILFPGKTNNHMLKLAMDLKGKMPNKMIRKGVFKDQHFDQNLNFMYIEVDKVTEREKVTVMSTINPTKDLLADLIGCQRLPEDQRKKVHQLKDLLDQILMLDPAKRISINQALQHAFIQEKI

SEQ ID NO: 10673 - protein, 188 aa, Homo sapiens
SIPSSPCLLPKKKNKHRNLDELPWSAMTNDEQVEYIEYLSRKVSTEMGLREQLDIIKIIDPSAQISPTDSEFIIELNCLTDEKLKQVRNYIKEHSPRQRPAREAWKRSNFSCASTSGVSGASASASSSSASMKRSKQRKLQQKAFRKRQLKEQRQARKERLSGLFLNEEVLSLKVTEEDHEADVDVLM

SEQ ID NO: 10674 - protein, 443 aa, Homo sapiens
APRQAAAGRDAQPASELRRAHPGASATADRLEWGQGRAREQPRAREGARARPSPTMSDEASAITSYEKFLTPEEPFPLLGPPRGVGTCPSEEPGCLDISDFGCQLSSCHRTDPLHRFHTNRWNLTSCGTSVASSEGSEELFSSVSVGDQDDCYSLLDDQDFTSFDLFPEGSVCSDVSSSISTYWDWSDSEFEWQLPGSDIASGSDVLSDVIPSIPSSPCLLPKKKNKHRNLDELPWSAMTNDEQVEYIEYLSRKVSTEMGLREQLDIIKIIDPSAQISPTDSEFIIELNCLTDEKLKQVRNYIKEHSPRQRPAREAWKRSNFSCASTSGVSGASASASSSSASMVSSASSSGSSVGNSASNSSANMSRAHSDSNLSASAAERIRDSKKRSKQRKLQQKAFRKRQLKEQRQARKERLSGLFLNEEVLSLKVTEEDHEADVDVLM

SEQ ID NO: 10675 - protein, 314 aa, Homo sapiens
MYKMEYSYLNSSAYESCMAGMDTSSLASAYADFSSCSQASGFQYNPIRTTFGATSGCPSLTPGSCSLGTLRDHQSSPYAAVPYKLFTDHGGLNEKRKQRRIRTTFTSAQLKELERVFAETHYPDIYTREELALKIDLTEARVQVWFQNRRAKFRKQERAAAAAAAAAKNGSSGKKSDSSRDDESKEAKSTDPDSTGGPGPNPNPTPSCGANGGGGGGPSPAGAPGAAGPGGPGGEPGKGGAAAAAAAAAAAAAAAAAAAAGGLAAAGGPGQGWAPGPGPITSIPDSLGGPFGSVLSSLQRPNGAKAALVKSSMF

SEQ ID NO: 10676 - protein, 382 aa, Homo sapiens
MSGAGVAAGTRPPSSPTPGSRRRRQRPSVGVQSLRPQSPQLRQSDPQKRNLDLEKSLQFLQQQHSEMLAKLHEEIEHLKRENKDLHYKLIMNQTSQKKDGPSGNHLSRASAPLGARWVCINGVWVEPGGPSPARLKEGSSRTHRPGGKRGRLAGGSADTVRSPADSLSMSSFQSVKSISNSANSQGKARPQPGSFNKQDSKADVSQKADLEEEPLLHNSKLDKVPGVQGQARKEKAEASNAGAACMGNSQHQGRQMGAGAHPPMILPLPLRKPTTLRQCEVLIRELWNTNLLQTQELRHLKSLLEGSQRPQAAPEEASFPRDQEATHFPKVSTKSLSKKCLSPPVAERAILPALKQTPKNNFAERQKRLQAMQKRRLHRSVL

SEQ ID NO: 10677 - protein, 380 aa, Homo sapiens
MSGAGVAAGTRPPSSPTPGSRRRRQRPSVGVQSLRPQSPQLRQSDPQKRNLDLEKSLQFLQQQHSEMLAKLHEEIEHLKRENKDLRYKLIMNQTSQKKDGPSGNHLSRASAPLGARWVCINGVWVEPGGPSPARLKEGSSRTHRPGGKHGRLAGGSADTVRSPADSLSTSSFQSVKSISNSGKARPQPGSFNKQDSKADVPQKADLEEEPLLHNSKLDKVPGVQGQARKEKAEASNAGAACMGNSQHQGRQMGAAAHPPMILPLPLRKPTTLRQCEVLIRELWNTNLLQTQELQHLKSLLEGSQRPQAVPEEASFPRDQEATHFPKVSTKSLSKKCLLLSPPVAERAILPALKQTPKNNFAERQKRLQAMQKRRLHRSVL

SEQ ID NO: 10678 - protein, 636 aa, Homo sapiens
MKKLQGAHLRKPVTPDLLMTPSDQGDVDLDVDFAAHRGNWTGKLDFLLSCIGYCVGLGNVWRFPYRAYTNGGGAFLVPYFLMLAICGIPLFFLELSLGQFSSLGPLAVWKISPLFKGAGAAMLLIVGLVAIYYNMIIAYVLFYLFASLTSDLPWEHCGNWWNTELCLEHRVSKDGNGALPLNLTCTVSPSEEYWSRYVLHIQGSQGIGSPGEIRWNLCLCLLLAWVIVFLCILKGVKSSGKVVYFTATFPYLILLMLLVRGVTLPGAWKGIQFYLTPQFHHLLSSKVWIEAALQIFYSLGVGFGGLLTFASYNTFHQNIYRDTFIVTLGNAITSILAGFAIFSVLGYMSQELGVPVDQVAKAGPGLAFVVYPQAMTMLPLSPFWSFLFFFMLLTLGLDSQFAFLETIVTAVTDEFPYYLRPKKAVFSGLICVAMYLMGLILTTDGGMYWLVLLDDYSASFGLMVVVITTCLAVTRVYGIQRFCRDIHMMLGFKPGLYFRACWLFLSPATLLALLVYSIVKYQPSEYGSYRFPPWAELLGILMGLLSCLMIPAGMLVAVLREEGSLWERLQQASRPAMDWGPSLEENRTGMYVATLAGSQSPKPLMVHMRKYGGITSFENTAIEVDREIAEEEESMM

SEQ ID NO: 10679 - protein, 539 aa, Homo sapiens
MDGEAVRFCTDNQCVSPHPQEVDSVAMAPAAPKIPRLVQATPAFMAVTLVFSLVTLFVVVQQQTRPVPKPVQAVILGDNITGHLPFEPNNHHHFGREAEMRELIQTFKGHMENSSAWVVEIQMLKCRVDNVNSQLQVLGDHLGNTNADIQMVKGVLKDATTLSLQTQMLRSSLEGTNAEIQRLKEDLEKADALTFQTLNFLKSSLENTSIELHVLSRGLENANSEIQMLNASLETANTQAQLANSSLKNANAEIYVLRGHLDSVNDLRTQNQVLRNSLEGANAEIQGLKENLQNTNALNSQTQAFIKSSFDNTSAEIQFLRGHLERAGDEIHVLKRDLKMVTAQTQKANGRLDQTDTQIQVFKSEMENVNTLNAQIQVLNGHMKNASREIQTLKQGMKNASALTSQTQMLDSNLQKASAEIQRLRGDLENTKALTMEIQQEQSRLKTLHVVITSQEQLQRTQSQLLQMVLQGWKFNGGSLYYFSSVKKSWHEAEQFCVSQGAHLASVASKEEQAFLVEFTSKVYYWIGLTDRGTEGSWR

SEQ ID NO: 10680 - protein, 582 aa, Homo sapiens
MESVKQRILAPGKEGLKNFAGKSLGQIYRVLEKKQDTGETIELTEDGKPLEVPERKAPLCDCTCFGLPRRYIIAIMSGLGFCISFGIRCNLGVAIVDMVNNSTIHRGGKVIKEKAKFNWDPETVGMIHGSFFWGYIITQIPGGYIASRLAANRVFGAAILLTSTLNMLIPSAARVHYGCVIFVRILQGLVEGVTYPACHGIWSKWAPPLERSRLATTSFCGSYAGAVIAMPLAGILVQYTGWSSVFYVYGSFGMVWYMFWLLVSYESPAKHPTITDEERRYIEESIGESANLLGAMEKFKTPWRKFFTSMPVYAIIVANFCRSWTFYLLLISQPAYFEEVFGFEISKVGMLSAVPHLVMTIIVPIGGQIADFLRSKQILSTTTVRKIMNCGGFGMEATLLLVVGYSHTRGVAISFLVLAVGFSGFAISGFNVNHLDIAPRYASILMGISNGVGTLSGMVCPIIVGAMTKNKSREEWQYVFLIAALVHYGGVIFYAIFASGEKQPWADPEETSEEKCGFIHEDELDEETGDITQNYINYGTTKSYGATTQANGGWPSGWEKKEEFVQGEVQDSHSYKDRVDYS

SEQ ID NO: 10681 - protein, 695 aa, Homo sapiens
MAATGTAAAAATGRLLLLLLVGLTAPALALAGYIEALAANAGTGFAVAEPQIAMFCGKLNMHVNIQTGKWEPDPTGTKSCFETKEEVLQYCQEMYPELQITNVMEANQRVSIDNWCRRDKKQCKSRFVTPFKCLVGEFVSDVLLVPEKCQFFHKERMEVCENHQHWHTVVKEACLTQGMTLYSYGMLLPCGVDQFHGTEYVCCPQTKIIGSVSKEEEEEDEEEEEEEDEEEDYDVYKSEFPTEADLEDFTEAAVDEDDEDEEEGEEVVEDRDYYYDTFKGDDYNEENPTEPGSDGTMSDKEITHDVKVPPTPLPTNDVDVYFETSADDNEHARFQKAKEQLEIRHRNRMDRVKKEWEEAELQAKNLPKAERQTLIQHFQAMVKALEKEAASEKQQLVETHLARVEAMLNDRRRMALENYLAALQSDPPRPHRILQALRRYVRAENKDRLHTIRHYQHVLAVDPEKAAQMKSQVMTHLHVIEERRNQSLSLLYKVPYVAQEIQEEIDELLQEQRADMDQFTASISETPVDVRVSSEESEEIPPFHPFHPFPALPENEGSGVGEQDGGLIGAEEKVINSKNKVDENMVIDETLDVKEMIFNAERVGGLEEERESVGPLREDFSLSSSALIGLLVIAVAIATVIVISLVMLRKRQYGTISHGIVEVDPMLTPEERHLNKMQNHGYENPTYKYLEQMQI

SEQ ID NO: 10682 - protein, 763 aa, Homo sapiens
MAATGTAAAAATGRLLLLLLVGLTAPALALAGYIEALAANAGTGFAVAEPQIAMFCGKLNMHVNIQTGKWEPDPTGTKSCFETKEEVLQYCQEMYPELQITNVMEANQRVSIDNWCRRDKKQCKSRFVTPFKCLVGEFVSDVLLVPEKCQFFHKERMEVCENHQHWHTVVKEACLTQGMTLYSYGMLLPCGVDQFHGTEYVCCPQTKIIGSVSKEEEEEDEEEEEEEDEEEDYDVYKSEFPTEADLEDFTEAAVDEDDEDEEEGEEVVEDRDYYYDTFKGDDYNEENPTEPGSDGTMSDKEITHDVKAVCSQEAMTGPCRAVMPRWYFDLSKGKCVRFIYGGCGGNRNNFESEDYCMAVCKAMIPPTPLPTNDVDVYFETSADDNEHARFQKAKEQLEIRHRNRMDRVKKEWEEAELQAKNLPKAERQTLIQHFQAMVKALEKEAASEKQQLVETHLARVEAMLNDRRRMALENYLAALQSDPPRPHRILQALRRYVRAENKDRLHTIRHYQHVLAVDPEKAAQMKSQVMTHLHVIEERRNQSLSLLYKVPYVAQEIQEEIDELLQEQRADMDQFTASISETPVDVRVSSEESEEIPPFHPFHPFPALPENEDTQPELYHPMKKGSGVGEQDGGLIGAEEKVINSKNKVDENMVIDETLDVKEMIFNAERVGGLEEERESVGPLREDFSLSSSALIGLLVIAVAIATVIVISLVMLRKRQYGTISHGIVEVDPMLTPEERHLNKMQNHGYENPTYKYLEQMQI

SEQ ID NO: 10683 - protein, 751 aa, Homo sapiens
MAATGTAAAAATGRLLLLLLVGLTAPALALAGYIEALAANAGTGFAVAEPQIAMFCGKLNMHVNIQTGKWEPDPTGTKSCFETKEEVLQYCQEMYPELQITNVMEANQRVSIDNWCRRDKKQCKSRFVTPFKCLVGEFVSDVLLVPEKCQFFHKERMEVCENHQHWHTVVKEACLTQGMTLYSYGMLLPCGVDQFHGTEYVCCPQTKIIGSVSKEEEEEDEEEEEEEDEEEDYDVYKSEFPTEADLEDFTEAAVDEDDEDEEEGEEVVEDRDYYYDTFKGDDYNEENPTEPGSDGTMSDKEITHDVKAVCSQEAMTGPCRAVMPRWYFDLSKGKCVRFIYGGCGGNRNNFESEDYCMAVCKAMIPPTPLPTNDVDVYFETSADDNEHARFQKAKEQLEIRHRNRMDRVKKEWEEAELQAKNLPKAERQTLIQHFQAMVKALEKEAASEKQQLVETHLARVEAMLNDRRRMALENYLAALQSDPPRPHRILQALRRYVRAENKDRLHTIRHYQHVLAVDPEKAAQMKSQVMTHLHVIEERRNQSLSLLYKVPYVAQEIQEEIDELLQEQRADMDQFTASISETPVDVRVSSEESEEIPPFHPFHPFPALPENEGSGVGEQDGGLIGAEEKVINSKNKVDENMVIDETLDVKEMIFNAERVGGLEEERESVGPLREDFSLSSSALIGLLVIAVAIATVIVISLVMLRKRQYGTISHGIVEVDPMLTPEERHLNKMQNHGYENPTYKYLEQMQI

SEQ ID NO: 10684 - protein, 707 aa, Homo sapiens
MAATGTAAAAATGRLLLLLLVGLTAPALALAGYIEALAANAGTGFAVAEPQIAMFCGKLNMHVNIQTGKWEPDPTGTKSCFETKEEVLQYCQEMYPELQITNVMEANQRVSIDNWCRRDKKQCKSRFVTPFKCLVGEFVSDVLLVPEKCQFFHKERMEVCENHQHWHTVVKEACLTQGMTLYSYGMLLPCGVDQFHGTEYVCCPQTKIIGSVSKEEEEEDEEEEEEEDEEEDYDVYKSEFPTEADLEDFTEAAVDEDDEDEEEGEEVVEDRDYYYDTFKGDDYNEENPTEPGSDGTMSDKEITHDVKIPPTPLPTNDVDVYFETSADDNEHARFQKAKEQLEIRHRNRMDRVKKEWEEAELQAKNLPKAERQTLIQHFQAMVKALEKEAASEKQQLVETHLARVEAMLNDRRRMALENYLAALQSDPPRPHRILQALRRYVRAENKDRLHTIRHYQHVLAVDPEKAAQMKSQVMTHLHVIEERRNQSLSLLYKVPYVAQEIQEEIDELLQEQRADMDQFTASISETPVDVRVSSEESEEIPPFHPFHPFPALPENEDTQPELYHPMKKGSGVGEQDGGLIGAEEKVINSKNKVDENMVIDETLDVKEMIFNAERVGGLEEERESVGPLREDFSLSSSALIGLLVIAVAIATVIVISLVMLRKRQYGTISHGIVEVDPMLTPEERHLNKMQNHGYENPTYKYLEQMQI

SEQ ID NO: 10685 - protein, 477 aa, Homo sapiens
IISERRERSCLHLVCIRCSCDVVEMGSVLGLCSMASWIPCLCGSAPCLLCRCCPSGNNSTVTRLIYALFLLVGVCVACVMLIPGMEEQLNKIPGFCENEKGVVPCNILVGYKAVYRLCFGLAMFYLLLSLLMIKVKSSSDPRAAVHNGFWFFKFAAAIAIIIGAFFIPEGTFTTVWFYVGMAGAFCFILIQLVLLIDFAHSWNESWVEKMEEGNSRCWYAALLSATALNYLLSLVAIVLFFVYYTHPASCSENKAFISVNMLLCVGASVMSILPKIQESQPRSGLLQSSVITVYTMYLTWSAMTNEPETNCNPSLLSIIGYNTTSTVPKEGQSVQWWHAQGIIGLILFLLCVFYSSIRTSNNSQVNKLTLTSDESTLIEDGGARSDGSLEDGDDVHRAVDNERDGVTYSYSFFHFMLFLASLYIMMTLTNWYRYEPSREMKSQWTAVWVKISSSWIGIVLYVWTLVAPLVLTNRDFD

SEQ ID NO: 10686 - protein, 918 aa, Homo sapiens
MASLSRALRVAAAHPRQSPTRGMGPCNLSSAAGPTAEKSVPYQRTLKEGQGTSVVAQGPSRPLPSTANVVVIGGGSLGCQTLYHLAKLGMSGAVLLERERLTSGTTWHTAGLLWQLRPSDVEVELLAHTRRVVSRELEEETGLHTGWIQNGGLFIASNRQRLDEYKRLMSLGKAYGVESHVLSPAETKTLYPLMNVDDLYGTLYVPHDGTMDPAGTCTTLARAASARGAQVIENCPVTGIRVWTDDFGVRRVAGVETQHGSIQTPCVVNCAGVWASAVGRMAGVKVPLVAMHHAYVVTERIEGIQNMPNVRDHDASVYLRLQGDALSVGGYEANPIFWEEVSDKFAFGLFDLDWEVFTQHIEGAINRVPVLEKTGIKSTVCGPESFTPDHKPLMGEAPELRGFFLGCGFNSAGMMLGGGCGQELAHWIIHGRPEKDMHGYDIRRFHHSLTDHPRWIRERSHESYAKNYSVVFPHDEPLAGRNMRRDPLHEELLGQGCVFQERHGWERPGWFHPRGPAPVLEYDYYGAYGSRAHEDYAYRRLLADEYTFAFPPHHDTIKKECLACRGAAAVFDMSYFGKFYLVGLDARKAADWLFSADVSRPPGSTVYTCMLNHRGGTESDLTVSRLAPSHQASPLAPAFEGDGYYLAMGGAVAQHNWSHITTVLQDQKSQCQLIDSSEDLGMISIQGPASRAILQEVLDADLSNEAFPFSTHKLLRAAGHLVRAMRLSFVGELGWELHIPKASCVPVYRAVMAAGAKHGLINAGYRAIDSLSIEKGYRHWHADLRPDDSPLEAGLAFTCKLKSPVPFLGREALEQQRAAGLRRRLVCFTMEDKVPMFGLEAIWRNGQVVGHVRRADFGFAIDKTIAYGYIHDPSGGPVSLDFVKSGDYALERMGVTYGAQAHLKSPFDPNNKRVKGIY

SEQ ID NO: 10687 - protein, 396 aa, Homo sapiens
MASLSRALRVAAAHPRQSPTRGMGPCNLSSAAGPTAEKSVPYQRTLKEGQGTSVVAQGPSRPLPSTANVVVIGGGSLGCQTLYHLAKLGMSGAVLLERERLTSGTTWHTAGLLWQLRPSDVEVELLAHTRRVVSRELEEETGLHTGWIQNGGLFIASNRQRLDEYKRLMSLGKAYGVESHVLSPAETKTLYPLMNVDDLYGTLYVPHDGTMDPAGTCTTLARAASARGAQVIENCPVTGIRVWTDDFGVRRVAGVETQHGSIQTPCVVNCAGVWASAVGRMAGVKVPLVAMHHAYVVTERIEGIQSFTLLPTLEYSGTVSAHCNLRLPGSSNSRASASHVAGIKCARHHTRLIFFCILVETEFHHVAKAGLELLSSGNPPISDFQSARITGVSHHA

SEQ ID NO: 10688 - protein, 550 aa, Homo sapiens
MLAFAARTVVKPLGFLKPFSLMKASSRFKAHQDALPRLPVPPLQQSLDHYLKALQPIVSEEEWAHTKQLVDEFQASGGVGERLQKGLERRARKTENWLSEWWLKTAYLQYRQPVVIYSSPGVMLPKQDFVDLQGQLRFAAKLIEGVLDFKVMIDNETLPVEYLGGKPLCMNQYYQILSSCRVPGPKQDTVSNFSKTKKPPTHITVVHNYQFFELDVYHSDGTPLTADQIFVQLEKIWNSSLQTNKEPVGILTSNHRNSWAKAYNTLIKDKVNRDSVRSIQKSIFTVKKPELVRSPLVPLPMPKKLRFNITPEIKSDIEKAKQNLSIMIQDLDITVMVFHHFGKDFPKSEKLSPDAFIQMALQLAYYRIYGQACATYESASLRMFHLGRTDTIRSASMDSLTFVKAMDDSSVTEHQKVELLRKAVQAHRGYTDRAIRGEAFDRHLLGLKLQAIEDLVSMPDIFMDTSYAIAMHFHLSTSQVPAKTDCVMFFGPVVPDGYGVCYNPMEAHINFSLSAYNSCAETNAARLAHYLEKALLDMRALLQSHPRAKL

SEQ ID NO: 10689 - protein, 605 aa, Homo sapiens
MKASSRFKAHQDALPRLPVPPLQQSLDHYLKALQPIVSEEEWAHTKQLVDEFQASGGVGERLQKGLGRRARKTENWLSEWWLKTAYLQYRQPVVIYSSPGVMLPKQDFVDLQGQLRFAAKLIEGVLDFKVMIDNETLPVEYLGGKPLCMNQYYQILSSCRVPGPKQDTVSNFSKTKKPPTHITVVHNYQFFELDVYHSDGTPLTADQIFVQLEKIWNSSLQTNKEPVGILTSNHRNSWAKAYNTLIKDKVNRDSVRSIQKSIFTVCLDATMPRVSEDVYRSHVAGQMLHGGGSRLNSGNRWFDKTLQFIVAEDGSCGLVYEHAAAEGFPIVTLLDYVIEYTKKPELVRSPMVPLPMPKKLRFNITPEIKSDIEKAKQNLSIMIQDLDITVMVFHHFGKDFPKSEKLSPDAFIQMALQLAYYRIYGQACATYESASLRMFHLGRTDTIRSASMDSLTFVKAMDDSSVTEHQKVELLRKAVQAHRGYTDRAIRGEAFGRHLLGLKLQAIEDLVSTPDIFMDTSYAIAMHFHLSTSQVPAKTDCVMFFGPVVPDGYGVCYNPMEAHINFSLSAYNSCAETNAARLAHYLEKALLDMRALLQSHPRAKL

SEQ ID NO: 10690 - protein, 626 aa, Homo sapiens
MLAFAARTVVKPLGFLKPFSLMKASSRFKAHQDALPRLPVPPLQQSLDHYLKALQPIVSEEEWAHTKQLVDEFQASGGVGERLQKGLGRRARKTENWLSEWWLKTAYLQYRQPVVIYSSPGVMLPKQDFVDLQGQLRFAAKLIEGVLDFKVMIDNETLPVEYLGGKPLCMNQYYQILSSCRVPGPKQDTVSNFSKTKKPPTHITVVHNYQFFELDVYHSDGTPLTADQIFVQLEKIWNSSLQTNKEPVGILTSNHRNSWAKAYNTLIKDKVNRDSVRSIQKSIFTVCLDATMPRVSEDVYRSHVAGQMLHGGGSRLNSGNRWFDKTLQFIVAEDGSCGLVYEHAAAEGFPIVTLLDYVIEYTKKPELVRSPMVPLPMPKKLRFNITPEIKSDIEKAKQNLSIMIQDLDITVMVFHHFGKDFPKSEKLSPDAFIQMALQLAYYRIYGQACATYESASLRMFHLGRTDTIRSASMDSLTFVKAMDDSSVTEHQKVELLRKAVQAHRGYTDRAIRGEAFGRHLLGLKLQAIEDLVSTPDIFMDTSYAIAMHFHLSTSQVPAKTDCVMFFGPVVPDGYGVCYNPMEAHINFSLSAYNSCAETNAARLAHYLEKALLDMRALLQSHPRAKL

SEQ ID NO: 10691 - protein, 469 aa, Homo sapiens
MMSEHDLADVVQIAVEDLSPDHPVVLENHVVTDEDEPALKRQRLEINCQDPSIKSFLYSINQTICLRLDSIEAKLQALEATCKSLEEKLDLVTNKQHSPIQVPMVAGSPLGATQTCNKVRCAVPGRRQNTIVVKVPGQEDSHHEDGESGSEASDSVSSCGQAGSQSIGSNVTLITLNSEEDYPNGTWLGDENNPEMRVRCAIIPSDMLHISTNCRTAEKMALTLLDYLFHREVQAVSNLSGQGKHGKKQLDPLTIYGIRCHLFYKFGITESDWYRIKQSIDSKCRTAWRRKQRGQSLAVKSFSRRTPNSSSYCPSEPMMSTPPPASELPQPQPQPQALHYALANAQQVQIHQIGEDGQVQVIPQGHLHIAQVPQGEQVQITQDSEGNLQIHHVGQDGQVLQGAQLIAVASSDPAAAGVDGSPLQGSDIQVQYVQLAPVSDHTAGAQTAEALQPTLQPEMQLEHGAIQIQ

SEQ ID NO: 10692 - protein, 466 aa, Homo sapiens
MMSEHDLADVVQIAVEDLSPDHPVVLENHVVTDEDEPALKRQRLEINCQDPSIKSFLYSINQTICLRLDSIEAKLQALEATCKSLEEKLDLVTNKQHSPIQVPMVAGSPLGATQTCNKVRCAVPGRRQNTIVVKVPGQEDSHHEDGESGSEASDSVSSCGQAGSQSIGSNVTLITLNSEEDYPNGTWLGDENNPEMRVRCAIIPSDMLHISTNCRTAEKMALTLLDYLFHREVQAVSNLSGQGKHGKKQLDPLTIYGIRCHLFYKFGITESDWYRIKQSIDSKCRTAWRRKQRGQSLAVKSFSRRTPNSSSYCPSEPMMSTPPPASELPQPQPQPQALHYALANAQQVQIHQIGEDGQVQVGHLHIAQVPQGEQVQITQDSEGNLQIHHVGQDGQVLQGAQLIAVASSDPAAAGVDGSPLQGSDIQVQYVQLAPVSDHTAGAQTAEALQPTLQPEMQLEHGAIQIQ

SEQ ID NO: 10693 - protein, 545 aa, Homo sapiens
MTDVTKSQPHCELNSFVLTGHSPVLWMMSEHDLADVVQIAVEDLSPDHPVVLENHVVTDEDEPALKRQRLEINCQDPSIKTICLRLDSIEAKLQALEATCKSLEEKLDLVTNKQHSPIQVPMVAGSPLGATQTCNKVRCVVPQTTVILNNDRQNAIVAKMEDPLSNRAPDSLENVISNAVPGRRQNTIVVKVPGQEDSHHEDGESGSEASDSVSSCGQAGSQSIGSNVTLITLNSEEDYPNGTWLGDENNPEMRVRCAIIPSDMLHISTNCRTAEKMALTLLDYLFHREVQAVSNLSGQGKHGKKQLDPLTIYGIRCHLFYKFGITESDWYRIKQSIDSKCRTAWRRKQRGQSLAVKSFSRRTPNSSSYCPSEPMMSTPPPASELPQPQPQPQALHYALANAQQVQIHQIGEDGQVQVGHLHIAQVPQGEQVQITQDSEGNLQIHHVGQDGQLLEATRIPCLLAPSVFKASSGQVLQGAQLIAVASSDPAAAGVDGSPLQGSDIQVQYVQLAPVSDHTAGAQTAEALQPTLQPEMQLEHGAIQIQ

SEQ ID NO: 10694 - protein, 838 aa, Homo sapiens
MPAERPAGSGGSEAPAMVEQLDTAVITPAMLEEEEQLEAAGLERERKMLEKARMSWDRESTEIRYRRLQHLLEKSNIYSKFLLTKMEQQQLEEQKKKEKLERKKESLKVKKGKNSIDASEEKPVMRKKRGREDESYNISEVMSKEEILSVAKKNKKENEDENSSSTNLCVEDLQKNKDSNSIIKDRLSETVRQNTKFFFDPVRKCNGQPVPFQQPKHFTGGVMRWYQVEGMEWLRMLWENGINGILADEMGLGKTVQCIATIALMIQRGVPGPFLVCGPLSTLPNWMAEFKRFTPDIPTMLYHGTQEERQKLVRNIYKRKGTLQIHPVVITSFEIAMRDRNALQHCYWKYLIVDEGHRIKNMKCRLIRELKRFNADNKLLLTGTPLQNNLSELWSLLNFLLPDVFDDLKSFESWFDITSLSETAEDIIAKEREQNVLHMLHQILTPFLLRRLKSDVALEVPPKREVVVYAPLSKKQEIFYTAIVNRTIANMFGSSEKETIELSPTGRPKRRTRKSINYSKIDDFPNELEKLISQIQPEVDRERAVVEVNIPVESEVNLKLQNIMMLLRKCCNHPYLIEYPIDPVTQEFKIDEELVTNSGKFLILDRMLPELKKRGHKVLLFSQMTSMLDILMDYCHLRDFNFSRLDGSMSYSEREKNMHSFNTDPEVFIFLVSTRAGGLGINLTAADTVIIYDSDWNPQSDLQAQDRCHRIGQTKPVVVYRLVTANTIDQKIVERAAAKRKLEKLIIHKNHFKGGQSGLNLSKNFLDPKELMELLKSRDYEREIKGSREKVISDKDLELLLDRSDLIDQMNASGPIKEKMGIFKILENSEDSSPECLF

SEQ ID NO: 10695 - protein, 852 aa, Homo sapiens
MKPMLKDFSNLLLVVLCDYVLGEAEYLLLREPGHVALSNDTVYVDFQYFDGANGTLRNVSVLLLEANTNQTVTTKYLLTNQSQGTLKFECFYFKEAGDYWFTMTPEATDNSTPFPWWEKSAFLKVEWPVFHVDLNRSAKAAEGTFQVGLFTSQPLCPFPVDKPNIVVDVIFTNSLPEARRNSRQPLEIRTSKRTELAQGQWVEFGCAPLGPEAYVTVVLKLLGRDSVITSTGPIDLAQKFGYKLVMVPELTCESGVEVTVLPPPCTFVQGVVTVFKEAPRYPGKRTIHLAENSLPLGERRTIFNCTLFDMGKNKYCFDFGISSRSHFSAKEECMLIQRNTETWGLWQPWSQCSATCGDGVRERRRVCLTSFPSSPVCPGMSLEASLCSLEECAAFQPSSPSPLQPQGPVKSNNIVTVTGISLCLFIIIATVLITLWRRFGRPAKCSTPARHNSIHSPSFRKNSDEENICELSEQRGSFSDGGDGPTGSPGDTGIPLTYRRSGPVPPEDDASGSESFQSNAQKIIPPLFSYRLAQQQLKEMKKKGLTETTKVYHVSQSPLTDTAIDAAPSAPLDLESPEEAAANKFRIKSPFPEQPAVSAGERPPSRLDLNVTQASCAISPSQTLIRKSQARHVGSRGGPSERSHARNAHFRRTASFHEARQARPFRERSMSTLTPRQAPAYSSRTRTCEQAEDRFRPQSRGAHLFPEKLEHFQEASGTRGPLNPLPKSYTLGQPLRKPDLGDHQAGLVAGIERTEPHRARRGPSPSHKSVSRKQSSPISPKDNYQRVSSLSPSQCRKDKCQSFPTHPEFAFYDNTSFGLTEAEQRMLDLPGYFGSNEEDETTSTLSVEKLVI

SEQ ID NO: 10696 - protein, 266 aa, Homo sapiens
MVKVTFNSALAQKEAKKDEPKSGEEALIIPPDAVAVDCKDPDDVVPVGQRRAWCWCMCFGLAFMLAGVILGGAYLYKYFALQPDDVYYCGIKYIKDDVILNEPSADAPAALYQTIEENIKIFEEEEVEFISVPVPEFADSDPANIVHDFNKKLTAYLDLNLDKCYVIPLNTSIVMPPRNLLELLINIKAGTYLPQSYLIHEHMVITDRIENIDHLGFFIYRLCHDKETYKLQRRETIKGIQKREASNCFAIRHFENKFAVETLICS

SEQ ID NO: 10697 - protein, 1253 aa, Homo sapiens
EAWSCDRPQTSKRQGEEGEGKQVSKHPKQPERPCGEQCSPFGAPIPRSPWSPWTSSPPVTFAFQVKQIMEEAVTRKFVHEDSSHIISFCAAVEACVLHGLRRRAAGFLRSNKIAALFMKVGKNFPPAEDLSRKVQDLEQLIESARNQIQGLQENVRKLPKLPNLSPLAIKHLWIRTALFEKVLDKIVHYLVENSSKYYEKEALLMDPVDGPILASLLVGPCALEYTKMKTADHFWTDPSADELVQRHRIHSSHVRQDSPTKRPALCIQKRHSSGSMDDRPSLSARDYVESLHQNSRATLLYGKNNVLVQPVRGYLGPRSCTEGLTPGYRGKGLSGSRLPIHSSIYALTHAHIHPPNTHSSIHLYLHAPILTSIHPPIVISIHPPIVTTIHPSTHLYIHLSNHLYIHPSTHLYIHPSTHLYIYPSIHPSIHPSIYPSIHLSIYFPVHLFTHLHTQASIHLFALVLTSLIQQTFPWTCYVLGAYVLLSLQRDDMEAVPGYLSLHQTADVMTLKWTPNQLMNGSVGDLDYEKSVYWDYAMTIRLEEIVYLHCHQQVDSGGTVVLVSQDGIQRPPFRFPKGGHLLQFLSCLENGLLPHGQLDPPLWSQRGKGKVFPKLRKRSPQGSAESTSSDKDDDEATDYVFRIIYPGMQSEFVPQDLMDVSVSNLPSLWQPSPRKSSCSSCSQSGSADGSSTNGCNHERAPLKLLCDNMKYQILSRAFYGWLAYCRHLSTVRTHLSALVNHMIVSPDLPCDAGQGLTARIWEQYLHDSTSYEEQELLRLIYYGGIQPEIRKAVWPFLLGHYQFGMTETERKESSQSCSSGRQNIRLHSDSSSSTQVFESVDEVEQVEAEGRLEEKQPKIPNGNLVNGTCSPDSGHPSSHNFSSGLSEHSEPSLSTEDSVLDAQRNTPTVLRPRDGSVDDRQSSEATTSQDEAPREELAVQDSLESDLLANESMDEFMSITGSLDMALPEKDDVVMEGWRSSETEKHGQADSEDNLSEEPEMESLFPALASLAVTTSANEVSPVSSSGVTYSPELLDLYTVNLHRIEKDVQRCDRNYWYFTPANLEKLRNIMCSYIWQHIEIGYVQGMCDLLAPLLVILDDEALAFSCFTELMKRMNQNFPHGGAMDTHFANMRSLIQILDSELFELMHQNGDYTHFYFCYRWFLLDFKRELVYDDVFLVWETIWAAKHVSSAHYVLFIALALVEVYRDIILENNMDFTDIIKFFNEMAERHNTKQVLKLARDLVYKVQTLIENK

SEQ ID NO: 10698 - protein, 1233 aa, Homo sapiens
EAWSCDRPQTSKRQGEEGEGKQVSKHPKQPERPCGEQCSPFGAPIPRSPWSPWTSSPPVTFAFQVKQIMEEAVTRKFVHEDSSHIISFCAAVEACVLHGLRRRAAGFLRSNKIAALFMKVGKNFPPAEDLSRKVQDLEQLIESARNQIQGLQENVRKLPKLPNLSPLAIKHLWIRTALFEKVLDKIVHYLVENSSKYYEKEALLMDPVDGPILASLLVGPCALEYTKMKTADHFWTDPSADELVQRHRIHSSHVRQDSPTKRPALCIQKRHSSGSMDDRPSLSARDYVESLHQNSRATLLYGKNNVLVQPRDDMEAVPGYLSLHQTADVMTLKSALFEKVLDKIVHYLVENSSKYYEKEALLMDPVDGPILASLLVGPCALEYTKMKTADHFWTDPSADELVQRHRIHSSHVRQDSPTKRPALCIQKRHSSGSMDDRPSLSARDYVESLHQNSRATLLYGKNNVLVQPRDDMEAVPGYLSLHQTADVMTLKWTPNQLMNGSVGDLDYEKSVYWDYAMTIRLEEIVYLHCHQQVDSGGTVVLVSQDGIQRPPFRFPKGGHLLQFLSCLENGLLPHGQLDPPLWSQRGKGKVFPKLRKRSPQGSAESTSSDKDDDEATDYVFRIIYPGMQSEFVPQDLMDVSVSNLPSLWQPSPRKSSCSSCSQSGSADGSSTNGCNHERAPLKLLCDNMKYQILSRAFYGWLAYCRHLSTVRTHLSALVNHMIVSPDLPCDAGQGLTARIWEQYLHDSTSYEEQELLRLIYYGGIQPEIRKAVWPFLLGHYQFGMTETERKESSQSCSSGRQNIRLHSDSSSSTQVFESVDEVEQVEAEGRLEEKQPKIPNGNLVNGTCSPDSGHPSSHNFSSGLSEHSEPSLSTEDSVLDAQRNTPTVLRPRDGSVDDRQSSEATTSQDEAPREELAVQDSLESDLLANESMDEFMSITGSLDMALPEKDDVVMEGWRSSETEKHGQADSEDNLSEEPEMESLFPALASLAVTTSANEVSPVSSSGVTYSPELLDLYTVNLHRIEKDVQRCDRNYWYFTPANLEKLRNIMCSYIWQHIEIGYVQGMCDLLAPLLVILDDEALAFSCFTELMKRMNQNFPHGGAMDTHFANMRSLIQILDSELFELMHQNGDYTHFYFCYRWFLLDFKRELVYDDVFLVWETIWAAKHVSSAHYVLFIALALVEVYRDIILENNMDFTDIIKFFNEMAERHNTKQVLKLARDLVYKVQTLIENK

SEQ ID NO: 10699 - protein, 1122 aa, Homo sapiens
MASAPAEAETRQRLLRTVKKEPERPCGEQCSPFGAPIPRSPWSPWTSSPPVTFAFQVKQIMEEAVTRKFVHEDSSHIISFCAAVEACVLHGLRRRAAGFLRSNKIAALFMKVGKNFPPAEDLSRKVQDLEQLIESARNQIQGLQENVRKLPKLPNLSPLAIKHLWIRTALFEKVLDKIVHYLVENSSKYYEKEALLMDPVDGPILASLLEYTKMKTADHFWTDPSADELVQRHRIHSSHVRQDSPTKRPALCIQKRHSSGSMDDRPSLSARDYVESLHQNSRATLLYGKNNVLVQPRDDMEAVPGYLSLHQTADVMTLKWTPNQLMNGSVGDLDYEKSVYWDYAMTIRLEEIVYLHCHQQVDSGGTVVLVSQDGIQRPPFRFPKGGHLLQFLSCLENGLLPHGQLDPPLWSQRGKGKVFPKLRKRSPQGSAESTSSDKDDDEATDYVFRIIYPGMQSEFVPQDLMDVSVSNLPSLWQPSPRKSSCSSCSQSGSADGSSTNGCNHERAPLKLLCDNMKYQILSRAFYGWLAYCRHLSTVRTHLSALVNHMIVSPDLPCDAGQGLTARIWEQYLHDSTSYEEQELLRLIYYGGIQPEIRKAVWPFLLGHYQFGMTETERKEVDEQIHACYAQTMAEWLGCEAIVRQRERESHAAALAKCSSGASLDSHLHRMLHRDSTISNESSQSCSSGRQNIRLHSDSSSSTQVFESVDEVEQVEAEGRLEEKQPKIPNGNLVNGTCSPDSGHPSSHNFSSGLSEHSEPSLSTEDSVLDAQRNTPTVLRPRDGSVDDRQSSEATTSQDEAPREELAVQDSLESDLLANESMDEFMSITGSLDMALPEKDDVVMEGWRSSETEKHGQADSEDNLSEEPEMESLFPALASLAVTTSANEVSPVSSSGVTYSPELLDLYTVNLHRIEKDVQRCDRNYWYFTPANLEKLRNIMCSYIWQHIEIGYVQGMCDLLAPLLVILDDEALAFSCFTELMKRMNQNFPHGGAMDTHFANMRSLIQILDSELFELMHQNGDYTHFYFCYRWFLLDFKRELVYDDVFLVWETIWAAKHVSSAHYVLFIALALVEVYRDIILENNMDFTDIIKFFNEMAERHNTKQVLKLARDLVYKVQTLIENK

SEQ ID NO: 10700 - protein, 463 aa, Homo sapiens
MASAPAEAETRQRLLRTVKKEVKQIMEEAVTRKFVHEDSSHIISFCAAVEACVLHGLRRRAAGFLRSNKIAALFMKVGKNFPPAEDLSRKVQDLEQLIESARNQIQGLQENVRKLPKLPNLSPLAIKHLWIRTALFEKVLDKIVHYLVENSSKYYEKEALLMDPVDGPILASLLVGPCALEYTKMKTADHFWTDPSADELVQRHRIHSSHVRQDSPTKRPALCIQKRHSSGSMDDRPSLSARDYVESLHQNSRATLLYGKNNVLVQPRDDMEAVPGYLSLHQTADVMTLKWTPNQLMNGSVGDLDYEKSVYWDYAMTIRLEEIVYLHCHQQVDSGGTVVLVSQDGIQRPPFRFPKGGHLLQFLSCLENGLLPHGQLDPPLWSQRGKGKVFPKLRKRSPQGSAESTSSDKDDDEATDYVFRIIYPGMQSEFARGYPLQKIWAVFGSILSISLFLHLQGSPETSL

SEQ ID NO: 10701 - protein, 933 aa, Homo sapiens
MSRSRQPPLVTGISPNEGIPWTKVTIRGENLGTGPTDLIGLTICGHNCLLTAEWMSASKIVCRVGQAKNDKGDIIVTTKSGGRGTSTVSFKLLKPEKIGILDQSAVWVDEMNYYDMRTDRNKGIPPLSLRPANPLGIEIEKSKFSQKDLEMLFHGMSADFTSENFSAAWYLIENHSNTSFEQLKMAVTNLKRQANKKSEGSLAYVKGGLSTFFEAQDALSAIHQKLEADGTEKVEGSMTQKLENVLNRASNTADTLFQEVLGRKDKADSTRNALNVLQRFKFLFNLPLNIERNIQKGDYDVVINDYEKAKSLFGKTEVQVFKKYYAEVETRIEALRELLLDKLLETPSTLHDQKRYIRYLSDLHASGDPAWQCIGAQHKWILQLMHSCKEGYVKDLKGKDFSSNVLCNPGLHSPMLDLDNDTRPSVLGHLSQTASLKRGSSFQSGRDDTWRYKTPHRVAFVEKLTKLVLSQLPNFWKLWISYVNGSLFSETAEKSGQIERSKNVRQRQNDFKKMIQEVMHSLVKLTRGALLPLSIRDGEAKQYGGWEVKCELSGQWLAHAIQTVRLTHESLTALEIPNDLLQTIQDLILDLRVRCVMATLQHTAEEIKRLAEKEDWIVDNEGLTSLPCQFEQCIVCSLQSLKGVLECKPGEASVFQQPKTQEEVCQLSINIMQVFIYCLEQLSTKPDADIDTTHLSVDVSSPDLFGSIHEDFSLTSEQRLLIVLSNCCYLERHTFLNIAEHFEKHNFQGIEKITQVSMASLKELDQRLFENYIELKADPIVGSLEPGIYAGYFDWKDCLPPTGVRNYLKEALVNIIAVHAEVFTISKELVPRVLSKVIEAVSEELSRLMQCVSSFSKNGALQARLEICALRDTVAVYLTPESKSSFKQALEALPQLSSGADKKLLEELLNKFKSSMHLQLTCFQAASSTMMKT

SEQ ID NO: 10702 - protein, 816 aa, Homo sapiens
MKSNQERSNECLPPKKREIPATSRSSEEKAPTLPSDNHRVEGTAWLPGNPGGRGHGGGRHGPAGTSVELGLQQGIGLHKALSTGLDYSPPSAPRSVPVATTLPAAYATPQPGTPVSPVQYAHLPHTFQFIGSSQYSGTYASFIPSQLIPPTANPVTSAVASAAGATTPSQRSQLEAYSTLLANMGSLSQTPGHKAEQQQQQQQQQQQQHQHQQQQQQQQQQQQQQQHLSRAPGLITPGSPPPAQQNQYVHISSSPQNTGRTASPPAIPVHLHPHQTMIPHTLTLGPPSQVVMQYADSGSHFVPREATKKAESSRLQQAIQAKEVLNGEMEKSRRYGAPSSADLGLGKAGGKSVPHPYESRHVVVHPSPSDYSSRDPSGVRASVMVLPNSNTPAADLEVQQATHREASPSTLNDKSGLHLGKPGHRSYALSPHTVIQTTHSASEPLPVGLPATAFYAGTQPPVIGYLSGQQQAITYAGSLPQHLVIPGTQPLLIPVGSTDMEASGAAPAIVTSSPQFAAVPHTFVTTALPKSENFNPEALVTQAAYPAMVQAQIHLPVVQSVASPAAAPPTLPPYFMKGSIIQLANGELKKVEDLKTEDFIQSAEISNDLKIDSSTVERIEDSHSPGVAVIQFAVGEHRAQVSVEVLVEYPFFVFGQGWSSCCPERTSQLFDLPCSKLSVGDVCISLTLKNLKNGSVKKGQPVDPASVLLKHSKADGLAGSRHRYAEQENGINQGSAQMLSENGELKFPEKMGLPAAPFLTKIEPSKPAATRKRRWSAPESRKLEKSEDEPPLTLPKPSLIPQEVKICIEGRSNVGK

SEQ ID NO: 10703 - protein, 1198 aa, Homo sapiens
MPREACLGTAKSTCAVTRSWGKGREGVVSPAGLGGALPGDGKFGSPSRLGCSLGEGVQRVAALGMGKEQELLEAARTGHLPAVEKLLSGKRLSSGFGGGGGGGSGGGGGGSGGGGGGLGSSSHPLSSLLSMWRGPNVNCVDSTGYTPLHHAALNGHKDVVEVLLRNDALTNVADSKGCYPLHLAAWKGDAQIVRLLIHQGPSHTRVNEQNNDNETALHCAAQYGHTEVVKVLLEELTDPTMRNNKFETPLDLAALYGRLEVVKMLLNAHPNLLSCNTKKHTPLHLAARNGHKAVVQVLLDAGMDSNYQTEMGSALHEAALFGKTDVVQILLAAGTDVNIKDNHGLTALDTVRELPSQKSQQIAALIEDHMTGKRSTKEVDKTPPPQPPLISSMDSISQKSQGDVEKAVTELIIDFDANAEEEGPYEALYNAISCHSLDSMASGRSSDQDSTNKEAEAAGVKPAGVRPRERPPPPAKPPPDEEEEDHIDKKYFPLTASEVLSMRPRIHGSAAREEDEHPYELLLTAETKKVVLVDGKTKDHRRSSSSRSQDSAEGQDGQVPEQFSGLLHGSSPVCEVGQDPFQLLCTAGQSHPDGSPQQGACHKASMQLEETGVHAPGASQPSALDQSKRVGYLTGLPTTNSRSHPETLTHTASPHPGGAEEGDRSGARSRAPPTSKPKAELKLSRSLSKSDSDLLTCSPTEDATMGSRSESLSNCSIGKKRLEKSPSFASEWDEIEKIMSSIGEGIDFSQERQKISGLRTLEQSVGEWLESIGLQQYESKLLLNGFDDVHFLGSNVMEEQDLRDIGISDPQHRRKLLQAARSLPKVKALGYDGNSPPSVPSWLDSLGLQDYVHSFLSSGYSSIDTVKNLWELELVNVLKVQLLGHRKRIIASLADRPYEEPPQKPPRFSQLRCQDLLSQTSSPLSQNDSCTGRSADLLLPPGDTGRRRHDSLHDPAAPSRAERFRIQEEHREAKLTLRPPSLAAPYAPVQSWQHQPEKLIFESCGYEANYLGSMLIKDLRGTESTQDACAKMRKSTEHMKKIPTIILSITYKGVKFIDASNKNVIAEHEIRNISCAAQDPEDLCTFAYITKDLQTSHHYCHVFSTVDVNLTYEIILTLGQAFEVAYQLALQAQKSRATGASAAEMIETKSSKPVPKPRVGVRKSALEPPDMDQDAQSHASVSWVVDPKPDSKRSLSTN

SEQ ID NO: 10704 - protein, 1134 aa, Homo sapiens
MGKEQELLEAARTGHLPAVEKLLSGKRLSSGFGGGGGGGSGGGGGGSGGGGGGLGSSSHPLSSLLSMWRGPNVNCVDSTGYTPLHHAALNGHKDVVEVLLRNDALTNVADSKGCYPLHLAAWKGDAQIVRLLIHQGPSHTRVNEQNNDNETALHCAAQYGHTEVVKVLLEELTDPTMRNNKFETPLDLAALYGRLEVVKMLLNAHPNLLSCNTKKHTPLHLAARNGHKAVVQVLLDAGMDSNYQTEMGSALHEAALFGKTDVVQILLAAGTDVNIKDNHGLTALDTVRELPSQKSQQIAALIEDHMTGKRSTKEVDKTPPPQPPLISSMDSISQKSQGDVEKAVTELIIDFDANAEEEGPYEALYNAISCHSLDSMASGRSSDQDSTNKEAEAAGVKPAGVRPRERPPPPAKPPPDEEEEDHIDKKYFPLTASEVLSMRPRIHGSAAREEDEHPYELLLTAETKKVVLVDGKTKDHRRSSSSRSQDSAEGQDGQVPEQFSGLLHGSSPVCEVGQDPFQLLCTAGQSHPDGSPQQGACHKASMQLEETGVHAPGASQPSALDQSKRVGYLTGLPTTNSRSHPETLTHTASPHPGGAEEGDRSGARSRAPPTSKPKAELKLSRSLSKSDSDLLTCSPTEDATMGSRSESLSNCSIGKKRLEKSPSFASEWDEIEKIMSSIGEGIDFSQERQKISGSRTLEQSVGEWLESIGLQQYESKLLLNGFDDVHFLGSNVMEEQDLRDIGISDPQHRRKLLQAARSLPKVKALGYDGNSPPSVPSWLDSLGLQDYVHSFLSSGYSSIDTVKNLWELELVNVLKVQLLGHRKRIIASLADRPYEEPPQKPPRFSQLRCQDLLSQTSSPLSQNDSCTGRSADLLLPPGDTGRRRHDSLHDPAAPSRAERFRIQEEHREAKLTLRPPSLAAPYAPVQSWQHQPEKLIFESCGYEANYLGSMLIKDLRGTESTQDACAKMRKSTEHMKKIPTIILSITYKGVKFIDASNKNVIAEHEIRNISCAAQDPEDLCTFAYITKDLQTSHHYCHVFSTVDVNLTYEIILTLGQAFEVAYQLALQAQKSRATGASAAEMIETKSSKPVPKPRVGVRKSALEPPDMDQDAQSHASVSWVVDPKPDSKRSLSTN

SEQ ID NO: 10705 - protein, 45 aa, Homo sapiens
MLYQGREKKKSEVATKVPGASPAHLGTRSTGYCSVTGNLSGCKGS

SEQ ID NO: 10706 - protein, 1742 aa, Homo sapiens
MAVAELYTQYNRVWIPDPEEVWKSAEIAKDYRVGDKVLRLLLEDGTELDYSVNPESLPPLRNPDILVGENDLTALSYLHEPAVLHNLRIRFAESKLIYTYSGIILVAMNPYKQLPIYGDAIIHAYSGQNMGDMDPHIFAVAEEAYKQMARNNRNQSIIVSGESGAGKTVSARYAMRYFATVSKSGSNAHVEDKVLASNPITEAVGNAKTTRNDNSSRFGKYTEISFDEQNQIIGANMSTYLLEKSRVVFQSENERNYHIFYQLCASAQQSEFKHLKLGSAEEFNYTRMGGNTVIEGVNDRAEMVETQKTFTLLGFKEDFQMDVFKILAAILHLGNVQITAVGNERSSVSEDDSHLKVFCELLGLESGRVAQWLCNRKIVTSSETVVKPMTRPQAVNARDALAKKIYAHLFDFIVERINQALQFSGKQHTFIGVLDIYGFETFDVNSFEQFCINYANEKLQQQFNMHVFKLEQEEYMKEDIPWTLIDFYDNQPVIDLIEAKMGILELLDEECLLPHGTDENWPQKLYNNFVNRNPLFEKPRMSNTSFVIQHFADKVEYKCEGFLEKNRDTVYDMLVEILRASKFHLCANFFQENPTPPSPFGSMITVKSAKQVIKPNSKHFRTTVGSKFRSSLYLLMETLNATTPHYVRCIKPNDEKLPFEFDSKRIVQQLRACGVLETIRISAQSYPSRWTYIEFYSRYGILMTKQELSFSDKKEVCKVVLHRLIQDSNQYQFGKTKIFFRAGQVAYLEKLRLDKLRQSCVMVQKHMRGWLQRKKFLRERRAALIIQQYFRGQQTVRKAITAVALKEAWAAIIIQKHCRGYLVRSLYQLIRMATITMQAYSRGFLARRRYRKMLEEHKAVILQKYARAWLARRRFQSIRRFVLNIQLTYRVQRLQKKLEDQNKENHGLVEKLTSLAALRAGDVEKIQKLEAELEKAATHRRNYEEKGKRYRDAVEEKLAKLQKHNSELETQKEQIQLKLQEKTEELKEKMDNLTKQLFDDVQKEERQRMLLEKSFELKTQDYEKQIQSLKEEIKALKDEKMQLQHLVEGEHVTSDGLKAEVARLSKQVKTISEFEKEIELLQAQKIDVEKHVQSQKREMREKMSEITKQLLESYDIEDVRSRLSVEDLEHLNEDGELWFAYEGLKKATRVLESHFQSQKDCYEKEIEALNFKVVHLSQEINHLQKLFREENDINESIRHEVTRLTSENMMIPDFKQQISELEKQKQDLEIRLNEQAEKMKGKLEELSNQLHRSQEEEGTQRKALEAQNEIHTKEKEKLIDKIQEMQEASDHLKKQFETESEVKCNFRQEASRLTLENRDLEEELDMKDRVIKKLQDQVKTLSKTIGKANDVHSSSGPKEYLGMLQYKREDEAKLIQNLILDLKPRGVVVNMIPGLPAHILFMCVRYADSLNDANMLKSLMNSTINGIKQVVKEHLEDFEMLSFWLSNTCHFLNCLKQYSGEEEFMKHNSPQQNKNCLNNFDLSEYRQILSDVAIRIYHQFIIIMEKNIQPIIVPGMLEYESLQGISGLKPTGFRKRSSSIDDTDGYTMTSVLQQLSYFYTTMCQNGLDPELVRQAVKQLFFLIGAVTLNSLFLRKDMCSCRKGMQIRCNISYLEEWLKDKNLQNSLAKETLEPLSQAAWLLQVKKTTDSDAKEIYERCTSLSAVQIIKILNSYTPIDDFEKRVTPSFVRKVQALLNSREDSSQLMLDTKYLFQVTFPFTPSPHALEMIQIPSSFKLGFLNRL

SEQ ID NO: 10707 - protein, 968 aa, Homo sapiens
MDSTLTASEIRQRFIDFFKRNEHTYVHSSATIPLDDPTLLFANAGMNQFKPIFLNTIDPSHPMAKLSRAANTQKCIRAGGKQNDLDDVGKDVYHHTFFEMLGSWSFGDYFKELACKMALELLTQEFGIPIERLYVTYFGGDEAAGLEADLECKQIWQNLGLDDTKILPGNMKDNFWEMGDTGPCGPCSEIHYDRIGGRDAAHLVNQDDPNVLEIWNLVFIQYNREADGILKPLPKKSIDTGMGLERLVSVLQNKMSNYDTDLFVPYFEAIQKGTGARPYTGKVGAEDADGIDMAYRVLADHARTITVALADGGRPDNTGRGYVLRRILRRAVRYAHEKLNASRGFFATLVDVVVQSLGDAFPELKKDPDMVKDIINEEEVQFLKTLSRGRRILDRKIQSLGDSKTIPGDTAWLLYDTYGFPVDLTGLIAEEKGLVVDMDGFEEERKLAQLKSQGKGAGGEDLIMLDIYAIEELRARGLEVTDDSPKYNYHLDSSGSYVFENTVATVMALRREKMFVEEVSTGQECGVVLDKTCFYAEQGGQIYDEGYLVKVDDSSEDKTEFTVKNAQVRGGYVLHIGTIYGDLKVGDQVWLFIDEPRRRPIMSNHTATHILNFALRSVLGEADQKGSLVAPDRLRFDFTAKGAMSTQQIKKAEEIANEMIEAAKAVYTQDCPLAAAKAIQGLRAVFDETYPDPVRVVSIGVPVSELLDDPSGPAGSLTSVEFCGGTHLRNSSHAGAFVIVTEEAIAKGIRRIVAVTGAEAQKALRKAESLKKCLSVMEAKVKAQTAPNKDVQREIADLGEALATAVIPQWQKDELRETLKSLKKVMDDLDRASKADVQKRVLEKTKQFIDSNPNQPLVILEMESGASAKALNEALKLFKMHSPQTSAMLFTVDNEAGKITCLCQVPQNAANRGLKASEWVQQVSGLMDGKGGGKDVSAQATGKNVGCLQEALQLATSFAQLRLGDVKN

SEQ ID NO: 10708 - protein, 302 aa, Homo sapiens
  VARIANT 78, 91, 291: Xaa = Any Amino Acid
RVSLGIDICHPDTFSYPIERGRILNWEGVQYLWSFVLENHRREQEVPPVIITETPLREPATERRCWRSCLSCCMSHRXPGRPAADVPVCLXLLTGVVVDSGYGLTRVQPFHQGRPLPASGKTLEFAGQDLSAYLLKSLFKEDCDRRCLFQLETVAVTQMNKCYVPQNLGEALDFRERQQSALDESNTYQLPDGSRVELTPMQRVAPEMFFSPQVFEQPGPSIPRAIVESVESCEISLRPLLVSHVMACGGNTLYPGFTKRLFRELMGDHVSSTKATVWEGSNRNFSVWLGXSVCSPSTYQSE

SEQ ID NO: 10709 - protein, 1365 aa, Homo sapiens
MLTAAMPFLPPSMTILKLSQNKFSCIPEAILNLPHLRSLDMSSNDIQYLPGPAHWKSLNLRELLFSHNQISILDLSEKAYLWSRVEKLHLSHNKLKEIPPEIGCLENLTSLDVSYNLELRSFPNEMGKLSKIWDLPLDELHLNFDFKHIGCKAKDIIRFLQQRLKKAVPYNRMKLMIVGNTGSGKTTLLQQLMKTKKSDLGMQSATVGIDVKDWPIQIRDKRKRDLVLNVWDFAGREEFYSTHPHFMTQRALYLAVYDLSKGQAEVDAMKPWLFNIKARASSSPVILVGTHLDVSDEKQRKACMSKITKELLNKRGFPAIRDYHFVNATEESDALAKLRKTIINESLNFKIRDQLVVGQLIPDCYVELEKIILSERKNVPIEFPVIDRKRLLQLVRENQLQLDENELPHAVHFLNESGVLLHFQDPALQLSDLYFVEPKWLCKIMAQILTVKVEGCPKHPKGIISRRDVEKFLSKKRKFPKNYMSQYFKLLEKFQIALPIGEEYLLVPSSLSDHRPVIELPHCENSEIIIRLYEMPYFPMGFWSRLINRLLEISPYMLSGRERALRPNRMYWRQGIYLNWSPEAYCLVGSEVLDNHPESFLKITVPSCRKGCILLGQVVDHIDSLMEEWFPGLLEIDICGEGETLLKKWALYSFNDGEEHQKILLDDLMKKAEEGDLLVNPDQPRLTIPISQIAPDLILADLPRNIMLNNDELEFEQAPEFLLGDGSFGSVYRAAYEGEEVAVKIFNKHTSLRLLRQELVVLCHLHHPSLISLLAAGIRPRMLVMELASKGSLDRLLQQDKASLTRTLQHRIALHVADGLRYLHSAMIIYRDLKPHNVLLFTLYPNAAIIAKIADYGIAQYCCRMGIKTSEGTPGFRAPEVARGNVIYNQQADVYSFGLLLYDILTTGGRIVEGLKFPNEFDELEIQGKLPDPVKEYGCAPWPMVEKLIKQCLKENPQERPTSAQVFDILNSAELVCLTRRILLPKNVIVECMVATHHNSRNASIWLGCGHTDRGQLSFLDLNTEGYTSEEVADSRILCLALVHLPVEKESWIVSGTQSGTLLVINTEDGKKRHTLEKMTDSVTCLYCNSFSKQSKQKNFLLVGTADGKLAIFEDKTVKLKGAAPLKILNIGNVSTPLMCLSESTNSTERNVMWGGCGTKIFSFSNDFTIQKLIETRTSQLFSYAAFSDSNIITVVVDTALYIAKQNSPVVEVWDKKTEKLCGLIDCVHFLREVMVKENKESKHKMSYSGRVKTLCLQKNTALWIGTGGGHILLLDLSTRRLIRVIYNFCNSVRVMMTAQLGSLKNVMLVLGYNRKNTEGTQKQKEIQSCLTVWDINLPHEVQNLEKHIEVRKELAEKMRRTSVE

SEQ ID NO: 10710 - protein, 390 aa, Homo sapiens
IMADPRDKALRDYRKKVLEHKEIDGRLKELREQLKELTKQYEKSENDLKALRSVGQIVGEVFKQLTEEKFIVKATNGPRYVVGCRRQLDKSKLKPGTRVALDMTTLTIMRYLPREVDPLIYNMSHEDPENVSYSEIGGLSEQIRELREVIELPLTNPELFQRVGIIPPKGCLLYGPPGTGKTLLARAIASQLDCNFLKVVSSSIVDKYIGESAHLIREMFNYARDHQPCIIFMDEIDAIGGRRFSEGTSADREIQRTLTELLNQMDGFDTLHRVKMIMATNRPDTLDPALLCPGRLDRKIHIDLPNEQTRLDILKIHAGPITKHGEIDYEAIVKLSDGFNGADLRNVCTEAGMFAIRADHDFVVQEDFMKAVRKVADSKKLEAKLDYKPV

SEQ ID NO: 10711 - protein, 2593 aa, Homo sapiens
MDQTCELPRRNCLLPFSNPVNLDAPEDKDSPFGNGQSNFSEPLNGCTMQLSTVSGTSQNAYGQDSPSCYIPLRRLQDLASMINVEYLNGSADGSESFQDPEKSDSRAQTPIVCTSLSPGGPTALAMKQEPSCNNSPELQVKVTKTIKNGFLHFENFTCVDDADVDSEMDPEQPVTEDESIEEIFEETQTNATCNYETKSENGVKVAMGSEQDSTPESRHGAVKSPFLPLAPQTETQKNKQRNEVDGSNEKAALLPAPFSLGDTNITIEEQLNSINLSFQDDPDSSTSTLGNMLELPGTSSSSTSQELPFVPQKILSKWEASVGLAEQYDVPKGSKNRKCIPGSIKLDSEEDMPFEDCTNDPESEHDLLLNGCLKSLAFDSEHSADEKEKPCAKSRARKSSDNPKRTSVKKGHIQFEAHKDERRGKIPENLGLNFISGDISDTQASNELSRIANSLTGSNTAPGSFLFSSCGKNTAKKEFETSNGDSLLGLPEGALISKCSREKNKPQRSLVCGSKVKLCYIGAGDEEKRSDSISICTTSDDGSSDLDPIEHSSESDNSVLEIPDAFDRTENMLSMQKNEKIKYSRFAATNTRVKAKQKPLISNSHTDHLMGCTKSAEPGTETSQVNLSDLKASTLVHKPQSDFTNDALSPKFNLSSSISSENSLIKGGAANQALLHSKSKQPKFRSIKCKHKENPVMAEPPVINEECSLKCCSSDTKGSPLASISKSGKVDGLKLLNNMHEKTRDSSDIETAVVKHVLSELKELSYRSLGEDVSDSGTSKPSKPLLFSSASSQNHIPIEPDYKFSTLLMMLKDMHDSKTKEQRLMTAQNLVSYRSPGRGDCSTNSPVGVSKVLVSGGSTHNSEKKGDGTQNSANPSPSGGDSALSGELSASLPGLLSDKRDLPASGKSRSDCVTRRNCGRSKPSSKLRDAFSAQMVKNTVNRKALKTERKRKLNQLPSVTLDAVLQGDRERGGSLRGGAEDPSKEDPLQIMGHLTSEDGDHFSDVHFDSKVKQSDPGKISEKGLSFENGKGPELDSVMNSENDELNGVNQVVPKKRWQRLNQRRTKPRKRMNRFKEKENSECAFRVLLPSDPVQEGRDEFPEHRTPSASILEEPLTEQNHADCLDSAGPRLNVCDKSSASIGDMEKEPGIPSLTPQAELPEPAVRSEKKRLRKPSKWLLEYTEEYDQIFAPKKKQKKVQEQVHKVSSRCEEESLLARGRSSAQNKQVDENSLISTKEEPPVLEREAPFLEGPLAQSELGGGHAELPQLTLSVPVAPEVSPRPALESEELLVKTPGNYESKRQRKPTKKLLESNDLDPGFMPKKGDLGLSKKCYEAGHLENGITESCATSYSKDFGGGTTKIFDKPRKRKRQRHAAAKMQCKKVKNDDSSKEIPGSEGELMPHRTATSPKETVEEGVEHDPGMPASKKMQGERGGGAALKENVCQNCEKLGELLLCEAQCCGAFHLECLGLTEMPRGKFICNECRTGIHTCFVCKQSGEDVKRCLLPLCGKFYHEECVQKYPPTVMQNKGFRCSLHICITCHAANPANVSASKGRLMRCVRCPVAYHANDFCLAAGSKILASNSIICPNHFTPRRGCRNHEHVNVSWCFVCSEGGSLLCCDSCPAAFHRECLNIDIPEGNWYCNDCKAGKKPHYREIVWVKVGRYRWWPAEICHPRAVPSNIDKMRHDVGEFPVLFFGSNDYLWTHQARVFPYMEGDVSSKDKMGKGVDGTYKKALQEAAARFEELKAQKELRQLQEDRKNDKKPPPYKHIKVNRPIGRVQIFTADLSEIPRCNCKATDENPCGIDSECINRMLLYECHPTVCPAGGRCQNQCFSKRQYPEVEIFRTLQRGWGLRTKTDIKKGEFVNEYVGELIDEEECRARIRYAQEHDITNFYMLTLDKDRIIDAGPKGNYARFMNHCCQPNCETQKWSVNGDTRVGLFALSDIKAGTELTFNYNLECLGNGKTVCKCGAPNCSGFLGVRPKNQPIATEEKSKKFKKKQQGKRRTQGEITKEREDECFSCGDAGQLVSCKKPGCPKVYHADCLNLTKRPAGKWECPWHQCDICGKEAASFCEMCPSSFCKQHREGMLFISKLDGRLSCTEHDPCGPNPLEPGEIREYVPPPVPLPPGPSTHLAEQSTGMAAQAPKMSDKPPADTNQMLSLSKKALAGTCQRPLLPERPLERTDSRPQPLDKVRDLAGSGTKSQSLVSSQRPLDRPPAVAGPRPQLSDKPSPVTSPSSSPSVRSQPLERPLGTADPRLDKSIGAASPRPQSLEKTSVPTGLRLPPPDRLLITSSPKPQTSDRPTDKPHASLSQRLPPPEKVLSAVVQTLVAKEKALRPVDQNTQSKNRAALVMDLIDLTPRQKERAASPHQVTPQADEKMPVLESSSWPASKGLGHMPRAVEKGCVSDPLQTSGKAAAPSEDPWQAVKSLTQARLLSQPPAKAFLYEPTTQASGRASAGAEQTPGPLSQSPGLVKQAKQMVGGQQLPALAAKSGQSFRSLGKAPASLPTEEKKLVTTEQSPWALGKASSRAGLWPIVAGQTLAQSCWSAGSTQTLAQTCWSLGRGQDPKPEQNTLPALNQAPSSHKCAESEQK

SEQ ID NO: 10712 - protein, 2696 aa, Homo sapiens
MDQTCELPRRNCLLPFSNPVNLDAPEDKDSPFGNGQSNFSEPLNGCTMQLSTVSGTSQNAYGQDSPSCYIPLRRLQDLASMINVEYLNGSADGSESFQDPEKSDSRAQTPIVCTSLSPGGPTALAMKQEPSCNNSPELQVKVTKTIKNGFLHFENFTCVDDADVDSEMDPEQPVTEDESIEEIFEETQTNATCNYETKSENGVKVAMGSEQDSTPESRHGAVKSPFLPLAPQTETQKNKQRNEVDGSNEKAALLPAPFSLGDTNITIEEQLNSINLSFQDDPDSSTSTLGNMLELPGTSSSSTSQELPFCQPKKKSTPLKYEVGDLIWAKFKRRPWWPCRICSDPLINTHSKMKVSNRRPYRQYYVEAFGDPSERAWVAGKAIVMFEGRHQFEELPVLRRRGKQKEKGYRHKVPQKILSKWEASVGLAEQYDVPKGSKNRKCIPGSIKLDSEEDMPFEDCTNDPESEHDLLLNGCLKSLAFDSEHSADEKEKPCAKSRARKSSDNPKRTSVKKGHIQFEAHKDERRGKIPENLGLNFISGDISDTQASNELSRIANSLTGSNTAPGSFLFSSCGKNTAKKEFETSNGDSLLGLPEGALISKCSREKNKPQRSLVCGSKVKLCYIGAGDEEKRSDSISICTTSDDGSSDLDPIEHSSESDNSVLEIPDAFDRTENMLSMQKNEKIKYSRFAATNTRVKAKQKPLISNSHTDHLMGCTKSAEPGTETSQVNLSDLKASTLVHKPQSDFTNDALSPKFNLSSSISSENSLIKGGAANQALLHSKSKQPKFRSIKCKHKENPVMAEPPVINEECSLKCCSSDTKGSPLASISKSGKVDGLKLLNNMHEKTRDSSDIETAVVKHVLSELKELSYRSLGEDVSDSGTSKPSKPLLFSSASSQNHIPIEPDYKFSTLLMMLKDMHDSKTKEQRLMTAQNLVSYRSPGRGDCSTNSPVGVSKVLVSGGSTHNSEKKGDGTQNSANPSPSGGDSALSGELSASLPGLLSDKRDLPASGKSRSDCVTRRNCGRSKPSSKLRDAFSAQMVKNTVNRKALKTERKRKLNQLPSVTLDAVLQGDRERGGSLRGGAEDPSKEDPLQIMGHLTSEDGDHFSDVHFDSKVKQSDPGKISEKGLSFENGKGPELDSVMNSENDELNGVNQVVPKKRWQRLNQRRTKPRKRMNRFKEKENSECAFRVLLPSDPVQEGRDEFPEHRTPSASILEEPLTEQNHADCLDSAGPRLNVCDKSSASIGDMEKEPGIPSLTPQAELPEPAVRSEKKRLRKPSKWLLEYTEEYDQIFAPKKKQKKVQEQVHKVSSRCEEESLLARGRSSAQNKQVDENSLISTKEEPPVLEREAPFLEGPLAQSELGGGHAELPQLTLSVPVAPEVSPRPALESEELLVKTPGNYESKRQRKPTKKLLESNDLDPGFMPKKGDLGLSKKCYEAGHLENGITESCATSYSKDFGGGTTKIFDKPRKRKRQRHAAAKMQCKKVKNDDSSKEIPGSEGELMPHRTATSPKETVEEGVEHDPGMPASKKMQGERGGGAALKENVCQNCEKLGELLLCEAQCCGAFHLECLGLTEMPRGKFICNECRTGIHTCFVCKQSGEDVKRCLLPLCGKFYHEECVQKYPPTVMQNKGFRCSLHICITCHAANPANVSASKGRLMRCVRCPVAYHANDFCLAAGSKILASNSIICPNHFTPRRGCRNHEHVNVSWCFVCSEGGSLLCCDSCPAAFHRECLNIDIPEGNWYCNDCKAGKKPHYREIVWVKVGRYRWWPAEICHPRAVPSNIDKMRHDVGEFPVLFFGSNDYLWTHQARVFPYMEGDVSSKDKMGKGVDGTYKKALQEAAARFEELKAQKELRQLQEDRKNDKKPPPYKHIKVNRPIGRVQIFTADLSEIPRCNCKATDENPCGIDSECINRMLLYECHPTVCPAGGRCQNQCFSKRQYPEVEIFRTLQRGWGLRTKTDIKKGEFVNEYVGELIDEEECRARIRYAQEHDITNFYMLTLDKDRIIDAGPKGNYARFMNHCCQPNCETQKWSVNGDTRVGLFALSDIKAGTELTFNYNLECLGNGKTVCKCGAPNCSGFLGVRPKNQPIATEEKSKKFKKKQQGKRRTQGEITKEREDECFSCGDAGQLVSCKKPGCPKVYHADCLNLTKRPAGKWECPWHQCDICGKEAASFCEMCPSSFCKQHREGMLFISKLDGRLSCTEHDPCGPNPLEPGEIREYVPPPVPLPPGPSTHLAEQSTGMAAQAPKMSDKPPADTNQMLSLSKKALAGTCQRPLLPERPLERTDSRPQPLDKVRDLAGSGTKSQSLVSSQRPLDRPPAVAGPRPQLSDKPSPVTSPSSSPSVRSQPLERPLGTADPRLDKSIGAASPRPQSLEKTSVPTGLRLPPPDRLLITSSPKPQTSDRPTDKPHASLSQRLPPPEKVLSAVVQTLVAKEKALRPVDQNTQSKNRAALVMDLIDLTPRQKERAASPHQVTPQADEKMPVLESSSWPASKGLGHMPRAVEKGCVSDPLQTSGKAAAPSEDPWQAVKSLTQARLLSQPPAKAFLYEPTTQASGRASAGAEQTPGPLSQSPGLVKQAKQMVGGQQLPALAAKSGQSFRSLGKAPASLPTEEKKLVTTEQSPWALGKASSRAGLWPIVAGQTLAQSCWSAGSTQTLAQTCWSLGRGQDPKPEQNTLPALNQAPSSHKCAESEQK

SEQ ID NO: 10713 - protein, 2427 aa, Homo sapiens
MPLKTRTALSDDPDSSTSTLGNMLELPGTSSSSTSQELPFCQPKKKSTPLKYEVGDLIWAKFKRRPWWPCRICSDPLINTHSKMKVSNRRPYRQYYVEAFGDPSERAWVAGKAIVMFEGRHQFEELPVLRRRGKQKEKGYRHKVPQKILSKWEASVGLAEQYDVPKGSKNRKCIPGSIKLDSEEDMPFEDCTNDPESEHDLLLNGCLKSLAFDSEHSADEKEKPCAKSRARKSSDNPKRTSVKKGHIQFEAHKDERRGKIPENLGLNFISGDISDTQASNELSRIANSLTGSNTAPGSFLFSSCGKNTAKKEFETSNGDSLLGLPEGALISKCSREKNKPQRSLVCGSKVKLCYIGAGDEEKRSDSISICTTSDDGSSDLDPIEHSSESDNSVLEIPDAFDRTENMLSMQKNEKIKYSRFAATNTRVKAKQKPLISNSHTDHLMGCTKSAEPGTETSQVNLSDLKASTLVHKPQSDFTNDALSPKFNLSSSISSENSLIKGGAANQALLHSKSKQPKFRSIKCKHKENPVMAEPPVINEECSLKCCSSDTKGSPLASISKSGKVDGLKLLNNMHEKTRDSSDIETAVVKHVLSELKELSYRSLGEDVSDSGTSKPSKPLLFSSASSQNHIPIEPDYKFSTLLMMLKDMHDSKTKEQRLMTAQNLVSYRSPGRGDCSTNSPVGVSKVLVSGGSTHNSEKKGDGTQNSANPSPSGGDSALSGELSASLPGLLSDKRDLPASGKSRSDCVTRRNCGRSKPSSKLRDAFSAQMVKNTVNRKALKTERKRKLNQLPSVTLDAVLQGDRERGGSLRGGAEDPSKEDPLQIMGHLTSEDGDHFSDVHFDSKVKQSDPGKISEKGLSFENGKGPELDSVMNSENDELNGVNQVVPKKRWQRLNQRRTKPRKRMNRFKEKENSECAFRVLLPSDPVQEGRDEFPEHRTPSASILEEPLTEQNHADCLDSAGPRLNVCDKSSASIGDMEKEPGIPSLTPQAELPEPAVRSEKKRLRKPSKWLLEYTEEYDQIFAPKKKQKKVQEQVHKVSSRCEEESLLARGRSSAQNKQVDENSLISTKEEPPVLEREAPFLEGPLAQSELGGGHAELPQLTLSVPVAPEVSPRPALESEELLVKTPGNYESKRQRKPTKKLLESNDLDPGFMPKKGDLGLSKKCYEAGHLENGITESCATSYSKDFGGGTTKIFDKPRKRKRQRHAAAKMQCKKVKNDDSSKEIPGSEGELMPHRTATSPKETVEEGVEHDPGMPASKKMQGERGGGAALKENVCQNCEKLGELLLCEAQCCGAFHLECLGLTEMPRGKFICNECRTGIHTCFVCKQSGEDVKRCLLPLCGKFYHEECVQKYPPTVMQNKGFRCSLHICITCHAANPANVSASKGRLMRCVRCPVAYHANDFCLAAGSKILASNSIICPNHFTPRRGCRNHEHVNVSWCFVCSEGGSLLCCDSCPAAFHRECLNIDIPEGNWYCNDCKAGKKPHYREIVWVKVGRYRWWPAEICHPRAVPSNIDKMRHDVGEFPVLFFGSNDYLWTHQARVFPYMEGDVSSKDKMGKGVDGTYKKALQEAAARFEELKAQKELRQLQEDRKNDKKPPPYKHIKVNRPIGRVQIFTADLSEIPRCNCKATDENPCGIDSECINRMLLYECHPTVCPAGGRCQNQCFSKRQYPEVEIFRTLQRGWGLRTKTDIKKGEFVNEYVGELIDEEECRARIRYAQEHDITNFYMLTLDKDRIIDAGPKGNYARFMNHCCQPNCETQKWSVNGDTRVGLFALSDIKAGTELTFNYNLECLGNGKTVCKCGAPNCSGFLGVRPKNQPIATEEKSKKFKKKQQGKRRTQGEITKEREDECFSCGDAGQLVSCKKPGCPKVYHADCLNLTKRPAGKWECPWHQCDICGKEAASFCEMCPSSFCKQHREGMLFISKLDGRLSCTEHDPCGPNPLEPGEIREYVPPPVPLPPGPSTHLAEQSTGMAAQAPKMSDKPPADTNQMLSLSKKALAGTCQRPLLPERPLERTDSRPQPLDKVRDLAGSGTKSQSLVSSQRPLDRPPAVAGPRPQLSDKPSPVTSPSSSPSVRSQPLERPLGTADPRLDKSIGAASPRPQSLEKTSVPTGLRLPPPDRLLITSSPKPQTSDRPTDKPHASLSQRLPPPEKVLSAVVQTLVAKEKALRPVDQNTQSKNRAALVMDLIDLTPRQKERAASPHQVTPQADEKMPVLESSSWPASKGLGHMPRAVEKGCVSDPLQTSGKAAAPSEDPWQAVKSLTQARLLSQPPAKAFLYEPTTQASGRASAGAEQTPGPLSQSPGLVKQAKQMVGGQQLPALAAKSGQSFRSLGKAPASLPTEEKKLVTTEQSPWALGKASSRAGLWPIVAGQTLAQSCWSAGSTQTLAQTCWSLGRGQDPKPEQNTLPALNQAPSSHKCAESEQK

SEQ ID NO: 10714 - protein, 182 aa, Homo sapiens
MKSSEELQCLKQMEEELLFLKAGQGSQRARLTPPLPRALQGNFGAPALCGIWFAEHLHPAVGMPPNYNSSMLSLSPERTILSGGWSGKQTQQPVPPLRTLLLRSPFSLHKSSQPGSPKASQRIHPLFHSIPRSQLHSVLLGLPLLFIQTRPSPPAQYGAQMPLRYICFGPNIFWGSKKPQKE

SEQ ID NO: 10715 - protein, 1151 aa, Homo sapiens
MSRRKQSKPRQIKRPLEDAIEDEEEECPSEETDIISKGDFPLEESFSTEFGPENLSCEEVEYFCNKGDDEGIQETAESDGDTQSEKPGQPGVETDDWDGPGELEVFQKDGERKIQSRQQLPVGTTWGPFPGKMDLNNNSLKTKAQVPMVLTAGPKWLLDVTWQGVEDNKNNCIVYSKGGQLWCTTTKAISEGEELIAFVVDFDSRLQAASQMTLTEGMYPARLLDSIQLLPQQAAMASILPTAIVNKDIFPCKSCGIWYRSERNLQAHLMYYCSGRQREAAPVSEENEDSAHQISSLCPFPQCTKSFSNARALEMHLNSHSGVKMEEFLPPGASLKCTVCSYTADSVINFHQHLFSHLTQAAFRCNHCHFGFQTQRELLQHQELHVPSGKLPRESDMEHSPSATEDSLQPATDLLTRSELPQSQKAMQTKDASSDTELDKCEKKTQLFLTNQRPEIQPTTNKQSFSYTKIKSEPSSPRLASSPVQPNIGPSFPVGPFLSQFSFPQDITMVPQASEILAKMSELVHRRLRHGSSSYPPVIYSPLMPKGATCFECNITFNNLDNYLVHKKHYCSSRWQQMAKSPEFPSVSEKMPEALSPNTGQTSINLLNPAAHSADPENPLLQTSCINSSTVLDLIGPNGKGHDKDFSTQTKKLSTSSNNDDKINGKPVDVKNPSVPLVDGESDPNKTTCEACNITFSRHETYMVHKQYYCATRHDPPLKRSASNKVPAMQRTMRTRKRRKMYEMCLPEQEQRPPLVQQRFLDVANLNNPCTSTQEPTEGLGECYHPRCDIFPGIVSKHLETSLTINKCVPVSKCDTTHSSVSCLEMDVPIDLSKKCLSQSERTTTSPKRLLDYHECTVCKISFNKVENYLAHKQNFCPVTAHQRNDLGQLDGKVFPNPESERNSPDVSYERSIIKCEKNGNLKQPSPNGNLFSSHLATPQGLKVFSEAAQLIATKEENRHLFLPQCLYPGAIKKAKGADQLSPYYGIKPSDYISGSLVIHNTDIEQSRNAENESPKGQASSNGCAALKKDSLPLLPKNRGMVIVNGGLKQDERPAANPQQENISQNPQHEDDHKSPSWISENPLAANENVSPGIPSAEEQLSSIAKGVNGSSQAPTSGKYCRLCDIQFNNLSNFITHKKFYCSSHAAEHVK

SEQ ID NO: 10716 - protein, 687 aa, Homo sapiens
SPHSFPCRRIGHQSLFISSCHLLKEIWIILETNLERKRMASVSALTEELDSITSELHAVEIQIQELTERQQELIQKKKVLTKKIKQCLEDSDAGASNEYDSSPAAWNKEDFPWSGKVKDILQNVFKLEKFRPLQLETINVTMAGKEVFLVMPTGGGKSLCYQLPALCSDGFTLVICPLISLMEDQLMVLKQLGISATMLNASSSKEHVKWVHAEMVNKNSELKLIYVTPEKIAKSKMFMSRLEKAYEARRFTRIAVDEVHCCSQWGHDFRPDYKALGILKRQFPNASLIGLTATATNHVLTDAQKILCIEKCFTFTASFNRPNLYYEVRQKPSNTEDFIEDIVKLINGRYKGQSGIIYCFSQKDSEQVTVSLQNLGIHAGAYHANLEPEDKTTVHRKWSANEIQVVVATVAFGMGIDKPDVRFVIHHSMSKSMENYYQESGRAGRDDMKADCILYYGFGDIFRISSMVVMENVGQQKLYEMVSYCQNISKCRRVLMAQHFDEVWNSEACNKMCDNCCKDSAFERKNITEYCRDLIKILKQAEELNEKLTPLKLIDSWMGKGAAKLRVAGVVAPTLPREDLEKIIAHFLIQQYLKEDYSFTAYATISYLKIGPKANLLNNEAHAITMQVTKSTQNSFRAESSQTCHSEQGDKKMEEKNSGNFQKKAANMLQQSGSKNTGAKKRKIDDA

SEQ ID NO: 10717 - protein, 1712 aa, Homo sapiens
MERNVLTTFSQEMSQLILNEMPKAEYSSLFNDFVESEFFLIDGDSLLITCICEISFKPGQNLHFFYLVERYLVDLISKGGQFTIVFFKDAEYAYFNFPELLSLRTALILHLQKNTTIDVRTTFSRCLSKEWGSFLEESYPYFLIVADEGLNDLQTQLFNFLIIHSWARKVNVVLSSGQESDVLCLYAYLLPSMYRHQIFSWKNKQNIKDAYTTLLNQLERFKLSALAPLFGSLKWNNITEEAHKTVSLLTQVWPEGSDIRRVFCVTSCSLSLRMYHRFLGNREPSSGQETEIQQVNSNCLTLQEMEDLCKLHCLTVVFLLHLPLSQRACARVITSHWAEDMKPLLQMKKWCEYFILRNIHTFEFWNLNLIHLSDLNDELLLKNIAFYYENENVKGLHLNLGDTIMKDYEYLWNTVSKLVRDFEVGQPFPLRTTKVCFLGKKPSPIKDSSNEMVPNLGFIPTSSFVVDKFAGDILKDLPFLKSDDPIVTSLVKQKEFDELVHWHSHKPLSDDYDRSRCQFDEKSRDPRVLRSVQKYHVFQRFYGNSLETVSSKIIVTQTIKSKKDFSGPKSKKAHETKAEIIARENKKRLFAREEQKEEQKWNALSFSIEEQLKENLHSGIKSLEDFLKSCKSSCVKLQVEMVGLTACLKAWKEHCRSEEGKTTKDLSIAVQVMKRIHSLMEKYSELLQEDDRQLIARCLKYLGFDELASSLHPAQDAENDVKVKKRNKYSIGIGPARFQLQYMGHYLIRDERKDPDPRVQDFIPDTWQRELLDVVDKNESAVIVAPTSSGKTYASYYCMEKVLKESDDGVVVYVAPTKALVNQVAATVQNRFTKNLPSGEVLCGVFTREYRHDALNCQVLITVPACFEILLLAPHRQNWVKKIRYVIFDEVHCLGGEIGAEIWEHLLVMIRCPFLALSATISNPEHLTEWLQSVKWYWKQEDKIIENNTASKRHVGRQAGFPKDYLQVKQSYKVRLVLYGERYNDLEKHVCSIKHGDIHFDHFHPCAALTTDHIERYGFPPDLTLSPRESIQLYDAMFQIWKSWPRAQELCPENFIHFNNKLVIKKMDARKYEESLKAELTSWIKNGNVEQARMVLQNLSPEADLSPENMITMFPLLVEKLRKMEKLPALFFLFKLGAVENAAESVSTFLKKKQETKRPPKADKEAHVMANKLRKVKKSIEKQKIIDEKSQKKTRNVDQSLIHEAEHDNLVKCLEKNLEIPQDCTYADQKAVDTETLQKVFGRVKFERKGEELKALAERGIGYHHSAMSFKEKQLVEILFRKGYLRVVTATGTLALGVNMPCKSVVFAQNSVYLDALNYRQMSGRAGRRGQDLMGDVYFFDIPFPKIGKLIKSNVPELRGHFPLSITLVLRLMLLASKGDDPEDTKAKVLSVLKHSLLSFKQPRVMDMLKLYFLFSLQFLVKEGYLDQEGNPMGFAGLVSHLHYHEPSNLVFVSFLVNGLFHDLCQPTRKGSKHFSQDVMEKLVLVLAHLFGRRYFPPKFQDAHFEFYQSKVFLDDLPEDFSDALDEYNMKIMEDFTTFLRIVSKLADMNQEYQLPLSKIKFTGKECEDSQLVSHLMSCKEGRVAISPFVCLSGNFDDDLLRLETPNHVTLGTIGVNRSQAPVLLSQKFDNRGRKMSLNAYALDFYKHGSLIGLVQDNRMNEGDAYYLLKDFALTIKSISVSLRELCENEDDNVVLAFEQLSTTFWEKLNKV

SEQ ID NO: 10718 - protein, 1565 aa, Homo sapiens
MRTALILHLQHNTNIDVQTEFSGCLSQDWKLFLEQHYPYFLIVSEEGLSDLQTYLFNFLIIHSWGMKVNVVLSSGHESDTLRFYAYTMESTDRNQTFSKEAYQTLFLLQHLWSEGSDIQRVLCVTSCSLSLRMYHRVLVHSNCLSLQEVEDFCRLRCLCVAFQLHLPLSQRACSRVITCSWIRNSDSFLKMNKWCEYFILSNLNVFGCWNLNLNHVSDLYDEQLLKNIAFYYEFESTQEPHLNLGDSIRRDYEDLWNVVSHLVKEFNVGKSFPLRTTRRHFLRQEKSVIQEISLEKMPSVGFIPMTSAVIDEFVGDMMKDLPILKSDDPVVPSLFKQKTSDELLHWHAQRLLSDDYDRIKCHVDEQSRDPHVLDFLKKIQDYQQFYGKSLESISTKVIVTQTTRPKEDSSGASGEILQNTKPHQITKKSKKKSFLKEDQNKAQQNDDLLFSIEEEMKNNLHSGIRKLEDYLTSCASNSVKFGVEMLGLIACFKAWKKHCRGEGKISKDLSIAVQMMKRIHSLLERYPEILEAEHHQYIAKCLKYLGFNDLANSLDPTLIGDDKNKKKYSIDIGPARFQLQYMGHYLIRDERKDRDPRVQDFIPNAWQQELLDVVDKNESAVIVAPTSSGKTYASYYCMEKVLRESDVGVVVYVAPAKSLVGQVAATVENRFTKTLPAGRTLCGAFTRDYCHNVLNCQVLITVPECFEILLLAPHRQKWVERIRYVIFDEVHYLGREVGAKFWELLLVIIRCPFLVLSATINNPNLLTKWLQSVKQYWKQADKIMEEKCISEKQADKCLNFLQDHSYKNQSYEVRLVLYGERYNDLEKHICSVKHDDVYFDHFHPCAALTTDIIEKYGFPPDLTLTPQESIQLYDTMAQVWETWPRAQELCPEEFILFKNKIVIKKLDARKYEENLKAELTNWIKNGQVKKVKRVLKNLSPDSLSSSKDMVKMFPLLVEKLRQMDKLPAIFFLFKNDDVGKRAGSVCTFLEKTETKSHPHTECHSYVFAIDEVLEKVRKTQKRITKKNPKKAEKLERKKVYRAEYINFLENLKILEISEDCTYADVKALHTEITRNKDSTLERVLPRVRFTRHGKELKALAQRGIGYHHSSMYFKEKEFVEILFVKGLIRVVTATETLALGIHMPCKSVVFAQDSVYLDALNYRQMSGRAGRRGQDLLGNVYFFDIPLPKIKRLLASSVPELRGQFPLSITLVLRLMLLASKGDDPEDAKAKVLSVLKHSLLSFKRRRAMETLKLYFLFSLQLLIKEDYLNKKGNPKKFAGLASYLHGHEPSNLVFVNFLKRGLFHNLCKPAWKGSQQFSQDVMEKLVLVLANLFGRKYIPAKFQNANLSFSQSKVILAELPEDFKAALYEYNLAVMKDFASFLLIASKSVNMKKEHQLPLSRIKFTGKECEDSQLVSHLMSCKKGRVAISPFVCLSGNTDNDLLRPETINQVILRTVGVSGTQAPLLWPWKLDNRGRRMPLNAYVLNFYKHNCLTRLDQKNGMRMGQLLKCLKDFAFNIQAISDSLSELCENKRDNVVLAFKQLSQTFYEKLQEMQIQMSQNHLE

SEQ ID NO: 10719 - protein, 915 aa, Homo sapiens
MRKSSSPSLSNCNSVLANKIFGIPLDELQQGGHPDIEVPFIVRHVVDYIEEHGGLEQQGLFQVNGNAETVEWLRQRYDSGEEVDLVKEADVPSAISLLRFFLQELPEPVIPGSLHIHLMQLSQDYNNEDEFGRKLRFLLQQLPPVNYSLLKFLCRFLANVASHHEEIWSANSLAAVFGPDVFHIYTDVEDMKEQEIVSRIMAGLLENYYEFFENEEEDFSSNDLSSITEQVNELSEEEEEDEKLEHIEELPEEGAEKSNDMPEVVQLRMTENILESNSVTATSTHISPISILPASTDILERTIRAAVEQHLFDLQSSIDHDLKNLQQQSVVCNNEAESIHCDGEGSNNQIDIADDIINASESNRDCSKPVASTNLDNEAMQQDCVFENEENTQSVGILLEPCSDRGDSEDGCLEREEYLLFDSDKLSHLILDSSSKICDLNANTESEVPGGQSVGVQGEAACVSIPHLDLKNVSDGDKWEEPFPAFKSWQEDSESGEAQLSPQAGRMNHHPLEEDCPPVLSHRSLDFGQSQRFLHDPEKLDSSSKALSFTRIRRSSFSSKDEKREDRTPYQLVKKLQKKIRQFEEQFERERNSKPSYSDIAANPKVLKWMTELTKLRKQIKDAKHKNSDGEFVPQTRPRSNTLPKSFGSSLDHEDEENEDEPKVIQKEKKPSKEATLELILKRLKEKRIERCLPEDIKKMTKDHLVEEKASLQKSLLYYESQHGRPVTKEERHIVKPLYDRYRLVKQMLTRASITPVLGSPSTKRRGQMLQPIIEGETAHFFEEIKEEEEDGVNLSSELGDMLKTAVQVQSSLENSESDVEENQEKLALDLRLSSSRAASMPELLEQLWKARAEKKKLRKTLREFEEAFYQQNGRNAQKEDRVPVLEEYREYKKIKAKLRLLEVLISKQDSSKSI

SEQ ID NO: 10720 - protein, 3095 aa, Homo sapiens
MVFESVVVDVLNRFLGDYVVDLDTSQLSLGIWKGAVALKNLQIKENALSQLDVPFKVKVGHIGNLKLIIPWKNLYTQPVEAVLEEIYLLIVPSSRIKYDPLKEEKQLMEAKQQELKRIEEAKQKVVDQEQHLPEKQDTFAEKLVTQIIKNLQVKISSIHIRYEDDITNRDKPLSFGISLQNLSMQTTDQYWVPCLHDETEKLVRKLIRLDNLFAYWNVKSQMFYLSDYDNSLDDLKNGIVNENIVPEGYDFVFRPISANAKLVMNRRSDFDFSAPKINLEIELHNIAIEFNKPQYFSIMELLESVDMMAQNLPYRKFKPDVPLHHHAREWWAYAIHGVLEVNVCPRLWMWSWKHIRKHRQKVKQYKELYKKKLTSKKPPGELLVSLEELEKTLDVFNITIARQTAEVEVKKAGYKIYKEGVKDPEDNKGWFSWLWSWSEQNTNEQQPDVQPETLEEMLTPEEKALLYEAIGYSETAVDPTLLKTFEALKFFVHLKSMSIVLRENHQKPELVDIVIEEFSTLIVQRPGAQAIKFETKIDSFHITGLPDNSEKPRLLSSLDDAMSLFQITFEINPLDETVSQRCIIEAEPLEIIYDARTVNSIVEFFRPPKEVHLAQLTAATLTKLEEFRSKTATGLLYIIETQKVLDLKINLKASYIIVPQDGIFSPTSNLLLLDLGHLKVTSKSRSELPDVKQGEANLKEIMDRAYDSFDIQLTSVQLLYSRVGDNWREARKLSVSTQHILVPMHFNLELSKAMVFMDVRMPKFKIYGKLPLISLRISDKKLQGIMELIESIPKPEPVTEVSAPVKSFQIQTSTSLGTSQISQKIIPLLELPSVSEDDSEEEFFDAPCSPLEEPLQFPTGVKSIRTRKLQKQDCSVNMTTFKIRFEVPKVLIEFYHLVGDCELSVVEILVLGLGAEIEIRTYDLKANAFLKEFCLKCPEYLDENKKPVYLVTTLDNTMEDLLTLEYVKAEKNVPDLKSTYNNVLQLIKVNFSSLDIHLHTEALLNTINYLHNILPQSEEKSAPVSTTETEDKGDVIKKLALKLSTNEDIITLQILAELSCLQIFIQDQKCNISEIKIEGLDSEMIMRPSETEINAKLRNIIVLDSDITAIYKKAVYITGKEVFSFKMVSYMDATAGSAYTDMNVVDIQVNLIVGCIEVVFVTKFLYSILAFIDNFQAAKQALAEATVQAAGMAATGVRELAQRSSRMALDINIKAPVVVIPQSPVSENVFVADFGLITMTNTFHMITESQSSPPPVIDLITIKLSEMRLYRSRFINDAYQEVLDLLLPLNLEVVVERNLCWEWYQEVPCFNVNAQLKPMEFILSQEDITTIFKTLHGNIWYEKDGSASPAVTKDQYSATSGVTTNASHHSGGATVVTAAVVEVHSRALLVKTTLNISFKTDDLTMVLYSPGPKQASFTDVRDPSLKLAEFKLENIISTLKMYTDGSTFSSFSLKNCILDDKRPHVKKATPRMIGLTVGFDKKDMMDIKYRKVRDGCVTDAVFQEMYICASVEFLQTVANVFLEAYTTGTAVETSVQTWTAKEEVPTQESVKWEINVIIKNPEIVFVADMTKNDAPALVITTQCEICYKGNLENSTMTAAIKDLQVRACPFLPVKRKGKITTVLQPCDLFYQTTQKGTDPQVIDMSVKSLTLKVSPVIINTMITITSALYTTKETIPEETASSTAHLWEKKDTKTLKMWFLEESNETEKIAPTTELVPKGEMIKMNIDSIFIVLEAGIGHRTVPMLLAKSRFSGEGKNWSSLINLHCQLELEVHYYNEMFGVWEPLLEPLEIDQTEDFRPWNLGIKMKKKAKMAIVESDPEEENYKVPEYKTVISFHSKDQLNITLSKCGLVMLNNLVKAFTEAATGSSADFVKDLAPFMILNSLGLTISVSPSDSFSVLNIPMAKSYVLKNGESLSMDYIRTKDNDHFNAMTSLSSKLFFILLTPVNHSTADKIPLTKVGRRLYTVRHRESGVERSIVCQIDTVEGSKKVTIRSPVQIRNHFSVPLSVYEGDTLLGTASPENEFNIPLGSYRSFIFLKPEDENYQMCEGIDFEEIIKNDGALLKKKCRSKNPSKESFLINIVPEKDNLTSLSVYSEDGWDLPYIMHLWPPILLRNLLPYKIAYYIEGIENSVFTLSEGHSAQICTAQLGKARLHLKLLDYLNHDWKSEYHIKPNQQDISFVSFTCVTEMEKTDLDIAVHMTYNTGQTVVAFHSPYWMVNKTGRMLQYKADGIHRKHPPNYKKPVLFSFQPNHFFNNNKVQLMVTDSELSNQFSIDTVGSHGAVKCKGLKMDYQVGVTIDLSSFNITRIVTFTPFYMIKNKSKYHISVAEEGNDKWLSLDLEQCIPFWPEYASSKLLIQVERSEDPPKRIYFNKQENCILLRLDNELGGIIAEVNLAEHSTVITFLDYHDGAATFLLINHTKNELVQYNQSSLSEIEDSLPPGKAVFYTWADPVGSRRLKWRCRKSHGEVTQKDDMMMPIDLGEKTIYLVSFFEGLQRIILFTEDPRVFKVTYESEKAELAEQEIAVALQDVGISLVNNYTKQEVAYIGITSSDVVWETKPKKKARWKPMSVKHTEKLEREFKEYTESSPSEDKVIQLDTNVPVRLTPTGHNMKILQPHVIALRRNYLPALKVEYNTSAHQSSFRIQIYRIQIQNQIHGAVFPFVFYPVKPPKSVTMDSAPKPFTDVSIVMRSAGHSQISRIKYFKVLIQEMDLRLDLGFIYALTDLMTEAEVTENTEVELFHKDIEAFKEEYKTASLVDQSQVSLYEYFHISPIKLHLSVSLSSGREEAKDSKQNGGLIPVHSLNLLLKSIGATLTDVQDVVFKLAFFELNYQFHTTSDLQSEVIRHYSKQAIKQMYVLILGLDVLGNPFGLIREFSEGVEAFFYEPYQGAIQGPEEFVEGMALGLKALVGGAVGGLAGAASKITGAMAKGVAAMTMDEDYQQKRREAMNKQPAGFREGITRGGKGLVSGFVSGITGIVTKPIKGAQKGGAAGFFKGVGKGLVGAVARPTGGIIDMASSTFQGIKRATETSEVESLRPPRFFNEDGVIRPYRLRDGTGNQMLQKIQFYREWIMTHSSSSDDDDDDDDDDESDLNH

SEQ ID NO: 10721 - protein, 3177 aa, Homo sapiens
MVFESVVVDVLNRFLGDYVVDLDTSQLSLGIWKGAVALKNLQIKENALSQLDVPFKVKVGHIGNLKLIIPWKNLYTQPVEAVLEEIYLLIVPSSRIKYDPLKEEKQLMEAKQQELKRIEEAKQKVVDQEQHLPEKQDTFAEKLVTQIIKNLQVKISSIHIRYEDDITNRDKPLSFGISLQNLSMQTTDQYWVPCLHDETEKLVRKLIRLDNLFAYWNVKSQMFYLSDYDNSLDDLKNGIVNENIVPEGYDFVFRPISANAKLVMNRRSDFDFSAPKINLEIELHNIAIEFNKPQYFSIMELLESVDMMAQNLPYRKFKPDVPLHHHAREWWAYAIHGVLEVNVCPRLWMWSWKHIRKHRQKVKQYKELYKKKLTSKKPPGELLVSLEELEKTLDVFNITIARQTAEVEVKKAGYKIYKEGVKDPEDNKGWFSWLWSWSEQNTNEQQPDVQPETLEEMLTPEEKALLYEAIGYSETAVDPTLLKTFEALKFFVHLKSMSIVLRENHQKPELVDIVIEEFSTLIVQRPGAQAIKFETKIDSFHITGLPDNSEKPRLLSSLDDAMSLFQITFEINPLDETVSQRCIIEAEPLEIIYDARTVNSIVEFFRPPKEVHLAQLTAATLTKLEEFRSKTATGLLYIIETQKVLDLKINLKASYIIVPQDGIFSPTSNLLLLDLGHLKVTSKSRSELPDVKQGEANLKEIMDRAYDSFDIQLTSVQLLYSRVGDNWREARKLSVSTQHILVPMHFNLELSKAMVFMDVRMPKFKIYGKLPLISLRISDKKLQGIMELIESIPKPEPVTEVSAPVKSFQIQTSTSLGTSQISQKIIPLLELPSVSEDDSEEEFFDAPCSPLEEPLQFPTGVKSIRTRKLQKQDCSVNMTTFKIRFEVPKVLIEFYHLVGDCELSVVEILVLGLGAEIEIRTYDLKANAFLKEFCLKCPEYLDENKKPVYLVTTLDNTMEDLLTLEYVKAEKNVPDLKSTYNNVLQLIKVNFSSLDIHLHTEALLNTINYLHNILPQSEEKSAPVSTTETEDKGDVIKKLALKLSTNEDIITLQILAELSCLQIFIQDQKCNISEIKIEGLDSEMIMRPSETEINAKLRNIIVLDSDITAIYKKAVYITGKEVFSFKMVSYMDATAGSAYTDMNVVDIQVNLIVGCIEVVFVTKFLYSILAFIDNFQAAKQALAEATVQAAGMAATGVKELAQRSSRMALDINIKAPVVVIPQSPVSENVFVADFGLITMTNTFHMITESQSSPPPVIDLITIKLSEMRLYRSRFINDAYQEVLDLLLPLNLEVVVERNLCWEWYQEVPCFNVNAQLKPMEFILSQEDITTIFKTLHGNIWYEKDGSASPAVTKDQYSATSGVTTNASHHSGGATVVTAAVVEVHSRALLVKTTLNISFKTDDLTMVLYSPGPKQASFTDVRDPSLKLAEFKLENIISTLKMYTDGSTFSSFSLKNCILDDKRPHVKKATPRMIGLTVGFDKKDMMDIKYRKVRDGCVTDAVFQEMYICASVEFLQTVANVFLEAYTTGTAVETSVQTWTAKEEVPTQESVKWEINVIIKNPEIVFVADMTKNDAPALVITTQCEICYKGNLENSTMTAAIKDLQVRACPFLPVKRKGKITTVLQPCDLFYQTTQKGTDPQVIDMSVKSLTLKVSPVIINTMITITSALYTTKETIPEETASSTAHLWEKKDTKTLKMWFLEESNETEKIAPTTELVPKGEMIKMNIDSIFIVLEAGIGHRTVPMLLAKSRFSGEGKNWSSLINLHCQLELEVHYYNEMFGVWEPLLEPLEIDQTEDFRPWNLGIKMKKKAKMAIVESDPEEENYKVPEYKTVISFHSKDQLNITLSKCGLVMLNNLVKAFTEAATGSSADFVKDLAPFMILNSLGLTISVSPSDSFSVLNIPMAKSYVLKNGESLSMDYIRTKDNDHFNAMTSLSSKLFFILLTPVNHSTADKIPLTKVGRRLYTVRHRESGVERSIVCQIDTVEGSKKVTIRSPVQIRNHFSVPLSVYEGDTLLGTASPENEFNIPLGSYRSFIFLKPEDENYQMCEGIDFEEIIKNDGALLKKKCRSKNPSKESFLINIVPEKDNLTSLSVYSEDGWDLPYIMHLWPPILLRNLLPYKIAYYIEGIENSVFTLSEGHSAQICTAQLGKARLHLKLLDYLNHDWKSEYHIKPNQQDISFVSFTCVTEMEKTDLDIAVHMTYNTGQTVVAFHSPYWMVNKTGRMLQYKADGIHRKHPPNYKKPVLFSFQPNHFFNNNKVQLMVTDSELSNQFSIDTVGSHGAVKCKGLKMDYQVGVTIDLSSFNITRIVTFTPFYMIKNKSKYHISVAEEGNDKWLSLDLEQCIPFWPEYASSKLLIQVERSEDPPKRIYFNKQENCILLRLDNELGGIIAEVNLAEHSTVITFLDYHDGAATFLLINHTKNELVQYNQSSLSEIEDSLPPGKAVFYTWADPVGSRRLKWRCRKSHGEVTQKDDMMMPIDLGEKTIYLVSFFEGLQRIILFTEDPRVFKVTYESEKAELAEQEIAVALQDVGISLVNNYTKQEVAYIGITSSDVVWETKPKKKARWKPMSVKHTEKLEREFKEYTESSPSEDKVIQLDTNVPVRLTPTGHNMKILQPHVIALRRNYLPALKVEYNTSAHQSSFRIQIYRIQIQNQIHGAVFPFVFYPVKPPKSVTMDSAPKPFTDVSIVMRSAGHSQISRIKYFKVLIQEMDLRLDLGFIYALTDLMTEAEVTENTEVELFHKDIEAFKEEYKTASLVDQSQVSLYEYFHISPIKLHLSVSLSSGREEAKDSKQNGGLIPVHSLNLLLKSIGATLTDVQDVVFKLAFFELNYQFHTTSDLQSEVIRHYSKQAIKQMYVLILGLDVLGNPFGLIREFSEGVEAFFYEPYQGAIQGPEEFVEGMALGLKALVGGAVGGLAGAASKITGAMAKGVAAMTMDEDYQQKRREAMNKQPAGFREGITRGGKGLVSGFVSGITGIVTKPIKGKYRAQKGGAAGFFKGVGKGLVGAVARPTGGIIDMASSTFQGIKRATETSEVESLRPPRFFNEDGVIRPYRLRDGTGNQMLQVMENGRFAKYKYFTHVMINKTDMLMITRRGVLFVTKGTFGQLTCEWQYSFDEFTKEPFIVHGRRLRIEAKERVKSVFHAREFGKIINFKTPEDARWILTKLQEAREPSPSL

SEQ ID NO: 10722 - protein, 2156 aa, Homo sapiens
MSDTPSTGFSIIHPTSSEGQVPPPRHLSLTHPVVAKRISFYKSGDPQFGGVRVVVNPRSFKSFDALLDNLSRKVPLPFGVRNISTPRGRHSITRLEELEDGESYLCSHGRKVQPVDLDKARRRPRPWLSSRAISAHSPPHPVAVAAPGMPRPPRSLVVFRNGDPKTRRAVLLSRRVTQSFEAFLQHLTEVMQRPVVKLYATDGRRVPSLQAVILSSGAVVAAGREPFKPGNYDIQKYLLPARLPGISQRVYPKGNAKSESRKISTHMSSSSRSQIYSVSSEKTHNNDCYLDYSFVPEKYLALEKNDSQNLPIYPSEDDIEKSIIFNQDGTMTVEMKVRFRIKEEETIKWTTTVSKTGPSNNDEKSEMSFPGRTESRSSGLKLAACSFSADVSPMERSSNQEGSLAEEINIQMTDQVAETCSSASWENATVDTDIIQGTQDQAKHRFYRPPTPGLRRVRQKKSVIGSVTLVSETEVQEKMIGQFSYSEERESGENKSEYHMFTHSCSKMSSVSNKPVLVQINNNDQMEESSLERKKENSLLKSSAISAGVIEITSQKMLEMSHNNGLPSTISNNSIVEEDVVDCVVLDNKTGIKNFKTYGNTNDRFSPISADATHFSSNNSGTDKNISEAPASEASSTVTARIDRLINEFAQCGLTKLPKNEKKILSSVASKKKKKSRQQAINSRYQDGQLATKGILNKNERINTKGRITKEMIVQDSDSPLKGGILCEEDLQKSDTVIESNTFCSKSNLNSTISKNFHRNKLNTTQNSKVQGLLTKRKSRSLNKISLGAPKKREIGQRDKVFPHNESKYCKSTFENKSLFHVFNILEQKPKDFYAPQSQAEVASGYLRGMAKKSLVSKVTDSHITLKSQKKRKGDKVKASAILSKQHATTRANSLASLKKPDFPEAIAHHSIQNYIQSWLQNINPYPTLKPIKSAPVCRNETSVVNCSNNSFSGNDPHTNSGKISNFVMESNKHITKIAGLTGDNLCKEGDKSFIANDTGEEDLHETQVGSLNDAYLVPLHEHCTLSQSAINDHNTKSHIAAEKSGPEKKLVYQEINLARKRQSVEAAIQVDPIEEETPKDLLPVLMLHQLQASVPGIHKTQNGVVQMPGSLAGVPFHSAICNSSTNLLLAWLLVLNLKGSMNSFCQVDAHKATNKSSETLALLEILKHIAITEEADDLKAAVANLVESTTSHFGLSEKEQDMVPIDLSANCSTVNIQSVPKCSENERTQGISSLDGGCSASEACAPEVCVLEVTCSPCEMCTVNKAYSPKETCNPSDTFFPSDGYGVDQTSMNKACFLGEVCSLTDTVFSDKACAQKENHTYEGACPIDETYVPVNVCNTIDFLNSKENTYTDNLDSTEELERGDDIQKDLNILTDPEYKNGFNTLVSHQNVSNLSSCGLCLSEKEAELDKKHSSLDDFENCSLRKFQDENAYTSFDMEEPRTSEEPGSITNSMTSSERNISELESFEELENHDTDIFNTVVNGGEQATEELIQEEVEASKTLELIDISSKNIMEEKRMNGIIYEIISKRLATPPSLDFCYDSKQNSEKETNEGETKMVKMMVKTMETGSYSESSPDLKKCIKSPVTSDWSDYRPDSDSEQPYKTSSDDPNDSGELTQEKEYNIGFVKRAIEKLYGKADIIKPSFFPGSTRKSQVCPYNSVEFQCSRKASLYDSEGQSFGSSEQVSSSSSMLQEFQEERQDKCDVSAVRDNYCRGDIVEPGTKQNDDSRILTDIEEGVLIDKGKWLLKENHLLRMSSENPGMCGNADTTSVDTLLDNNSSEVPYSHFGNLAPGPTMDELSSSELEELTQPLELKCNYFNMPHGSDSEPFHEDLLDVRNETCAKERIANHHTEEKGSHQSERVCTSVTHSFISAGNKVYPVSDDAIKNQPLPGSNMIHGTLQEADSLDKLYALCGQHCPILTVIIQPMNEEDRGFAYRKESDIENFLGFYLWMKIHPYLLQTDKNVFREENNKASMRQNLIDNAIGDIFDQFYFSNTFDLMGKRRKQKRINFLGLEEEGNLKKFQPDLKERFCMNFLHTSLLVVGNVDSNTQDLSGQTNEIFKAVDENNNLLNNRFQGSRTNLNQVVRENINCHYFFEMLGQACLLDICQVETSLNISNRNILELCMFEGENLFIWEEEDILNLTDLESSREQEDL

SEQ ID NO: 10723 - protein, 431 aa, Homo sapiens
  VARIANT 302, 305, 381: Xaa = Any Amino Acid
MGNGEKHLERRALAKSAGYVGALGFASLPDSTRFTTRFTFSTNYQSLGSVQPPSYGVQLVSSAASVYAGAGGSGSRISMSRSTNFQGCLGSGGLAAGLAGGLERMGGIHKEKETMQSLNDCLASYLDRVRSQETENQKLENKIWEHLEKKGPQVRDWGHYFKTIEELRTQIFANTVDNARIVLQINNARLAADDFRVKYETGLAMRQSVESEIHGLCKVTDDTNVTRLQLETEIEALKEELLFMKKNHKEEVKGLQAQIASSGLTMEVDAPKSQNLTKIMADIRAQYKELARKNQEELDKYXSQXIEESTTVVTTQSAEVEAAEVTLKEPRHTIQSLEIDLNSLRDLKASLENSLKGQLQAQECQALLNIKVKQEAEITTXRCLLEDGEEFSLGDALNSSNSMQTTQKTTTHHIVDGKVVSETNDSKVLRH

SEQ ID NO: 10724 - protein, 769 aa, Homo sapiens
MAQWNQLQQLDTRYLEQLHQLYSDSFPMELRQFLAPWIESQDWAYAASKESHATLVFHNLLGEIDQQYSRFLQESNVLYQHNLRRIKQFLQSRYLEKPMEIARIVARCLWEESRLLQTAATAAQQGGQANHPTAAVVTEKQQMLEQHLQDVRKRVQDLEQKMKVVENLQDDFDFNYKTLKSQGDMQDLNGNNQSVTRQKMQQLEQMLTALDQMRRSIVSELAGLLSAMEYVQKTLTDEELADWKRRQQIACIGGPPNICLDRLENWITSLAESQLQTRQQIKKLEELQQKVSYKGDPIVQHRPMLEERIVELFRNLMKSAFVVERQPCMPMHPDRPLVIKTGVQFTTKVRLLVKFPELNYQLKIKVCIDKDSGDVAALRGSRKFNILGTNTKVMNMEESNNGSLSAEFKHLTLREQRCGNGGRANCDASLIVTEELHLITFETEVYHQGLKIDLETHSLPVVVISNICQMPNAWASILWYNMLTNNPKNVNFFTKPPIGTWDQVAEVLSWQFSSTTKRGLSIEQLTTLAEKLLGPGVNYSGCQITWAKFCKENMAGKGFSFWVWLDNIIDLVKKYILALWNEGYIMGFISKERERAILSTKPPGTFLLRFSESSKEGGVTFTWVEKDISGKTQIQSVEPYTKQQLNNMSFAEIIMGYKIMDATNILVSPLVYLYPDIPKEEAFGKYCRPESQEHPEADPGAAPYLKTKFICVTPTTCSNTIDLPMSPRTLDSLMQFGNNGEGAEPSAGGQFESLTFDMELTSECATSPM

SEQ ID NO: 10725 - protein, 776 aa, Homo sapiens
MAQWNQLQQLDTRYLEQLHQLYSDSFPMELRQFLAPWIESQDWAYAASKESHATLVFHNLLGEIDQQYSRFLQESNVLYQHNLRRIKQFLQSRYLEKPMEIARIVARCLWEESRLLQTAATAAQQGGQANHPTAAVVTEKQQMLEQHLQDVRKRVQDLEQKMKVVENLQDDFDFNYKTLKSQGVFSSFADMQDLNGNNQSVTRQKMQQLEQMLTALDQMRRSIVSELAGLLSAMEYVQKTLTDEELADWKRRQQIACIGGPPNICLDRLENWITSLAESQLQTRQQIKKLEELQQKVSYKGDPIVQHRPMLEERIVELFRNLMKSAFVVERQPCMPMHPDRPLVIKTGVQFTTKVRLLVKFPELNYQLKIKVCIDKDSGDVAALRGSRKFNILGTNTKVMNMEESNNGSLSAEFKHLTLREQRCGNGGRANCDASLIVTEELHLITFETEVYHQGLKIDLETHSLPVVVISNICQMPNAWASILWYNMLTNNPKNVNFFTKPPIGTWDQVAEVLSWQFSSTTKRGLSIEQLTTLAEKLLGPGVNYSGCQITWAKFCKENMAGKGFSFWVWLDNIIDLVKKYILALWNEGYIMGFISKERERAILSTKPPGTFLLRFSESSKEGGVTFTWVEKDISGKTQIQSVEPYTKQQLNNMSFAEIIMGYKIMDATNILVSPLVYLYPDIPKEEAFGKYCRPESQEHPEADPGSAAPYLKTKFICVTPTTCSNTIDLPMSPRTLDSLMQFGNNGEGAEPSAGGQFESLTFDMELTSECATSPM

SEQ ID NO: 10726 - protein, 475 aa, Homo sapiens
MISSKPRLVVPYGLKTLLEGISRAVLKTNPSNINQFAAAYFQELTMYRVEKWSEGTTPQKKLECLKEPGKTSVESKVPTQMEKSTDTDEDNVTRTEYSDKTTQFPSVYAVPGTEQTEAVGGLSSKPATPKTTTPPSSPPPTAVSPEFAYVPADPAQLAAQMLGKVSSIHSDQSDVLMVDVATSMPVVIKEVPSSEAAEDVMVAAPLVCSGKVLEVQVVNQTSVHVDLGSQPKENEAEPSTASSVPLQDEQEPPAYDQAPEVTLQADIEVMSTVHISSVYNDVPVTEGVVYIEQLPEQIVIPFTDQVACLKENEQSKENEQSPRVSPKSVVEKTTSGMSKKSVESVKLAQLEENAKYSSVYMEAEATALLSDTSLKGQPEVPAQLLDAEGAIKIGSEKSLHLEVEVTSIVSDNTGQEESGENSVPQEMEGRPVLSGEAAEAVHSGTSVKSSSGPFPPAPEGLTAPEIEPEGESTAE

SEQ ID NO: 10727 - protein, 493 aa, Homo sapiens
MISSKPRLVVPYGLKTLLEGISRAVLKTNPSNINQFAAAYFQELTMYRGNTTMDIKDLVKQFHQIKVEKWSEGTTPQKKLECLKEPGKTSVESKVPTQMEKSTDTDEDNVTRTEYSDKTTQFPSVYAVPGTEQTEAVGGLSSKPATPKTTTPPSSPPPTAVSPEFAYVPADPAQLAAQMLGKVSSIHSDQSDVLMVDVATSMPVVIKEVPSSEAAEDVMVAAPLVCSGKVLEVQVVNQTSVHVDLGSQPKENEAEPSTASSVPLQDEQEPPAYDQAPEVTLQADIEVMSTVHISSVYNDVPVTEGVVYIEQLPEQIVIPFTDQVACLKENEQSKENEQSPRVSPKSVVEKTTSGMSKKSVESVKLAQLEENAKYSSVYMEAEATALLSDTSLKGQPEVPAQLLDAEGAIKIGSEKSLHLEVEVTSIVSDNTGQEESGENSVPQEMEGRPVLSGEAAEAVHSGTSVKSSSGPFPPAPEGLTAPEIEPEGESTAE

SEQ ID NO: 10728 - protein, 469 aa, Homo sapiens
ESQAGSLVESKARDAAEEVAPPLPMGASVPSIDSMMRKLEEMGLNLRKDQKKTKKRVSFSEQLFTEEAVAGAALLVEGHSSCPQELNPAWSVAGNASDGEPPESPHAEDSERESVTTPGPATCGAPASPADHLLLPSQEESFSEVPMSEASSAKDTPLFRMEGEDALVTQYQSKASDHEGLLSDPLSDLQLVSDFKSPIMADLNLSLPSIPEVASDDERIDQVEDDGDQVEDDGETAKSSTLDIGALSLGLVVPCPERGKGPSGEADRLVLGEGLCDFRLQAPQASVTAPSEQTTEFGIHKPHLGKSSSLDKQLPGPSGGEEEKPMGNGSPSPPPGTSLDNPVPSPSPSEIFPVTHSFPSSAHSDTHHTSTAESQKKATAEGSAGRVENFGKRKPLLQAWVSPSETHPVSAQPGAGTGSAKHRLHPVKPMNATATKVANCSLGTATIISENLNNEVMMKVCPLRSWCVR

SEQ ID NO: 10729 - protein, 649 aa, Homo sapiens
MSLMVSAGRGLGAVWSPTHVQVTVLQARGLRAKGPGGTSDAYAVIQVGKEKYATSVSERSLGAPVWREEATFELPSLLSSGPAAAATLQLTVLHRALLGLDKFLGRAEVDLRDLHRDQGRRKTQWYKLKSKPGKKDKERGEIEVDIQFMRNNMTASMFDLSMKDKSRNPFGKLKDKIKGKNKDSGSDTASAIIPSTTPSVDSDDESVVKDKKKKSKIKTLLSKSNLQKTPLSQSMSVLPTSKPEKVLLRPGDFQSQWDEDDNEDESSSASDVMSHKRTASTDLKQLNQVNFTLPKKEGLSFLGGLRSKNDVLSRSNVCINGNHVYLEQPQPTGEIKDSSPSSSPSPKGFRKKTLFSSTENLAAGSWKEPAEGGGLSTDRDVSESSTKDSLKSMTLPTYRPAPLISGDLREKMAPANSEATKEAKESKKPESRRSSLLSLMTGKKDVAKGSEGENLLTVPGREKEGMLMGVKPGEDASGPAEDLVRRSEKDTAAVVSRQGSSLNLFEDVQITEPEAEPESKSEPRPPISSPRAPQTRAVKPRLHPVKPMNATATKVANCSLGTATIISENLNNEVMMKKYSPSDPAFAYAQLTHDELIQLVLKQKETISKKEFQVRELEDYIDNLLVRVMEETPNILRIPTQVGKKAGKM

SEQ ID NO: 10730 - protein, 679 aa, Homo sapiens
MGIRGLMSFVEDHSNEFFTDLKLRDTKIVIDGYALFHRLCFSSNLDLRYGGDYDSFADVVQKFFESLFACNICPYVVLDGGCDISDKKLTTLKDRAREKIQMAHSLSVGGSGYVCPLLIREVFIQVLIKLRVCFVQCFSEADRDIMTLANHWNCPVLSSDSDFCIFDLKTGFCPLNSFQWRNMNTIKGTQNYIPAKCFSLDAFCHHFSNMNKALLPLFAVLCGNDHVNLPIMETFLSKARLPLGATSSKGRRHHRILGLLNWLSHFANPTEALDNVLKYLPKKDRENVKELLCCSMEEYQQSQVKLQDFFQCGTYVCPDALNLGLPEWVLVALAKGQLSPFISDALVLRRTILPTQVENMQQPNAHRISQPIRQIIYGLLLNASPHLDKTSWNALPPQPLAFSEVERINKNIRTSIIDAVELAKDHSDLSRLTELSLRRRQMLLLETLKVKQTILEPIPTSLKLPIAVSCYWLQHTETKAKLHHLQSLLLTMLVGPLIAIINSPGKEELQEDGAKMLYAEFQRVKAQTRLGTRLDLDTAHIFCQWQSCLQMGMYLNQLLSTPLPEPDLTRLYSGSLVHGLCQQLLASTSVESLLSICPEAKQLYEYLFNATRSYAPAEIFLPKGRSNSKKKRQKKQNTSCSKNRGRTTAHTKCWYEGNNRFGLLMVENLEEHSEASNIE

SEQ ID NO: 10731 - protein, 145 aa, Homo sapiens
MKEKLSKKRAEVKGNRSWLEEFLKPSDNEEGPPPKNKVLSNNASSQKPTHSSCIPLLRLPDKQQKVNESIKTDMLCTDKEEECPAASLLQKYTNNSEKPSGKRQCKTKHLISQDLRQGFLLTGKCYVENADGKIPLGTCFLLGLI

SEQ ID NO: 10732 - protein, 408 aa, Homo sapiens
MLQEQVSEYLGVTSFKRKYPERRDLSHKEKLYLRELNVITETQCTLGLTALRSDEVIDLMIKEYPAKHAEYSVILQEKERQRITDHYKEYSQMQQQNTQKVEASKVPEYIKKAAKKAAEFNSNLNRERMEERRAYFDLQTHVIQVPQGKYKVLPTERTKVSSYPVALIPGQFQEYYKRYSPDELRYLPLNTALYEPPLDPELPALDSDGDSDDGEDGRGDEKRKNKGTSDSSSGNVSEGESPPDSQEDSFQGRQKSKDKAATPRKDGPKRSVLSKSVPGYKPKVIPNAICGICLKGKESNKKGKAESLIHCSQCENSGHPSCLDMTMELVSMIKTYPWQCMECKTCIICGQPHHEEEMMFCDMCDRGYHTFCVGLGAIPSGRWICDCCQRAPPTPRKVGRRGKNSKEG

SEQ ID NO: 10733 - protein, 410 aa, Homo sapiens
MLQEQVSEYLGVTSFKRKYPDLERRDLSHKEKLYLRELNVITETQCTLGLTALRSDEVIDLMIKEYPAKHAEYSVILQEKERQRITDHYKEYSQMQQQNTQKVEASKVPEYIKKAAKKAAEFNSNLNRERMEERRAYFDLQTHVIQVPQGKYKVLPTERTKVSSYPVALIPGQFQEYYKRYSPDELRYLPLNTALYEPPLDPELPALDSDGDSDDGEDGRGDEKRKNKGTSDSSSGNVSEGESPPDSQEDSFQGRQKSKDKAATPRKDGPKRSVLSKSVPGYKPKVIPNAICGICLKGKESNKKGKAESLIHCSQCENSGHPSCLDMTMELVSMIKTYPWQCMECKTCIICGQPHHEEEMMFCDMCDRGYHTFCVGLGAIPSGRWICDCCQRAPPTPRKVGRRGKNSKEG

SEQ ID NO: 10734 - protein, 536 aa, Homo sapiens
MDEERALYIVRAGEAGAIERVLRDYSDKHRATFKFESTDEDKRKKLCEGIFKVLIKDIPTTCQVSCLEVLRILSRDKKVLVPVTTKENMQILLRLAKLNELDDSLEKVSEFPVIVESLKCLCNIVFNSQMAQQLSLELNLAAKLCNLLRKCKDRKFINDIKCFDLRLLFLLSLLHTDIRSQLRYELQGLPLLTQILESAFSIKWTDEYESAIDHNGPPLSPQETDCAIEALKALFNVTVDSWKVHKESDSHQFRVMAAVLRHCLLIVGPTEDKTEELHSNAVNLLSNVPVSCLDVLICPLTHEETAQEATTLDELPSNKTAEKETVLKNNTMVYNGMNMEAIHVLLNFMEKRIDKGSSYREGLTPVLSLLTECSRAHRNIRKFLKDQVLPPLRDVTNRPEVGSTVRNKLVRLMTHVDLGVKQIAAEFLFVLCKERVDSLLKYTGYGNAAGLLAARGLLAGGRGDNWYSEDEDTDTEEYKNAKPNINLITGHLEEPMPNPIDEMTEEQKEYEAMKLVNMLDKLSRRADVKDLHQDGG

SEQ ID NO: 10735 - protein, 563 aa, Homo sapiens
RGLGPPSWQEAKRQRFLSRGQQVQSCWCSRSPDPTPIPSGAGVRARPTTALTMVLLAAAVCTKAGKAIVSRQFVEMTRTRIEGLLAAFPKLMNTGKQHTFVETESVRYVYQPMEKLYMVLITTKNSNILEDLETLRLFSRVIPEYCRALEENEISEHCFDLIFAFDEIVALGYRENVNLAQIRTFTEMDSHEEKVFRAVRETQEREAKAEMRRKAKELQQARRDAERQGKKAPGFGGFGSSAVSGGSTAAMITETIIETDKPKVAPAPARPSGPSKALKLGAKGKEVDNFVDKLKSEGETIMSSSMGKRTSEATKMHAPPINMESVHMKIEEKITLTCGRDGGLQNMELHGMIMLRISDDKYGRIRLHVENEDKKGVQLQTHPNVDKKLFTAESLIGLKNPEKSFPVNSDVGVLKWRLQTTEESFIPLTINCWPSESGNGCDVNIEYELQEDNLELNDVVITIPLPSGVGAPVIGEIDGEYRHDSRRNTLEWCLPVIDAKNKSGSLEFSIAGQPNDFFPVQVSFVSKKNYCNIQVTKVTQVDGNSPVRFSTETTFLVDKYEIL

SEQ ID NO: 10736 - protein, 141 aa, Homo sapiens
MNARGLGSELKDSIPVTELSASGPFESHDLLRKGFSCVKNELLPSHPLELSEKNFQLNQDKMNFSTLRNIQGLFAPLKLQMEFKAVQQVQRLPFLSSSNLSLDVLRGNDETIGFEDILNDPSQSEVMGEPHLMVEYKLGLL

SEQ ID NO: 10737 - protein, 505 aa, Homo sapiens
MKIAVIGQSLFGQEVYCHLRKEGHEVVGVFTVPDKDGKADPLGLEAEKDGVPVFKYSRWRAKGQALPDVVAKYQALGAELNVLPFCSQFIPMEIISAPRHGSIIYHPSLLPRHRGASAINWTLIHGDKKGGFSIFWADDGLDTGDLLLQKECEVLPDDTVSTLYNRFLFPEGIKGMVQAVRLIAEGKAPRLPQPEEGATYEGIQKKETAKINWDQPAEAIHNWIRGNDKVPGAWTEACEQKLTFFNSTLNTSGLVPEGDALPIPGAHRPGVVTKAGLILFGNDDKMLLVKNIQLEDGKMILASNFFKGAASSVLELTEAELVTAEAVRSVWQRILPKVLEVEDSTDFFKSGAASVDVVRLVEEVKELCDGLELENEDVYMASTFGDFIQLLVRKLRGDDEEGECSIDYVEMAVNKRTVRMPHQLFIGGEFVDAEGAKTSETINPTDGSVICQVSLAQVTDVDKAVAAAKDAFENGRWGKISARDRGRLMYRAPPSPSTRPDPTAT

SEQ ID NO: 10738 - protein, 240 aa, Homo sapiens
IISAPRHGSIIYHPSLLPRHRGASAINWTLIHGDKKGGFSIFWADDGLDTGDLLLQKECEVLPDDTVSTLYNRFLFPEGIKGMAVRLIAEGKAPRLPQPEEGATYEGIQKKETAKINWDQPAEAIHNWIRGNDKVPGAWTEACEQKLTFFNSTLNTSGLVPEGDALPIPGAHRPGVVTKAGLILFGNDDKMVRARLWVTCLLKATHAPVLGLRPHRKTLGSSGENGKNQTQEGTLTLICP

SEQ ID NO: 10739 - protein, 902 aa, Homo sapiens [sequence omitted]

SEQ ID NO: 10740 - protein, 628 aa, Homo sapiens
KFEISVSAEPSVHLQAIMSCKKQRSRKHSVNEKCNMKIEHYFSPVSKEQQNNCSTSLMRMESRGDPRATTNTQAQRFHSPKKNPEDQTMPQNRTIYVTLKVNHRRNQDMKLKLTHSENSSLYMALNTLQAVRKEIETHQGQEMLVRGTEGIKEYINLGMPLSCFPEGGQVVITFSQSKSKQKEDNHIFGRQDKASTECVKFYIHAIGIGKCKRRIVKCGKLHKKGRKLCVYAFKGETIKDALCKDGRFLSFLENDDWKLIENNDTILESTQPVDELEGRYFQVEVEKRMVPSAAASQNPESEKRNTCVLREQIVAQYPSLKRESEKIIENFKKKMKVKNGETLFELHRTTFGKVTKNSSSIKVVKLLVRLSDSVGYLFWDSATTGYATCFVFKGLFILTCRHVIDSIVGDGIEPSKWATIIGQCVRVTFGYEELKDKETNYFFVEPWFEIHNEELDYAVLKLKENGQQVPMELYNGITPVPLSGLIHIIGHPYGEKKQIDACAVIPQGQRAKKCQERVQSKKAESPEYVHMYTQRSFQKIVHNPDVITYDTEFFFGASGSPVFDSKGSLVAMHAAGFAYTYQNETRSIIEFGSTMESILLDIKQRHKPWYEEVFVNQQDVEMMSDEDL

SEQ ID NO: 10741 - protein, 953 aa, Homo sapiens
MAETLPGSGDSGPGTASLGPGVAETGTRRLSELRVIDLRAELKKRNLDTGGNKSVLMERLKKAVKEEGQDPDEIGIELEATSKKSAKRCVKGLKMEEEGTEDNGLEDDSRDGQEDMEASLENLQNMGMMDMSVLDETEVANSSAPDFGEDGTDGLLDSFCDSKEYVAAQLRQLPAQPPEHAVDGEGFKNTLETSSLNFKVTPDIEESLLEPENEKILDILGETCKSEPVKEESSELEQPFAQDTSSVGPDRKLAEEEDLFDSAHPEEGDLDLASESTAHAQSSKADSLLAVVKREPAEQPGDGERTDCEPVGLEPAVEQSSAASELAEASSEELAEAPTEAPSPEARDSKEDGRKFDFDACNEVPPAPKESSTSEGADQKMSSFKEEKDIKPIIKDEKGRVGSGSGRNLWVSGLSSTTRATDLKNLFSKYGKVVGAKVVTNARSPGARCYGFVTMSTSDEATKCISHLHRTELHGRMISVEKAKNEPAGKKLSDRKECEVKKEKLSSVDRHHSVEIKIEKTVIKKEEKIEKKEEKKPEDIKKEEKDQDELKPGPTNRSRVTKSGSRGMERTVVMDKSKGEPVISVKTTSRSKERSSKSQDRKSESKEKRDILSFDKIKEQRERERQRQREREIRETERRREREQREREQRLEAFHERKEKARLQRERLQLECQRQRLERERMERERLERERMRVERERRKEQERIHREREELRRQQEQLRYEQERRPGRRPYDLDRRDDAYWPEGKRVAMEDRYRADFPRPDHRFHDFDHRDRGQYQDHAIDRREGSRPMMGDHRDGQHYGDDRHGHGGPPERHGRDSRDGWGGYGSDKRLSEGRGLPPPPRGGRDWGEHNQRLEEHQARAWQGAMDAGAASREHARWQGGERGLSGPSGPGHMASRGGVAGRGGFAQGGHSQGHVVPGGGLEGGGVASQDRGSRVPHPHPHPPPYPHFTRRY

SEQ ID NO: 10742 - protein, 1328 aa, Homo sapiens
MESRDPAQPMSPGEATQSGARPADRYGLLKHSREFLDFFWDIAKPEQETRLAATEKLLEYLRGRPKGSEMKYALKRLITGLGVGRETARPCYSLALAQLLQSFEDLPLCSILQQIQEKYDLHQVKKAMLRPALFANLFGVLALFQSGRLVKDQEALMKSVKLLQALAQYQNHLQEQPRKALVDILSEVSKATLQEILPEVLKADLNIILSSPEQLELFLLAQQKVPSKLKKLVGSVNLFSDENVPRLVNVLKMAASSVKKDRKLPAIALDLLRLALKEDKFPRFWKEVVEQGLLKMQFWPASYLCFHLLGAALPLLTKEQLHLVMQGDVIRHYGEHVCTAKLPKQFKFAPEMDDYVGTFLEGCQDDPERQLAVLVAFSSVTNQGLPVTPTFWRVVRFLSPPALQGYVAWLRAMFLQPDLDSLVDFSTNNQKKAQDSSLHMPERAVFRLRKWIIFRLVSIVDSLHLEMEEALTEQVARFCLFHSFFVTKKPTSQIPETKHPFSFPLENQAREAVSSAFFSLLQTLSTQFKQAPGQTQGGQPWTYHLVQFADLLLNHSHNVTTVTPFTAQQHQAWDRMLQTLKELEAHSAEARAAAFQHLLLFVGIHLLKSPAESCDLLGDIQTCIRKSLGEKPRRSRTKTIDPQEPPWVEVLVEILLALLAQPSHLMRQVARSVFGHICSHLTPRALQLILDVLNPETSEDENDRVVVTDDSDERRLKGAEDKSEEGEDNRSSESEEESEGEESEEEERDGDVDQGFREQLMTVLQAGKALGGEDSENEEELGDEAMMALDQSLASLFAEQKLRIQARRDEKNKLQKEKALRRDFQIRVLDLVEVLVTKQPENALVLELLEPLLSIIRRSLRSSSSKQEQDLLHKTARIFTHHLCRARRYCHDLGERAGALHAQVERLVQQAGRQPDSPTALYHFNASLYLLRVLKGNTAEGCVHETQEKQKAGTDPSHMPTGPQAASCLDLNLVTRVYSTALSSFLTKRNSPLTVPMFLSLFSRHPVLCQSLLPILVQHITGPVRPRHQACLLLQKTLSMREVRSCFEDPEWKQLMGQVLAKVTENLRVLGEAQTKAQHQQALSSLELLNVLFRTCKHEKLTLDLTVLLGVLQGQQQSLQQGAHSTGSSRLHDLYWQAMKTLGVQRPKLEKKDAKEIPSATQSPISKKRKKKGFLPETKKRKKRKSEDGTPAEDGTPAATGGSQPPSMGRKKRNRTKAKVPAQANGTPTTKSPAPGAPTRSPSTPAKSPKLQKKNQKPSQVNGAPGSPTEPAGQKQHQKALPKKGVLGKSPLSALARKKARLSLVIRSPSLLQSGAKKKAQVRKAGKP

SEQ ID NO: 10743 - protein, 737 aa, Homo sapiens
MPGKLLWGDIMELEAPLEESESQKKERQKSDRRKSRHHYDSDEKSETRENGVTDDLDAPKAKKSKMKEKLNGDTEEGFNRLSDEFSKSHKSRRKDLPNGDIDEYEKKSKRVSSLDTSTHKSSDNKLEETLTREQKEGAFSNFPISEETIKLLKGRGVTYLFPIQVKTFGPVYEGKDLIAQARTGTGKTFSFAIPLIERLQRNQETIKKSRSPKVLVLAPTRELANQVAKDFKDITRKLSVACFYGGTSYQSQINHIRNGIDILVGTPGRIKDHLQSGRLDLSKLRHVVLDEVDQMLDLGFAEQVEDIIHESYKTDSEDNPQTLLFSATCPQWVYKVAKKYMKSRYEQVDLVGKMTQKAATTVEHLAIQCHWSQRPAVIGDVLQVYSGSEGRAIIFCETKKNVTEMAMNPHIKQNAQCLHGDIAQSQREITLKGFREGSFKVLVATNVAARGLDIPEVDLVIQSSPPQDVESYIHRSGRTGRAGRTGICICFYQPRERGQLRYVEQKAGITFKRVGVPSTMDLVKSKSMDAIRSLASVSYAAVDFFRPSAQRLIEEKGAVDALAAALAHISGASSFEPRSLITSDKGFVTMTLESLEEIQDVSCAWKELNRKLSSNAVSQITRMCLLKGNMGVCFDVPTTESERLQAEWHDSDWILSVPAKLPEIEEYYDGNTSSNSRQRSGWSSGRSGRSGRSGGRSGGRSGRQSRQGSRSGSRQDGRRRSGNRNRSRSGGHKRSFD

SEQ ID NO: 10744 - protein, 441 aa, Homo sapiens
MEQPQEEAPEVREEEEKEEVAEAEGAPELNGGPQHALPSSSYTDLSRSSSPPSLLDQLQMGCDGASCGSLNMECRVCGDKASGFHYGVHACEGCKGFFRRTIRMKLEYEKCERSCKIQKKNRNKCQYCRFQKCLALGMSHNAIRFGRMPEAEKRKLVAGLTANEGSQYNPQVADLKAFSKHIYNAYLKNFNMTKKKARSILTGKASHTAPFVIHDIETLWQAEKGLVWKQLVNGLPPYKEISVHVFYRCQCTTVETVRELTEFAKSIPSFSSLFLNDQVTLLKYGVHEAIFAMLASIVNKDGLLVANGSGFVTREFLRSLRKPFSDIIEPKFEFAVKFNALELDDSDLALFIAAIILCGDRPGLMNVPRVEAIQDTILRALEFHLQANHPDAQYLFPKLLQKMADLRQLVTEHAQMMQRIKKTETETSLHPLLQEIYKDMY

SEQ ID NO: 10745 - protein, 361 aa, Homo sapiens
MEQPQEEAPEVREEEEKEEVAEAEGAPELNGGPQHALPSSSYTDLSRSSSPPSLLDQLQMGCDGASCGSLNMECRVCGDKASGFHYGVHACEGCKGFFRRTIRMKLEYEKCERSCKIQKKNRNKCQYCRFQKCLALGMSHNAIRFGRMPEAEKRKLVAGLTANEGSQYNPQVADLKAFSKHIYNAYLKNFNMTKKKARSILTGKASHTAPFVIHDIETLWQAEKGLVWKQLVNGLPPYKEISVHVFYRCQCTTVETVRELTEFAKSIPSFSSLFLNDQVTLLKYGVHEAIFAMLASIVNKDGLLVANGSGFVTREFLRSLRKPFSDIIEPKFEFAVKFNALELDDSDLALFIAAIILCGGE

SEQ ID NO: 10746 - protein, 1373 aa, Homo sapiens
QYVLLIPSVLQEGSLDKACAQLFNLTESVVLTVSLNYGEVQTKIFEENVTGENFFKCISFEVPQARSDPLAFITFSAKGATLNLEERRSVAIRSRENVVFVQTDKPTYKPGQKDVNGIAQFFLDTYTFTYPNITLKDPQNNRIFQWQNVTSFRNITQLSFQLISEPMFGDYWIVVKRNSRKTVTHQFAVKRYVLPKFEVTVNAPQTVTISDDEFQVDVCAKYTFGQPVQGKTQIRVCREYFSSSNCEKNDNEICEQFIAQLENGCVSQIVNTKVFQLYRSGLFMTFHVAVIVTEFGTGNYCMQISEKTSVFITQLLGTVNFENMDTFYRRGISYFGTLKFSDPNNVPMVNKLLQLELNDEFIGNYTTDENGEAQFSIDTSDIFDPEFNLKATYVRPKSCYLPSWLTPQYLDAHFLVSRFYSRTNSFLKIVPEPKQLECNHQKVVTVHYSLNSEAYEDDSNVKFFYLVSLSHDSGNFQHRISSSPIYTAWNGNFSFPLSISADLAPAAVLFVYTLHPSGEIVADSVRFQVDKCFKHKVNIKFSNEQGLPGSNASLYLQAAPVLFCALGAVDGNVLLLKSEQQLSAESVYNMVPSIEPYGYFYHGLNLDDGKEDPCIPQRDMFYNGLYYTPVSNYGDGDIYNIVRNMGLKVFTNLHYRKPEVCVMERRLPLPKPLYLETENYGPMHSVPSRIACRGENADYVEQAIIQTVRTNFPETWMWDLVSVDSSGSANLSFLIPDTITQWEASGFCVNGDVGFGISSTTTLEVSQPFFIEIASPFSVVQNEQFDLIVNAFSYLNTCVEISVQVEESQNYEANINTWKINGSEVIQAGGRKTNIWTIIPKKLGKVNITVVAESKQSSACPNEGMEQQKLNWKDTVVKSFLVEPEGIEKERTQSFLICTEGAKASKQGVLDLPNDVVEGSARGFFTVVGDILGLAMQNLVVLQMPYGGGEQNAALLASDTYVLDYLKSTEQLTEEVQSKAFFLLSNGYQRQLSFKNSDGSYSVFWQQNQKGSIWLSALTFKTLERMKKFVFIDENVQKQTLIWLSSQQKTSGCFKNDGQLFNHAWEGGDEEDISLTAYVVGMFFEAGLNSTFPALRNALFCLEAALDSGVTNGYNHAILAYAFALAGKEKQVESLLQTLDQSATKLNNVIYWERERKPKTEEFPSFIPWAPSAQTEKSCYVLLAVISRKIPDLTYASKIVQWLAQQMNSHGGFSSNQVINVGLILIAICGEEGLFSKNQNTVTFSSEGSSEIQFNGHNRLLVQRSEVTQAPGQYTVDVEGRGCTFIQATLKYNVLLPKKASGFSLSLEIVKNYSLTVFDLTVNLKYTGIRNKSSMVVIDVKMLSGFTPTMSSIEEVNNRSLIFHHKDSYIEYK

SEQ ID NO: 10747 - protein, 1278 aa, Homo sapiens
QYVLLIPSVLQEGSLDKACAQLFNLTESVVLTVSLNYGEVQTKIFEENVTGENFFKCISFEVPQARSDPLAFITFSAKGATLNLEERRSVAIRSRENVVFVQTDKPTYKPGQKACKNTLSYSQDPEGNRIQQWVNEESVGGILQLSFQLISEPILGWYEITVEMLNEKKTYHSFSVEEYVLPKFQMTVDAPENILVVDSEFKVNVCALYTYGEPVDGKVQLSVCRESTAYHSCAHLISSLCKNFTIQVRGYWSFLKVHALVTEDGTGVQLTGSKYVYIDSSVVKISFENMDMSYKQGLPYFGQIKLLNPDNSPIPNEVVQLHLKDKIVGNYTTDVNGIAQFFLDTYTFTYPNITLKATYVRPKSCYLPSWLTPQYLDAHFLVSRFYSRTNSFLKIVPEPKQLECNHQKVVTVHYSLNSEAYEDDSNVKFFYLVSLSHDSGNFQHRISSSPIYTAWNGNFSFPLSISADLAPAAVLFVYTLHPSGEIVADSVRFQVDKCFKHKVNIKFSNEQGLPGSNASLYLQAAPVLFCALGAVDGNVLLLKSEQQLSAESVSSLTSSFFMFLWTTRSLILQMISCMKRMNNIFFVSLKNMGLKVFTNLHYRKPEVCVMERRLPLPKPLYLETENYGPMHSVPSRIACRGENADYVEQAIIQTVRTNFPETWMWDLVSVDSSGSANLSFLIPDTITQWEASGFCVNGDVGFGISSTTTLEVSQPFFIEIASPFSVVQNEQFDLIVNAFSYLNTCVEISVQVEESQNYEANINTWKINGSEVIQAGGRKTNIWTIIPKKLGKVNITVVAESKQSSACPNEGMEQQKLNWKDTVVKSFLVEPEGIEKERTQSFLICTEGAKASKQGVLDLPNDVVEGSARGFFTVVGDILGLAMQNLVVLQMPYGGGEQNAALLASDTYVLDYLKSTEQLTEEVQSKAFFLLSNGYQRQLSFKNSDGSYSVFWQQNQKGSIWLSALTFKTLERMKKFVFIDENVQKQTLIWLSSQQKTSGCFKNDGQLFNHAWEFPALRNALFCLEAALDSGVTNGYNHAILAYAFALAGKEKQVESLLQTLDQSATKLNNVIYWERERKPKTEEFPSFIPWAPSAQTEKSCYVLLAVISRKIPDLTYASKIVQWLAQQMNSHGGFSSNQVINVGLILIAICGEEGLFSKNQNTVTFSSEGSSEIQFNGHNRLLVQRSEVTQAPGQYTVDVEGRGCTFIQATLKYNVLLPKKASGFSLSLEIVKNYSLTVFDLTVNLKYTGIRNKSSMVVIDVKMLSGFTPTMSSIEEV

SEQ ID NO: 10748 - protein, 893 aa, Homo sapiens [sequence omitted]

SEQ ID NO: 10749 - protein, 893 aa, Homo sapiens
MEKDDPPQLVTPTSVKAIILRIEAAQLTRAQEDISTQLSDILDNVNCVINRFQEELGYDLKENAKSQQRDPKGKKRFILLEKIASFSKDAMMKEKHLYDILRWLGDWGDTLTYEIGPRKSEEEAAALDEWIEVTEKVLPLSLIATKRGIESLTALCSTLIEGQKKRSQVSKRTFWQGWQGRSPQTSPSHPQPLSPEQMLQDQHTMNTKASEVTSMLQELLDSTMFSKGEVRAIRYMATVVENLNKALILQHKENRSLETKYRHLQMQATKELSSQRLHFQQFMEVLESRRDALLKQVEILGGRYHDLLLMKQALEFQLKKAQNATGQAEDLAEVSVDSPGPSERETLPRKETVMEESQQEPMKEEQLFSPLPPSPMAMIRDSGAIAAGHQPLSTMTVRSRVADVFGSKDTESLEPVLLPLVDRRFPKKWERPVAESLGHKDKDQEDYFQKGGLQIKFHCSKQLSLESSRQVTSESQEEPWEEEFGREMRRQLWLEEEEMWQQRQKKWALLEQEHQEKLRQWNLEDLAREQQRRWVQLEKEQESPRREPEQLGEDVERRIFTPTSRWRDLEKAELSLVPAPSRTQSAHQSRRPHLPMSPSTQQPALGKQRPMSSVEFTYRPRTRRVPTKPKKSASFPVTGTSIRRLTWPSLQISPANIKKKVYHMDMEAQRKNLQLLSEESELRLPHYLRSKALELTTTTMELGALRLQYLCHKYIFYRRLQSLRQEAINHVQIMKETEASYKAQNLYIFLENIDRLQSLRLQAWTDKQKGLEEKHRECLSSMVTMFPKLQLEWNVHLNIPEVTSPKPKKCKLPAASPRHIRPSGPTYKQPFLSRHRACVPLQMARQQGKQMEAVWKTEVASSSYAIEKKTPASLPRDQLRGHPDIPRLLTLDV

SEQ ID NO: 10750 - protein, 1514 aa, Homo sapiens
MMMARKQDVRIPTYNISVVGLSGTEKEKGQCGIGKSCLCNRFVRPSADEFHLDHTSVLSTSDFGGRVVNNDHFLYWGEVSRSLEDCVECKMHIVEQTEFIDDQTFQPHRSTALQPYIKRAAATKLASAEKLMYFCTDQLGLEQDFEQKQMPDGKLLVDGFLLGIDVSRGMNRNFDDQLKFVSNLYNQLAKTKKPIVVVLTKCDEGVERYIRDAHTFALSKKNLQVVETSARSNVNVDLAFSTLVQLIDKSPGKTKIIPYFEALKQQSQQIATAKDKYEWLVSRIVKNHNENWLSVSRKMQASPEYQDYDYLEGTQKAKKLFLQHIHRLKHEHIERRRKLYLAALPLAFEALIPNLDEIDHLGCIKAKKLLETKPEFLKWFVVLEETPWDATSHIDNMENERIPFDLMDTVPAEALYEAHLEKLRNERKRVEMRRAFKENLETSPFITPGKPWEEARSFIMNEDFYQWLEESVYTDIYGKHQKQIIDKAKEEFQELLLEYSELFYELELDAKPSKEKMGVIQDVLGEEQRFKAIYKSSKQSVDALILKHIHFVYHPTKETCPSCPACVDAKIEHLISSRFIRPSDRNQKNSLSDPNIDRINLVILGKDALPESWPMEIRALCTNDDKYVIDGKMYELSLRPIEGNVRLPVNSFQTPTFQPHGCLCLYNSKESLSYVVESIEKSRESTLGRRDNHLVHLPLTLILVNKRGDTSGETLHSLIQQGQQIASKLQCVFLDPASAGIGYGRNINEKQISQVLKGLLDSKRNLNLVSSTASIKDLADVDLRIVMCLMCGDPFSADDILFPVLQSQTCKSSHCGSNNSVLLELPIGLHKKRIELSVLSYHSSFSIRKSRLVHGYIVFYSAKRKASLAMLRAFLCEVQDIIPIQLVALTDGAVDVLDNDLSREQLTEGEEIAQEIDGRFTSIPCSQPQHKLEIFHPFFKDVVEKKNIIEATHMYDNAAEACSTTEEVFNSPRAGSPLSNSNLQDSEEDIEPSYSLFREDTSLPSLSKDHSKLSMELEGNDGLSFIMSNFESKLNNKVPPPVKPKPPVHFEITKGDLSYLDQGHRDGQRKSVSSSPWLPQDGFDPSDYAEPMDAVVKPRNEEENIYSVPHDSTQGKIITIRNINKAQSNGSGNGSDSEMDTSSLERGRKVSIVSKPVLYRTRCTRLGRFASYRTSFSVGSDDELGPIRKKEEDQASQGYKGDNAVIPYETDEDPRRRNILRSLRRNTKKPKPKPRPSITKATWESNYFGVPLTTVVTPEKPIPIFIERCIEYIEATGLSTEGIYRVSGNKSEIESLQRQFDQDHNLDLAEKDFTVNTVAGAMKSFFSELPDPLVPYNMQIDLVEAHKINDREQKLHALKEVLKKFPKENHEVFKYVISHLNKVSHNNKVNLMTSENLSICFWPTLMRPDFSTMDALTATRTYQTIIELFIQQCPFFFYNRPITEPPGARPSSPSAVASTVPFLTSTPVTSQPSPPQSPPPTPQSPMQPLLPSPLHPHRPTPQPSRNIPWQTKEH

SEQ ID NO: 10751 - protein, 1525 aa, Homo sapiens
MMMARKQDVRIPTYNISVVGLSGTEKEKGQCGIGKSCLCNRFVRPSADEFHLDHTSVLSTSDFGGRVVNNDHFLYWGEVSRSLEDCVECKMHIVEQTEFIDDQTFQPHRSTALQPYIKRAAATKLASAEKLMYFCTDQLGLEQDFEQKQMPDGKLLVDGFLLGIDVSRGMNRNFDDQLKFVSNLYNQLAKTKKPIVVVLTKCDEGVERYIRDAHTFALSKKNLQVVETSARSNVNVDLAFSTLVQLIDKSRGKTKIIPYFEALKQQSQQIATAKDKYEWLVSRIVKNHNENWLSVSRKMQASPEYQDYVYLEGTQKAKKLFLQHIHRLKHEHIERRRKLYLAALPLAFEALIPNLDEIDHLSCIKAKKLLETKPEFLKWFVVLEETPWDATSHIDNMENERIPFDLMDTVPAEQLYEAHLEKLRNERKRVEMRRAFKENLETSPFITPGKPWEEARSFIMNEDFYQWLEESVYMDIYGKHQKQIIDKAKEEFQELLLEYSELFYELELDAKPSKEKMGVIQDVLGEEQRFKALQKLQAERDALILKHIHFVYHPTKETCPSCPACVDAKIEHLISSRFIRPSDRNQKNSLSDPNIDRINLVILGKDGLARELANEIRALCTNDDKYVIDGKMYELSLRPIEGNVRLPVNSFQTPTFQPHGCLCLYNSKESLSYVVESIEKSRESTLGRRDNHLVHLPLTLILVNKRGDTSGETLHSLIQQGQQIASKLQCVFLDPASAGIGYGRNINEKQISQVLKGLLDSKRNLNLVSSTASIKDLADVDLRIVMCLMCGDPFSADDILFPVLQSQTCKSSHCGSNNSVLLELPIGLHKKRIELSVLSYHSSFSIRKSRLVHGYIVFYSAKRKASLAMLRAFLCEVQDIIPIQLVALTDGAVDVLDNDLSREQLTEGEEIAQEIDGRFTSIPCSQPQHKLEIFHPFFKDVVEKKNIIEATHMYDNAAEACSTTEEVFNSPRAGSPLCNSNLQDSEEDIEPSYSLFREDTSLPSLSKDHSKLSMELEGNDGLSFIMSNFESKLNNKVPPPVKPKPPVHFEITKGDLSYLDQGHRDGQRKSVSSSPWLPQDGFDPSDYAEPMDAVVKPRNEEENIYSVPHDSTQGKIITIRNINKAQSNGSGNGSDSEMDTSSLERGRKVSIVSKPVLYRTRCTRLGRFASYRTSFSVGSDDELGPIRKKEEDQASQGYKGDNAVIPYETDEDPRRRNILRSLRRNTKKPKPKPRPSITKATWESNYFGVPLTTVVTPEKPIPIFIERCIEYIEATGLSTEGIYRVSGNKSEMESLQRQFDQDHNLDLAEKDFTVNTVAGAMKSFFSELPDPLVPYNMQIDLVEAHKINDREQKLHALKEVLKKFPKENHEVFKYVISHLNKVSHNNKVNLMTSENLSICFWPTLMRPDFSTMDALTATRTYQTIIELFIQQCPFFFYNRPITEPPGARPSSPSAVASTVPFLTSTPVTSQPSPPQSPPPTPQSPMQPLLPSQLQAEHTLVWDSPLHPHRPTPQPSRNIPWQTKEH

SEQ ID NO: 10752 - protein, 1513 aa, Homo sapiens
MMMARKQDVRIPTYNISVVGLSGTEKEKGQCGIGKSCLCNRFVRPSADEFHLDHTSVLSTSDFGGRVVNNDHFLYWGEVSRSLEDCVECKMHIVEQTEFIDDQTFQPHRSTALQPYIKRAAATKLASAEKLMYFCTDQLGLEQDFEQKQMPDGKLLVDGFLLGIDVSRGMNRNFDDQLKFVSNLYNQLAKTKKPIVVVLTKCDEGVERYIRDAHTFALSKKNLQVVETSARSNVNVDLAFSTLVQLIDKSRGKTKIIPYFEALKQQSQQIATAKDKYEWLVSRIVKNHNENWLSVSRKMQASPEYQDYVYLEGTQKAKKLFLQHIHRLKHEHIERRRKLYLAALPLAFEALIPNLDEIDHLSCIKAKKLLETKPEFLKWFVVLEETPWDATSHIDNMENERIPFDLMDTVPAEQLYEAHLEKLRNERKRVEMRRAFKENLETSPFITPGKPWEEARSFIMNEDFYQWLEESVYMDIYGKHQKQIIDKAKEEFQELLLEYSELFYELELDAKPSKEKMGVIQDVLGEEQRFKALQKLQAERDALILKHIHFVYHPTKETCPSCPACVDAKIEHLISSRFIRPSDRNQKNSLSDPNIDRINLVILGKDGLARELANEIRALCTNDDKYVIDGKMYELSLRPIEGNVRLPVNSFQTPTFQPHGCLCLYNSKESLSYVVESIEKSRESTLGRRDNHLVHLPLTLILVNKRGDTSGETLHSLIQQGQQIASKLQCVFLDPASAGIGYGRNINEKQISQVLKGLLDSKRNLNLVSSTASIKDLADVDLRIVMCLMCGDPFSADDILFPVLQSQTCKSSHCGSNNSVLLELPIGLHKKRIELSVLSYHSSFSIRKSRLVHGYIVFYSAKRKASLAMLRAFLCEVQDIIPIQLVALTDGAVDVLDNDLSREQLTEGEEIAQEIDGRFTSIPCSQPQHKLEIFHPFFKDVVEKKNIIEATHMYDNAAEACSTTEEVFNSPRAGSPLCNSNLQDSEEDIEPSYSLFREDTSLPSLSKDHSKLSMELEGNDGLSFIMSNFESKLNNKVPPPVKPKPPVHFEITKGDLSYLDQGHRDGQRKSVSSSPWLPQDGFDPSDYAEPMDAVVKPRNEEENIYSVPHDSTQGKIITIRNINKAQSNGSGNGSDSEMDTSSLERGRKVSIVSKPVLYRTRCTRLGRFASYRTSFSVGSDDELGPIRKKEEDQASQGYKGDNAVIPYETDEDPRRRNILRSLRRNTKKPKPKPRPSITKATWESNYFGVPLTTVVTPEKPIPIFIERCIEYIEATGLSTEGIYRVSGNKSEMESLQRQFDQDHNLDLAEKDFTVNTVAGAMKSFFSELPDPLVPYNMQIDLVEAHKINDREQKLHALKEVLKKFPKENHEVFKYVISHLNKVSHNNKVNLMTSENLSICFWPTLMRPDFSTMDALTATRTYQTIIELFIQQCPFFFYNRPITEPPGARPSSPSAVASTVPFLTSTPVTSQPSPPQSPPPTPQSPMQPLLPSPLHPHRPTPQPSRNIPWQTKEH

SEQ ID NO: 10753 - protein, 158 aa, Homo sapiens
MEKALKIDTPQQGSIQDINHRVWVLQDQTLIAVPRKDRMSPVTIALISCRHVETLEKDRGNPIYLGLNGLNLCLMCAKVGDQPTLQLKEKDIMDLYNQPEPVKSFLFYHSQSGRNSTFESVAFPGWFIAVSSEGGCPLILTQELGKANTTDFGLTMLF

SEQ ID NO: 10754 - protein, 522 aa, Homo sapiens
MVDDKEKNMKCLTFFLMLPETVKNRSKKSSKKANTSSSSSNSSKLPPVCYEIITLKTKKKKMAADIFPRKKPANSSSTSVQQYHQQNLSNNNLIPAPNWQGLYPTIRERNAMMFNNDLMADVHFVVGPPGGTQRLPGHKYVLAVGSSVFHAMFYGELAEDKDEIRIPDVEPAAFLAMLKYIYCDEIDLAADTVLATLYAAKKYIVPHLARACVNFLETSLSAKNACVLLSQSCLFEEPDLTQRCWEVIDAQAELALKSEGFCDIDFQTLESILRRETLNAKEIVVFEAALNWAEVECQRQDLALSIENKRKVLGKALYLIRIPTMALDDFANGAAQSGVLTLNETNDIFLWYTAAKKPELQFVSKARKGLVPQRCHRFQSCAYRSNQWRYRGRCDSIQFAVDKRVFIAGFGLYGSSCGSAEYSAKIELKRQGVVLGQNLSKYFSDGSSNTFPVWFEYPVQIEPDTFYTASVILDGNELSYFGQEGMTEVQCGKVTVQFQCSSDSTNGTGVQGGQIPELIFYA

SEQ ID NO: 10755 - protein, 596 aa, Homo sapiens
MSNYSVSLVGPAPWGFRLQGGKDFNMPLTISSLKDGGKAAQANVRIGDVVLSIDGINAQGMTHLEAQNKIKGCTGSLNMTLQRASAAPKPEPVPVQKGEPKEVVKPVPITSPAVSKVTSTNNMAYNKAPRPFGSVSSPKVTSIPSPSSAFTPAHATTSSHASPSPVAAVTPPLFAASGLHANANLSADQSPSALSAGKTAVNVPRQPTVTSVCSETSQELAEGQRRGSQGDSKQQNGPPRKHIVERYTEFYHVPTHSDASKKRLIEDTEDWRPRTGTTQSRSFRILAQITGTEHLKESEADNTKKANNSQEPSPQLASLVASTRSMPESLDSPTSGRPGVTSLTTAAAFKPVGSTGVIKSPSWQRPNQGVPSTGRISNSATYSGSVAPANSALGQTQPSDQDTLVQRAEHIPAGKRTPMCAHCNQVIRGPFLVALGKSWHPEEFNCAHCKNTMAYIGFVEEKGALYCELCYEKFFAPECGRCQRKILGEVINALKQTWHVSCFVCVACGKPIRNNVFHLEDGEPYCETDYYALFGTICHGCEFPIEAGDMFLEALGYTWHDTCFVCSVCCESLEGQTFFSKKDKPLCKKHAHSVNF

SEQ ID NO: 10756 - protein, 261 aa, Homo sapiens
MAESHLQSSLITASQFFEIWLHFDADGSGYLEGKELQNLIQELQQARKKAGLELSPEMKTFVDQYGQRDDGKIGIVELAHVLPTEENFLLLFRCQQLKSCEEFMKTWRKYDTDHSGFIETEELKNFLKDLLEKANKTVDDTKLAEYTDLMLKLFDSNNDGKLELTEMARLLPVQENFLLKFQGIKMCGKEFNKAFELYDQDGNGYIDENELDALLKDLCEKNKQDLDINNITTYKKNIMALSDGGKLYRTDLALILCAGDN

SEQ ID NO: 10757 - protein, 714 aa, Homo sapiens
MAMNFGDHASGFRHNDVIRFINNEVLMDGSGPAFYVAFRSRPWNEVEDSLQAIVADSQVPRAIKRACTWSALALSVRVATRQREELLHHVRRLQRHAEERQATSWALTSQLQQLRLEHEVAATQLHLAQAALQQALNERDGLYGRLLQIERFPQAAPLAHEIMSGPQAEQNGAAACPLATEQQSDMVAMGTHANAQMPTPTDVLYVPGPLSPWAQGMQPPLPVPHPFPHPPPFPMKFPSLPPLPPAVVTGAEAAAVPLQMPPTEIHPPCPWPAVGFQEEMAPLWYQRSYIQEEDSKILQGSFPLGDSRSHSQGEGSERSQRMPLPGDSGCHNPLSESPQGTAPLGSSGCHSQEEGTEGPQGMDPLGNRERQNQKEGPKRARRMHTLVFRRSHKSEGPEGPQGTVPQGDSRSYSQEGCSDRAQEMATLVFIRRCKPEGPKRPQWTVPLGDSRSHIKEEGPEGPQRIVLQGDNRSYSQEGSPERAQGMATLVFSRSCKPEEGPERPQDTPLGDSRSHIKEEGPEGPQRIVLQGDNRSYSQEGSPERAQGMATLVFSRSCKPEEGPERPQDTPLGDSRSHIKEEGPEGPQRIVLQGDNRSYSQEGSRERAQGMATLVFSRSCKPEEGPERPQGTPLGDSRSHGVRESPKKWQPQRQKAKKPKVNKVSGSQQQEKPASFPVPVNWKCPWCKAINFSWRTACYKCKKACVPFESGGQTQ

SEQ ID NO: 10758 - protein, 170 aa, Homo sapiens
MPCSVESAKNCLGLVLSPPKRPWTHSRVTAMGSCIYYFFSAVDGCHPRLPGKPSHQAPPQGPPPGSCPCILRWVGICIFGVFQGKGNMADKAKPAKAANRTPPKSPGDPSKDWAAKKLSLELEDMCTEWCGRPSRGAVVLVRPRSGLLGSSGTRATFLKSCREAFKAKPH

SEQ ID NO: 10759 - protein, 219 aa, Homo sapiens
MADKAKPAKAANRTPPKSPGDPSKDRAAKRLSLESEGAGEGAAASPELSALEEAFRRFAVHGDARATGREMHGKNWSKLCKDCQVIDGRNVTVTDVDIVFSKIKGKSCRTITFEQFQEALEELAKKRFKDKSSEEAVREVHRLIEGKAPIISGVTKAISSPTVSRLTDTTKFTGSHKERFDPSGKGKGKAGRVDLVDESGYVSGYKHAGTYDQKVQGGK

SEQ ID NO: 10760 - protein, 1500 aa, Homo sapiens
MPNEGIPHSSQTQEQDCLQSQPVSNNEEMAIKQESGGDGEVEEYLSFRSVGDGLSTSAVGCASAAPRRGPALLHIDRHQIQAVEPSAQALELQGLGVDVYDQDVLEQGVLQQVDNAIHEASRASQLVDVEKEYRSVLDDLTSCTTSLRQINKIIEQLSPQAATSRDINRKLDSVKRQKYNKEQQLKKITAKQKHLQAILGGAEVKIELDHASLEEDAEPGPSSLGSMLMPVQETAWEELIRTGQMTPFGTQIPQKQEKKPRKIMLNEASGFEKYLADQAKLSFERKKQGCNKRAARKAPAPVTPPAPVQNKNKPNKKARVLSKKEERLKKHIKKLQKRALQFQGKVGLPKARRPWESDMRPEAEGDSEGEESEYFPTEEEEEEEDDEVEGAEADLSGDGTDYELKPLPKGGKRQKKVPVQEIDDDFFPSSGEEAEAASVGEGGGGGRKVGRYRDDGDEDYYKQRLRRWNKLRLQDKEKRLKLEDDSEESDAEFDEGFKVPGFLFKKLFKYQQTGVRWLWELHCQQAGGILGDEMGLGKTIQIIAFLAGLSYSKIRTRGSNYRQVLLCRLFEGLGPTVIVCPTTVMHQWVKEFHTWWPPFRVAILHETGSYTHKKEKLIRDVAHCHGILITSYSYIRLMQDDISRYDWHYVILDEGHKIRNPNAAVTLACKQFRTPHRIILSGSPMQNNLRELWSLFDFIFPGKLGTLPVFMEQFSVPITMGGYSNASPVQVKTAYKCACVLRDTINPYLLRRMKSDVKMSLSLPDKNEQVLFCRLTDEQHKVYQNFVDSKEVYRILNGEMQIFSGLIALRKICNHPDLFSGGPKNLKGLPDDELEEDQFGYWKRSGKMIVVESLLKIWHKQGQRVLLFSQSRQMLDILEVFLRAQKYTYLKMDGTTTIASRQPLITRYNEDTSIFVFLLTTRVGGLGVNLTGANRVVIYDPDWNPSTDTQARERAWRIGQKKQVTVYRLLTAGTIEEKIYHRQIFKQFLTNRVLKDPKQRRFFKSNDLYELFTLTSPDASQSTETSAIFAGTGSDVQTPKCHLKRRIQPAFGADHDVPKRKKFPASNISVNDATSSEEKSEAKGAEVNAVTSNRSDPLKDDPHMSSNVTSNDRLGEETNAVSGPEELSVISGNGECSNSSGTGKTSMPSGDESIDEKLGLSYKRERPSQAQTEAFWENKQMENNFYKHKSKTKHHSVAEEETLEKHLRPKQKPKNSKHCRDAKFEGTRIPHLVKKRRYQKQDSENKSEAKEQSNDDYVLEKLFKKSVGVHSVMKHDAIMDGASPDYVLVEAEANRVAQDALKALRLSRQRCLGAVSGVPTWTGHRGISGAPAGKKSRFGKKRNSNFSVQHPSSTSPTEKCQDGIMKKEGKDNVPEHFSGRAEDADSSSGPLASSSLLAKMRARNHLILPERLESESGHLQEASALLPTTEHDDLLVEMRNFIAFQAHTDGQASTREILQEFESKLSASQSCVFRELLRNLCTFHRTSGGEGIWKLKPEYC

SEQ ID NO: 10761 - protein, 1250 aa, Homo sapiens
MKPPQQSLYLLVDSVDEGCNITEGEQTSTSLSGTVAALLAGHHEFFPPWLLLLCSARKQSKAVTKMFTGFRKISLDDLRKAYIVKDVQQYILHRLDQEEALRQHLTKETAEMLNQLHIKSSGCFLYLERVLDGVVENFIMLREIRDIPGTLNGLYLWLCQRLFVRKQFAKVQPILNVILAACRPLTITELYHAVWTKNMSLTLEDFQRKLDILSKLLVDGLGNTKILFHYSFAEWLLDVKHCTQKYLCNAAEGHRMLAMSYTCQAKNLTPLEAQEFALHLINSNLQLETAELALWMIWNGTPVRDSLSTLIPKEQEVLQLLVKAGAHVNSEDDRTSCIVRQALEREDSIRTLLDNGASVNQCDSNGRTLLANAAYSGSLDVVNLLVSRGADLEIEDAHGHTPLTLAARQGHTKVVNCLIGCGANINHTDQDGWTALRSAAWGGHTEVVSALLYAGVKVDCADADSRTALRAAAWGGHEDIVLNLLQHGAEVNKADNEGRTALIAAAYMGHREIVEHLLDHGAEVNHEDVDGRTALSVAALCVPASKGHASVVSLLIDRGAEVDHCDKDGMTPLLVAAYEGHVDVVDLLLEGGADVDHTDNNGRTPLLAAASMGHASVVNTLLFWGAAVDSIDSEGRTVLSIASAQGNVEVVRTLLDRGLDENHRDDAGWTPLHMAAFEGHRLICEALIEQGARTNEIDNDGRIPFILASQEGHYDCVQILLENKSNIDQRGYDGRNALRVAALEGHRDIVELLFSHGADVNCKDADGRPTLYILALENQLTMAEYFLENGANVEASDAEGRTALHVSCWQGHMEMVQVLIAYHADVNAADNEKRSALQSAAWQGHVKVVQLLIEHGAVVDHTCNQGATALCIAAQEGHIDVVQVLLEHGADPNHADQFGRTAMRVAAKNGHSQIIKLLEKYGASSLNGCSPSPVHTMEQKPLQSLSSKVQSLTIKSNSSGSTGGGDMQPSLRGLPNGPTHAFSSPSESPDSTVDRQKSSLSNNSLKSSKNSSLRTTSSTATAQTVPIDSFHNLSFTEQIQQHSLPRSRSRQSIVSPSSTTQSLGQSHNSPSSEFEWSQVKPSLKSTKASKGGKSENSAKSGSAGKKAKQSNSSQPKVLEYEMTQFDRRGPIAKSGTAAPPKQMPAESQCKIMIPSAQQEIGRSQQQFLIHQQSGEQKKRNGIMTNPNYHLQSNQVFLGRVSVPRTMQDRGHQEVLEGYPSSETELSLKQALKLQIEGSDPSFNYKKETPL

SEQ ID NO: 10762 - protein, 312 aa, Homo sapiens [sequence omitted]

SEQ ID NO: 10763 - protein, 605 aa, Homo sapiens
TQEYILNLFQRYVDEGLHFINKKCSQAIPQVDISKVTTLCCLLESLILGKDGVNLAMEQTKLNTILCQTFVFCYLWSLGGNLTENYYDSFDTFIRTQFDDNPDARLPNSGDLWSIHMDFDTKRLDPWERIIPTFKYNRDVPFFEMLVPTTDTVRYGYLMEKLLAVKHSVLFTGITGVGKSVIAKGLLNKIQESAGYVPVYLNFSAQTSSARTQEIIESKLERKRKNILGAPGNKRIVIFVDDLNMPRLDRYGSQPPIELLRQYQDFGGFYDRNKLFWKEIQDVTIISACAPPGGGRNPVTPRFIRHFSMLCLPMPSEHSLKQIFQAILNGFLSDFPPAVKQTASSIVEASVEIYNKMSVDLLPTPAKSHYVFNLRDLSKCVQDKHFGIAIDLEYFLNKPIIFGDFIKANKADRIYDDMPDIEKTANVLQDYLDDYNLTNPKEVKLVFFQDAIEHVSRIARMIRQERGNALLVGVGGTGKQSLTRLAAHICGYKCLQIELSRGYNYDSFHEDLRKLYKMAGVEDKNMVFLFTDTQIVVEEFLEDINNILNSGEVPNLFEKDELEQVLAATRPRAKEVGISEGNRDEVGCARVVMWLYHKNVSSPFI

SEQ ID NO: 10764 - protein, 1174 aa, Homo sapiens
MYDADEDMQYDEDDDEITPDLWQEACWIVISSYFDEKGLVRQQLDSFDEFIQMSVQRIVEDAPPIDLQAEAQHASGEVEEPPRYLLKFEQIYLSKPTHWERDGAPSPMMPNEARLRNLTYSAPLYVDITKTVIKEGEEQLQTQHQKTFIGKIPIMLRSTYCLLNGLTDRDLCELNECPLDPGGYFIINGSEKVLIAQEKMATNTVYVFAKKDSKYAYTGECRSCLENSSRPTSTIWVSMLARGGQGAKKSAIGQRIVATLPYIKQEVPIIIVFRALGFVSDRDILEHIIYDFEDPEMMEMVKPSLDEAFVIQEQNVALNFIGSRGAKPGVTKEKRIKYAKEVLQKEMLPHVGVSDFCETKKAYFLGYMVHRLLLAALGRRELDDRDHYGNKRLDLAGPLLAFLFRGMFKNLLKEVRIYAQKFIDRGKDFNLELAIKTRIISDGLKYSLATGNWGDQKKAHQARAGVSQVLNRLTFASTLSHLRRLNSPIGRDGKLAKPRQLHNTLWGMVCPAETPEGHAVGLVKNLALMAYISVGSQPSPILEFLEEWSMENLEEISPAAIADATKIFVNGCWVGIHKDPEQLMNTLRKLRRQMDIIVSEVSMIRDIREREIRIYTDAGRICRPLLIVEKQKLLLKKRHIDQLKEREYNNYSWQDLVASGVVEYIDTLEEETVMLAMTPDDLQEKEVAYCSTYTHCEIHPSMILGVCASIIPFPDHNQSPRNTYQSAMGKQAMGVYITNFHVRMDTLAHVLYYPQKPLVTTRSMEYLRFRELPAGINSIVAIASYTGYNQEDSVIMNRSAVDRGFFRSVFYRSYKEQESKKGFDQEEVFEKPTRETCQGMRHAIYDKLDDDGLIAPGVRVSGDDVIIGKTVTLPENEDELESTNRRYTKRDCSTFLRTSETGIVDQVMVTLNQEGYKFCKIRVRSVRIPQIGDKFASRHGQKGTCGIQYRQEDMPFTCEGITPDIIINPHAIPSRMTIGHLIECLQGKVSANKGEIGDATPFNDAVNVQKISNLLSDYGYHLRGNEVLYNGFTGRKITSQIFIGPTYYQRLKHMVDDKIHSRARGPIQILNRQPMEGRSRDGGLRFGEMERDCQIAHGAAQFLRERLFEASDPYQVHVCNLCGIMAIANTRTHTYECRGCRNKTQISLVRMPYACKLLFQELMSMSIAPRMMSV

SEQ ID NO: 10765 - protein, 743 aa, Homo sapiens
MSLSMRDPVIPGTSMAYHPFLPHRAPDFAMSAVLGHQPPFFPALTLPPNGAAALSLPGALAKPIMDQLVGAAETGIPFSSLGPQAHLRPLKTMEPEEEVEDDPKVHLEAKELWDQFHKRGTEMVITKSGRRMFPPFKVRCSGLDKKAKYILLMDIIAADDCRYKFHNSRWMVAGKADPEMPKRMYIHPDSPATGEQWMSKVVTFHKLKLTNNISDKHGFTLAFPSDHATWQGNYSFGTQTILNSMHKYQPRFHIVRANDILKLPYSTFRTYLFPETEFIAVTAYQNDKITQLKIDNNPFAKGFRDTGNGRREKRKQLTLQSMRVFDERHKKENGTSDESSSEQAAFNCFAQASSPAASTVGTSNLKDLCPSEGESDAEAESKEEHGPEACDAAKISTTTSEEPCRDKGSPAVKAHLFAAERPRDSGRLDKASPDSRHSPATISSSTRGLGAEERRSPVREGTAPAKVEEARALPGKEAFAPLTVQTDAAAAHLAQGPLPGLGFAPGLAGQQFFNGHPLFLHPSQFAMGGAFSSMAAAGMGPLLATVSGASTGVSGLDSTAMASAAAAQGLSGASAATLPFHLQQHVLASQGLAMSPFGSLFPYPYTYMAAAAAASSAAASSSVHRHPFLNLNTMRPRLRYSPYSIPVPVPDGSSLLTTALPSMAAAAGPLDGKVAALAASPASVAVDSGSELNSRSSTLSSSSMSLSPKLCAEKEAATSELQSIQRLVSGLEAKPDRSRSASP

SEQ ID NO: 10766 - protein, 600 aa, Homo sapiens
MSLSMRDPVIPGTSMAYHPFLPHRAPDFAMSAVLGHQPPFFPALTLPPNGAAALSLPGALAKPIMDQLVGAAETGIPFSSLGPQAHLRPLKTMEPEEEVEDDPKVHLEAKELWDQFHKRGTEMVITKSGRRMFPPFKVRCSGLDKKAKYILLMDIIAADDCRYKFHNSRWMVAGKADPEMPKRMYIHPDSPATGEQWMSKVVTFHKLKLTNNISDKHGFTLAFPSDHATWQGNYSFGTQTILNSMHKYQPRFHIVRANDILKLPYSTFRTYLFPETEFIAVTAYQNDKITQLKIDNNPFAKGFRDTGNGRREKRKQLTLQSMRVFDERHKKENGTSDESSSEQAAFNCFAQASSPAASTVGTSNLKDLCPSEGESDAEAESKEEHGPEACDAAKISTTTSEEPCRDKGSPAVKAHLFAAERPRDSGRLDKASPDSRHSPATISSSTRGLGAEERRSPVREGTAPAKVEEARALPGKEAFAPLTVQTDAASAAASSSVHRHPFLNLNTMRPRLRYSPYSIPVPVPDGSSLLTTALAASPASVAVDSGSELNSRSSTLSSSSMSLSPKLCAEKEAATSELQSIQRLVSGLEAKPDRSRSASP

SEQ ID NO: 10767 - protein, 672 aa, Homo sapiens
MTPSQVAFEIRGTLLPGEVFAICGSCDALGNWNPQNAVALLPENDTGESMLWKATIVLSRGVSVQYRYFKGYFLEPKTIGGPCQVIVHKWETHLQPRSITPLESEIIIDDGQFGIHNGVETLDSGWLTCQTEIRLRLHYSEKPPVSITKKKLKKSRFRVKLTLEGLEEDDDDRVSPTVLHKMSNSLEISLISDNEFKCRHSQPECGYGLQPDRWTEYSIQTMEPDNLELIFDFFEEDLSEHVVQGDALPGHVGTACLLSSTIAESGKSAGILTLPIMSRNSRKTIGKVRVDYIIIKPLPGYSCDMKSSFSKYWKPRIPLDVGHRGAGNSTTTAQLAKVQENTIASLRNAASHGAAFVEFDVHLSKDFVPVVYHDLTCCLTMKKKFDADPVELFEIPVKELTFDQLQLLKLTHVTALKSKDRKESVVQEENSFSENQPFPSLKMVLESLPEDVGFNIEIKWICQQRDGMWDGNLSTYFDMNLFLDIILKTVLENSGKRRIVFSSFDADICTMVRQKQNKYPILFLTQGKSEIYPELMDLRSRTTPIAMSFAQFENLLGINVHTEDLLRNPSYIQEAKAKGLVIFCWGDDTNDPENRRKLKELGVNGLIYDRIYDWMPEQPNIFQVEQLERLKQELPELKSCLCPTVSRFVPSSLCGESDIHVDANGIDNVENA

SEQ ID NO: 10768 - protein, 1966 aa, Homo sapiens
MASAVSPANLPAVLLQPRWKRVVGWSGPVPRPRHGHRAVAIKELIVVFGGGNEGIVDELHVYNTATNQWFIPAVRGDIPPGCAAYGFVCDGTRLLVFGGMVEYGKYSNDLYELQASRWEWKRLKAKTPKNGPPPCPRLGHSFSLVGNKCYLFGGLANDSEDPKNNIPRYLNDLYILELRPGSGVVAWDIPITYGVLPPPRESHTAVVYTEKDNKKSKLVIYGGMSGCRLGDLWTLDIDTLTWNKPSLSGVAPLPRSLHSATTIGNKMYVFGGWVPLVMDDVKVATHEKEWKCTNTLACLNLDTMAWETILMDTLEDNIPRARAGHCAVAINTRLYIWSGRDGYRKAWNNQVCCKDLWYLETEKPPPPARVQLVRANTNSLEAAPAPPTTTTIQVLPTVPGSSISVPTAARTQGVPAVLKVTGPQATTGTPLVTMRPASQAGKAPVTVTSLPAGVRMVVPTQSAQGTVIGSSPQMSGMAALAAAAAATQKIPPSSRPTVLSVPAGTTIVKTMAVTPGTTTLPATVKVASSPVMVSNPATRMLKTAAAQVGTSVSSATNTSTRPIITVHKSGTVTVAQQAQVVTTVVGGVTKTITLVKSPISVPGGSALISNLGKVMSVVQTKPVQTSAVTGQASTGPVTQIIQTKGPLPAGTILKLVTSADGKPTTIITTTQASGAGTKPTILGISSVSPSTTKPGTTTIIKTIPMSAIITQAGATGVTSSPGIKSPITIITTKVMTSGTGAPAKIITAVPKIATGHGQQGVTQVVLKGAPGQPGTILRTVPMGGVRLVTPVTVSAVKPAVTTLVVKGTTGVTTLGTVTGTVSTSLAGAGGHSTSASLATPITTLGTIATLSSQVINPTAITVSAAQTTLTAAGGLTTPTITMQPVSQPTQVTLITAPSGVEAQPVHDLPVSILASPTTEQPTATVTIADSGQGDVQPGTVTLVCSNPPCETHETGTTNTATTTVVANLGGHPQPTQVQFVCDRQEAAASLVTSTVGQQNGSVVRVCSNPPCETHETGTTNTATTATSNMAGQHGCSNPPCETHETGTTNTATTAMSSVGANHQRDARRACAAGTPAVIRISVATGALEAAQGSKPQCQTRQTSATSTTMTVMATGAPCSAGPLLGPSMAREPGGRSPAFVQLAPLSSKVRLSSPSIKDLPAGRHSHAVSTAAMTRSSVGAGEPRMAPVCESLQGGSPSTTVTVTALEALLCPSATVTQVCSNPPCETHETGTTNTATTSNAGSAQRVCSNPPCETHETGTTHTATTATSNGGTGQPEGGQQPPAGRPCETHQTTSTGTTMSVSVGALLPDATSSHRTVESGLEVAAAPSVTPQAGTALLAPFPTQRVCSNPPCETHETGTTHTATTVTSNMSSNQDPPPAASDQGEVESTQGDSVNITSSSAITTTVSSTLTRAVTTVTQSTPVPGPSVPPPEELQVSPGPRQQLPPRQLLQSASTALMGESAEVLSASQTPELPAAVDLSSTGEPSSGQESAGSAVVATVVVQPPPPTQSEVDQLSLPQELMAEAQAGTTTLMVTGLTPEELAVTAAAEAAAQAAATEEAQALAIQAVLQAAQQAVMGTGEPMDTSEAAATVTQAELGHLSAEGQEGQATTIPIVLTQQELAALVQQQQLQEAQAQQQHHHLPTEALAPADSLNDPAIESNCLNELAGTVPSTVALLPSTATESLAPSNTFVAPQPVVVASPAKLQAAATLTEVANGIESLGVKPDLPPPPSKAPMKKENQWFDVGVIKGTNVMVTHYFLPPDDAVPSDDDLGTVPDYNQLKKQELQPGTAYKFRVAGINACARGPFSEISAFKTCLPGFPGAPCAIKISKSPDGAHLTWEPPSVTSGKIIEYSVYLAIQSSQAGGELKSSTPAQLAFMRVYCGPSPSCLVQSSSLSNAHIDYTTKPAIIFRIAARNEKGYGPATQVRWLQETSKDSSGTKPANKRPMSSPEMKSAPKKSKADGQ

SEQ ID NO: 10769 - protein, 2035 aa, Homo sapiens
MASAVSPANLPAVLLQPRWKRVVGWSGPVPRPRHGHRAVAIKELIVVFGGGNEGIVDELHVYNTATNQWFIPAVRGDIPPGCAAYGFVCDGTRLLVFGGMVEYGKYSNDLYELQASRWEWKRLKAKTPKNGPPPCPRLGHSFSLVGNKCYLFGGLANDSEDPKNNIPRYLNDLYILELRPGSGVVAWDIPITYGVLPPPRESHTAVVYTEKDNKKSKLVIYGGMSGCRLGDLWTLDIDTLTWNKPSLSGVAPLPRSLHSATTIGNKMYVFGGWVPLVMDDVKVATHEKEWKCTNTLACLNLDTMAWETILMDTLEDNIPRARAGHCAVAINTRLYIWSGRDGYRKAWNNQVCCKDLWYLETEKPPPPARVQLVRANTNSLEVSWGAVATADSYLLQLQKYDIPATAATATSPTPNPVPSVPANPPKSPAPAAAAPAVQPLTQVGITLLPQAAPAPPTTTTIQVLPTVPGSSISVPTAARTQGVPAVLKVTGPQATTGTPLVTMRPASQAGKAPVTVTSLPAGVRMVVPTQSAQGTVIGSSPQMSGMAALAAAAAATQKIPPSSRPTVLSVPAGTTIVKTMAVTPGTTTLPATVKVASSPVMVSNPATRMLKTAAAQVGTSVSSATNTSTRPIITVHKSGTVTVAQQAQVVTTVVGGVTKTITLVKSPISVPGGSALISNLGKVMSVVQTKPVQTSAVTGQASTGPVTQIIQTKGPLPAGTILKLVTSADGKPTTIITTTQASGAGTKPTILGISSVSPSTTKPGTTTIIKTIPMSAIITQAGATGVTSSPGIKSPITIITTKVMTSGTGAPAKIITAVPKIATGHGQQGVTQVVLKGAPGQPGTILRTVPMGGVRLVTPVTVSAVKPAVTTLVVKGTTGVTTLGTVTGTVSTSLAGAGGHSTSASLATPITTLGTIATLSSQVINPTAITVSAAQTTLTAAGGLTTPTITMQPVSQPTQVTLITAPSGVEAQPVHDLPVSILASPTTEQPTATVTIADSGQGDVQPGTVTLVCSNPPCETHETGTTNTATTTVVANLGGHPQPTQVQFVCDRQEAAASLVTSTVGQQNGSVVRVCSNPPCETHETGTTNTATTATSNMAGQHGCSNPPCETHETGTTNTATTAMSSVGANHQRDARRACAAGTPAVIRISVATGALEAAQGSKPQCQTRQTSATSTTMTVMATGAPCSAGPLLGPSMAREPGGRSPAFVQLAPLSSKVRLSSPSIKDLPAGRHSHAVSTAAMTRSSVGAGEPRMAPVCESLQGGSPSTTVTVTALEALLCPSATVTQVCSNPPCETHETGTTNTATTSNAGSAQRVCSNPPCETHETGTTHTATTATSNGGTGQPEGGQQPPAGRPCETHQTTSTGTTMSVSVGALLPDATSSHRTVESGLEVAAAPSVTPQAGTALLAPFPTQRVCSNPPCETHETGTTHTATTVTSNMSSNQDPPPAASDQGEVESTQGDSVNITSSSAITTTVSSTLTRAVTTVTQSTPVPGPSVPPPEELQVSPGPRQQLPPRQLLQSASTALMGESAEVLSASQTPELPAAVDLSSTGEPSSGQESAGSAVVATVVVQPPPPTQSEVDQLSLPQELMAEAQAGTTTLMVTGLTPEELAVTAAAEAAAQAAATEEAQALAIQAVLQAAQQAVMGTGEPMDTSEAAATVTQAELGHLSAEGQEGQATTIPIVLTQQELAALVQQQQLQEAQAQQQHHHLPTEALAPADSLNDPAIESNCLNELAGTVPSTVALLPSTATESLAPSNTFVAPQPVVVASPAKLQAAATLTEVANGIESLGVKPDLPPPPSKAPMKKENQWFDVGVIKGTNVMVTHYFLPPDDAVPSDDDLGTVPDYNQLKKQELQPGTAYKFRVAGINACARGPFSEISAFKTCLPGFPGAPCAIKISKSPDGAHLTWEPPSVTSGKIIEYSVYLAIQSSQAGGELKSSTPAQLAFMRVYCGPSPSCLVQSSSLSNAHIDYTTKPAIIFRIAARNEKGYGPATQVRWLQETSKDSSGTKPANKRPMSSPEMKSAPKKSKADGQ

SEQ ID NO: 10770 - protein, 758 aa, Homo sapiens
MSFQKPKGTIEYTVESRDSLNSIALKFDTTPNELVQLNKLFSRAVVTGQVLYVPDPEYVSSVESSPSLSPVSPLSPTSSEAEFDKTTNPDVHPTEATPSSTFTGIRPARVVSSTSEEEEAFTEKFLKINCKYITSGKGTVSGVLLVTPNNIMFDPHKNDPLVQENGCEEYGIMCPMEEVMSAAMYKEILDSKIKESLPIDIDQLSGRDFCHSKKMTGSNTEEIDSRIRDAGNDSASTAPRSTEESLSEDVFTESELSPIREELVSSDELRQDKSSGASSESVQTVNQAEVESLTVKSESTGTPGHLRSDTEHSTNEVGTLCHKTDLNNLEMAIKEDQIADNFQGISGPKEDSTSIKGNSDQDSFLHENSLHQEESQKENMPCGETAEFKQKQSVNKGKQGKEQNQDSQTEAEELRKLWKTHTMQQTKQQRENIQQVSQKEAKHKITSADGHIESSALLKEKQRHRLHKFLCLRVGKPMRKTFVSQASATMQQYAQRDKKHEYWFAVPQERTDHLYAFFIQWSPEIYAEDTGEYTREPGFIVVKKIEESETIEDSSNQAAAREWEITTREDINSKQVATVKADLESESFRPNLSDPSELLLPDQIEKLTKHLPPRTIGYPWTLVYGTGKHGTSLKTLYRTMTGLDTPVLMVIKDSDGQVFGALASEPLKVSDGFYGTGETFVFTFCPEFEVFKWTGDNMFFIKGDMDSLAFGGGGGEFALWLDGDLYHGRSHSCKTFGNRTLSKKEDFFIQDIEIWAFE

SEQ ID NO: 10771 - protein, 503 aa, Homo sapiens [sequence omitted]

SEQ ID NO: 10772 - protein, 332 aa, Homo sapiens
MAPAQRCPLCRQTFFCGRGHVYSRKHQRQLKEALERLLPQVEAARKAIRAAQVERYVPEHERCCWCLCCGCEVREHLSHGNLTVLYGGLLEHLASPEHKKATNKFWWENKAEVQMKEKFLVTPQDYARFKKSMVKGLDSYEEKEDKVIKEMAAQIREVEQSRQEVVRSVLEPQAVPDPEEGSSAPRSWKGMNSQVASSLQQPSNLDLPPAPELDWMETGPSLTFIGHQDIPGVGNIHSGATPPWMIQDEEYIAGNQEIGPSYEEFLKEKEKQKLKKLPPDRVGANFDHSSRTSAGWLPSFGRVWNNGRRWQSRHQFKTEAAAMKKQSHTEKS

SEQ ID NO: 10773 - protein, 214 aa, Homo sapiens
MSNYSVSLVGPAPWGFRLQGGKDFNMPLTISSLKDGGKAAQANVRIGDVVLSIDGINAQGMTHLEAQNKIKGCTGSLNMTLQRASAAPKPEPVPVQKKTQVTNNPGTVKIPPKRPPRKHIVERYTEFYHVPTHSDASKKRLIEDTEDWRPRTGTTQSRSFRILAQITGTEHLKESEADNTKKAKEKIPLHVFSPKYTKLRDWHHEVSARALNVQ

SEQ ID NO: 10774 - protein, 213 aa, Homo sapiens
MGNGTEEDYNFVFKVVLIGESGVGKTNLLSRFTRNEFSHDSRTTIGVEFSTRTVMLGTAAVKAQIWDTAGLERYRAITSAYYRGAVGALLVFDLTKHQTYAVVERWLKELYDHAEATIVVMLVGNKSDLSQAREVPTEEARMFAENNGLLFLETSALDSTNVELAFETVLKEIFAKVSKQRQNSIRTNAITLGSAQAGQEPGPGEKRACCISL

SEQ ID NO: 10775 - protein, 213 aa, Homo sapiens
MGNGTEEDYNFVFKVVLIGESGVGKTNLLSRFTRNEFSHDSRTTIGVEFSTRTVMLGTAAVKAQIWDTAGLERYRAITSAYYRGAVGALLVFDLTKHQTYAVVERWLKELYDHAEATIVVMLVGNKSDLSQAREVPTEEARMFAENNGLLFLETSALDSTNVELAFETVLKEIFAKVSKQRQNSIRTNAITLGSAGAGQEPGLGEKRACCISL

SEQ ID NO: 10776 - protein, 356 aa, Homo sapiens
MDAGVTESGLNVTLTIRLLMHGKEVGSIIGKKGESVKRIREESGARINISEGNCPERIITLTGPTNAIFKAFAMIIDKLEEDINSSMTNSTAASRPPVTLRLVVPATQCGSLIGKGGCKIKEIRESTGAQVQVAGDMLPNSTERAITIAGVPQSVTECVKQICLVMLETLSQSPQGRVMTIPYQPMPASSPVICAGGQDRCSDAVGYPHATHDLEGPPLDAYSIQGQHTISPLDLAKLNQVARQQSHFAMMHGGTGFAGIDSSSPEVKGYWASLDASTQTTHELTIPNNLIGCIIGRQGANINEIRQMSGAQIKIANPVEGSSGRQVTITGSAASISLAQYLINARLSSEKGMGCS

SEQ ID NO: 10777 - protein, 189 aa, Homo sapiens
MALPFALMMALVVLSCKSSCSLGCNLSQTHSLNNRRTLMLMAQMRRISPFSCLKDRHDFEFPQEEFDGNQFQKAQAISVLHEMMQQTFNLFSTKNSSAAWDETLLEKFYIELFQQMNDLEACVIQEVGVEETPLMNEDSILAVKKYFQRITLYLMEKKYSPCAWEVVRAEIMRSLSFSTNLQKRLRRKD

SEQ ID NO: 10778 - protein, 605 aa, Homo sapiens [sequence omitted]

SEQ ID NO: 10779 - protein, 628 aa, Homo sapiens
MGSCARLLLLWGCTVVAAGLSGVAGVSSRCEKACNPRMGNLALGRKLWADTTCGQNATELYCFYSENTDLTCRQPKCDKCNAAYPHLAHLPSAMADSSFRFPRTWWQSAEDVHREKIQLDLEAEFYFTHLIVMFKSPRPAAMVLDRSQDFGKTWKPYKYFATNCSATFGLEDDVVKKGAICTSKYSSPFPCTGGEVIFKALSPPYDTENPYSAKVQEQLKITNLRVQLLKRQSCPCQRNDLNEEPQHFTHYAIYDFIVKGSCFCNGHADQCIPVHGFRPVKAPGTFHMVHGKCMCKHNTAGSHCQHCAPLYNDRPWEAADGKTGAPNECRTCKCNGHADTCHFDVNVWEASGNRSGGVCDDCQHNTEGQYCQRCKPGFYRDLRRPFSAPDACKPCSCHPVGSAVLPANSVTFCDPSNGDCPCKPGVAGRRCDRCMVGYWGFGDYGCRPCDCAGSCDPITGDCISSHTDIDWYHEVPDFRPVHNKSEPAWEWEDAQGFSALLHSGKCECKEQTLGNAKAFCGMKYSYVLKIKILSAHDKGTHVEVNVKIKKVLKSTKLKIFRGKRTLYPESWTDRGCTCPILNPGLEYLVAGHEDIRTGKLIVNMKSFVQHWKPSLGRKVMDILKRECK

SEQ ID NO: 10780 - protein, 1257 aa, Homo sapiens
MASCSFTRDQATRRLRGAAAAAAAALAAVVTTPLLSSGTPTALIGTGSSCPGAMWLSTATGSRSDSESEEEDLPVGEEVCKRGYLRKQKHGHRRYFVLKLETADAPARLEYYENARKFRHSVRAAAAAAAAAASGAAIPPLIPPRRVITLYQCFSVSQRADARYRHLIALFTQDEYFAMVAENESEQESWYLLLSRLILESKRRRCGTLGAQPDGEPAALAAAAAAEPPFYKDVWQVIVKPRGLGHRKELSGVFRLCLTDEEVVFVRLNTEVASVVVQLLSIRRCGHSEQYFFLEVGRSTVIGPGELWMQVDDCVVAQNMHELFLEKMRALCADEYRARCRSYSISIGAHLLTLLSARRHLGLVPLEPGGWLRRSRFEQFCHLRAIGDGEDEMLFTRRFVTPSEPVAHSRRGRLHLPRGRRSRRAVSVPASFFRRLAPSPARPRHPAEAPNNGARLSSEVSGSGSGNFGEEGNPQGKEDQEGSGGDYMPMNNWGSGNGRGSGGGQGSNGQGSSSHSSGGNQCSGEGQGSRGGQGSNGQGSGGNQCSRDGQGTAGGHGSGGGQRPGGGHGSGGGQGPGDGHGSGGGKNSGGGKGSGSGKGSDGDGERGKSLKKRSYFGKLTQSKQQQMPPPPPPPPPPPPAGGTGGKGKSGGRFRLYFCVDRGATKECKEAKEVKDAEIPEGAARGPHRARAFDEDEDDPYVPMRPGVATPLVSSSDYMPMAPQNVSASKKRHSRSPFEDSRGYMMMFPRVSPPPAPSPPKAPDTNKEDDSKDNDSESDYMFMAPGAGAIPKNPRNPQGGSSSKSWSSYFSLPNPFRSSPLGQNDNSEYVPMLPGKFLGRGLDKEVSYNWDPKDAASKPSGEGSFSKPGDGGSPSKPSDHEPPKNKAKRPNRLSFITKGYKIKPKPQKPTHEQREADSSSDYVNMDFTKRESNTPAPSTQGLPDSWGIIAEPRQSAFSNYVNVEFGVPFPNPANDLSDLLRAIPRANPLSLDSARWPLPPLPLSATGSNAIEEEGDYIEVIFNSAMTPAMALADSAIRYDAETGRIYVVDPFSECCMDISLSPSRCSEPPPVARLLQEEEQERRRPQSRSQSFFAAARAAVSAFPTDSLERDLSPSSAPAVASAAEPTLALSQVVAAASALAAAPGIGAAAAAAGFDSASARWFQPVANAADAEAVRGAQDVAGGSNPGAHNPSANLARGDNQAGGAAAAAAAPEPPPRSRRVPRPPEREDSDNDDDTHVRMDFARRDNQFDSPKRGR

SEQ ID NO: 10781 - protein, 1205 aa, Homo sapiens
MVLLSLWLIAAALVEVRTSADGQAGNEEMVQIDLPIKRYREYELVTPVSTNLEGRYLSHTLSASHKKRSARDVSSNPEQLFFNITAFGKDFHLRLKPNTQLVAPGAVVEWHETSLVPGNITDPINNHQPGSATYRIRKTEPLQTNCAYVGDIVDIPGTSVAISNCDGLAGMIKSDNEEYFIEPLERGKQMEEEKGRIHVVYKRSAVEQAPIDMSKDFHYRESDLEGLDDLGTVYGNIHQQLNETMRRRRHAGENDYNIEVLLGVDDSVVRFHGKEHVQNYLLTLMNIVNEIYHDESLGVHINVVLVRMIMLGYAKSISLIERGNPSRSLENVCRWASQQQRSDLNHSEHHDHAIFLTRQDFGPAGMQGYAPVTGMCHPVRSCTLNHEDGFSSAFVVAHETGHVLGMEHDGQGNRCGDETAMGSVMAPLVQAAFHRYHWSRCSGQELKRYIHSYDCLLDDPFDHDWPKLPELPGINYSMDEQCRFDFGVGYKMCTAFRTFDPCKQLWCSHPDNPYFCKTKKGPPLDGTECAAGKWCYKGHCMWKNANQQKQDGNWGSWTKFGSCSRTCGTGVRFRTRQCNNPMPINGGQDCPGVNFEYQLCNTEECQKHFEDFRAQQCQQRNSHFEYQNTKHHWLPYEHPDPKKRCHLYCQSKETGDVAYMKQLVHDGTHCSYKDPYSICVRGECVKVGCDKEIGSNKVEDKCGVCGGDNSHCRTVKGTFTRTPRKLGYLKMFDIPPGARHVLIQEDEASPHILAIKNQATGHYILNGKGEEAKSRTFIDLGVEWDYNIEDDIESLHTDGPLHDPVIVLIIPQENDTRSSLTYKYIIHEDSVPTINSNNVIQEELDTFEWALKSWSQVSKPCGGGFQYTKYGCRRKSDNKMVHRSFCEANKKPKPIRRMCNIQECTHPLWVAEEWEHCTKTCGSSGYQLRTVRCLQPLLDGTNRSVHSKYCMGDRPESRRPCNRVPCPAQWKTGPWSECSVTCGEGTEVRQVLCRAGDHCDGEKPESVRACQLPPCNDEPCLGDKSIFCQMEVLARYCSIPGYNKLCCESCSKRSSTLPPPYLLEAAETHDDVISNPSDLPRSLVMPTSLVPYHSETPAKKMSLSSISSVGGPNAYAAFRPNSKPDGANLRQRSAQQAGSKTVRLVTVPSSPPTKRVHLSSASQMAAASFFAASDSIGASSQARTSKKDGKIIDNRRPTRSSTLER

SEQ ID NO: 10782 - protein, 2426 aa, Homo sapiens [sequence omitted]

SEQ ID NO: 10783 - protein, 1785 aa, Homo sapiens
MGISTVILEMCLLWGQVLSTGGWIPRTTDYASLIPSEVPLDQTVAEGSPFPSESTLESTAAEGSPISLESTLESTVAEGSLIPSESTLESTVAEGSDSGLALRLVNGDGRCQGRVEILYRGSWGTVCDDSWDTNDANVVCRQLGCGWAMSAPGNAWFGQGSGPIALDDVRCSGHESYLWSCPHNGWLSHNCGHGEDAGVICSAAQPQSTLRPESWPVRISPPVPTEGSESSLALRLVNGGDRCRGRVEVLYRGSWGTVCDDYWDTNDANVVCRQLGCGWAMSAPGNAQFGQGSGPIVLDDVRCSGHESYLWSCPHNGWLTHNCGHSEDAGVICSAPQSRPTPSPDTWPTSHASTAGPESSLALRLVNGGDRCQGRVEVLYRGSWGTVCDDSWDTSDANVVCRQLGCGWATSAPGNARFGQGSGPIVLDDVRCSGYESYLWSCPHNGWLSHNCQHSEDAGVICSAAHSWSTPSPDTLPTITLPASTVGSESSLALRLVNGGDRCQGRVEVLYQGSWGTVCDDSWDTNDANVVCRQPGCGWAMSAPGNARFGQGSGPIVLDDVRCSGHESYPWSCPHNGWLSHNCGHSEDAGVICSASQSRPTPSPDTWPTSHASTAGSESSLALRLVNGGDRCQGRVEVLYRGSWGTVCDDYWDTNDANVVCRQLGCGWAMSAPGNARFGQGSGPIVLDDVRCSGHESYLWSCPHNGWLSHNCGHHEDAGVICSASQSQPTPSPDTWPTSHASTAGSESSLALRLVNGGDRCQGRVEVLYRGSWGTVCDDYWDTNDANVVCRQLGCGWATSAPGNARFGQGSGPIVLDDVRCSGHESYLWSCPHNGWLSHNCGHHEDAGVICSASQSQPTPSPDTWPTSRASTAGSESTLALRLVNGGDRCRGRVEVLYQGSWGTVCDDYWDTNDANVVCRQLGCGWAMSAPGNAQFGQGSGPIVLDDVRCSGHESYLWSCPHNGWLSHNCGHHEDAGVICSAAQSQSTPRPDTWLTTNLPALTVGSESSLALRLVNGGDRCRGRVEVLYRGSWGTVCDDSWDTNDANVVCRQLGCGWAMSAPGNARFGQGSGPIVLDDVRCSGNESYLWSCPHKGWLTHNCGHHEDAGVICSATQINSTTTDWWHPTTTTTARPSSNCGGFLFYASGTFSSPSYPAYYPNNAKCVWEIEVNSGYRINLGFSNLKLEAHHNCSFDYVEIFDGSLNSSLLLGKICNDTRQIFTSSYNRMTIHFRSDISFQNTGFLAWYNSFPSDATLRLVNLNSSYGLCAGRVEIYHGGTWGTVCDDSWTIQEAEVVCRQLGCGRAVSALGNAYFGSGSGPITLDDVECSGTESTLWQCRNRGWFSHNCNHREDAGVICSGNHLSTPAPFLNITRPNTDYSCGGFLSQPSGDFSSPFYPGNYPNNAKCVWDIEVQNNYRVTVIFRDVQLEGGCNYDYIEVFDGPYRSSPLIARVCDGARGSFTSSSNFMSIRFISDHSITRRGFRAEYYSSPSNDSTNLLCLPNHMQASVSRSYLQSLGFSASDLVISTWNGYYECRPQITPNLVIFTIPYSGCGTFKQADNDTIDYSNFLTAAVSGGIIKRRTDLRIHVSCRMLQNTWVDTMYIANDTIHVANNTIQVEEVQYGNFDVNISFYTSSSFLYPVTSRPYYVDLNQDLYVQAEILHSDAVLTLFVDTCVASPYSNDFTSLTYDLIRSGCVRDDTYGPYSSPSLRIARFRFRAFHFLNRFPSVYLRCKMVVCRAYDPSSRCYRGCVLRSKRDVGSYQEKVDVVLGPIQLQTPPRREEEPR

SEQ ID NO: 10784 - protein, 2413 aa, Homo sapiens
MGISTVILEMCLLWGQVLSTGGWIPRTTDYASLIPSEVPLDQTVAEGSPFPSESTLESTAAEGSPISLESTLESTVAEGSLIPSESTLESTVAEGSDSGLALRLVNGDGRCQGRVEILYRGSWGTVCDDSWDTNDANVVCRQLGCGWAMSAPGNAWFGQGSGPIALDDVRCSGHESYLWSCPHNGWLSHNCGHGEDAGVICSAAQPQSTLRPESWPVRISPPVPTEGSESSLALRLVNGGDRCRGRVEVLYRGSWGTVCDDYWDTNDANVVCRQLGCGWAMSAPGNAQFGQGSGPIVLDDVRCSGHESYLWSCPHNGWLTHNCGHSEDAGVICSAPQSRPTPSPDTWPTSHASTAGPESSLALRLVNGGDRCQGRVEVLYRGSWGTVCDDSWDTSDANVVCRQLGCGWATSAPGNARFGQGSGPIVLDDVRCSGYESYLWSCPHNGWLSHNCQHSEDAGVICSAAHSWSTPSPDTLPTITLPASTVGSESSLALRLVNGGDRCQGRVEVLYRGSWGTVCDDSWDTNDANVVCRQLGCGWAMLAPGNARFGQGSGPIVLDDVRCSGNESYLWSCPHNGWLSHNCGHSEDAGVICSGPESSLALRLVNGGDRCQGRVEVLYRGSWGTVCDDSWDTNDANVVCRQLGCGWAMSAPGNARFGQGSGPIVLDDVRCSGHESYLWSCPNNGWLSHNCGHHEDAGVICSAAQSRSTPRPDTLSTITLPPSTVGSESSLTLRLVNGSDRCQGRVEVLYRGSWGTVCDDSWDTNDANVVCRQLGCGWAMSAPGNARFGQGSGPIVLDDVRCSGHESYLWSCPHNGWLSHNCGHHEDAGVICSVSQSRPTPSPDTWPTSHASTAGSESSLALRLVNGGDRCQGRVEVLYRGSWGTVCDDSWDTSDANVVCRQLGCGWATSAPGNARFGQGSGPIVLDDVRCSGYESYLWSCPHNGWLSHNCQHSEDAGVICSAAHSWSTPSPDTLPTITLPASTVGSESSLALRLVNGGDRCQGRVEVLYQGSWGTVCDDSWDTNDANVVCRQPGCGWAMSAPGNARFGQGSGPIVLDDVRCSGHESYPWSCPHNGWLSHNCGHSEDAGVICSASQSRPTPSPDTWPTSHASTAGSESSLALRLVNGGDRCQGRVEVLYRGSWGTVCDDYWDTNDANVVCRQLGCGWAMSAPGNARFGQGSGPIVLDDVRCSGHESYLWSCPHNGWLSHNCGHHEDAGVICSASQSQPTPSPDTWPTSHASTAGSESSLALRLVNGGDRCQGRVEVLYRGSWGTVCDDYWDTNDANVVCRQLGCGWATSAPGNARFGQGSGPIVLDDVRCSGHESYLWSCPHNGWLSHNCGHHEDAGVICSASQSQPTPSPDTWPTSHASTAGSESSLALRLVNGGDRCQGRVEVLYRGSWGTVCDDYWDTNDANVVCRQLGCGWATSAPGNARFGQGSGPIVLDDVRCSGHESYLWSCPHNGWLSHNCGHHEDAGVICSASQSQPTPSPDTWPTSRASTAGSESTLALRLVNGGDRCRGRVEVLYQGSWGTVCDDYWDTNDANVVCRQLGCGWAMSAPGNAQFGQGSGPIVLDDVRCSGHESYLWSCPHNGWLSHNCGHHEDAGVICSAAQSQSTPRPDTWLTTNLPALTVGSESSLALRLVNGGDRCRGRVEVLYRGSWGTVCDDSWDTNDANVVCRQLGCGWAMSAPGNARFGQGSGPIVLDDVRCSGNESYLWSCPHKGWLTHNCGHHEDAGVICSATQINSTTTDWWHPTTTTTARPSSNCGGFLFYASGTFSSPSYPAYYPNNAKCVWEIEVNSGYRINLGFSNLKLEAHHNCSFDYVEIFDGSLNSSLLLGKICNDTRQIFTSSYNRMTIHFRSDISFQNTGFLAWYNSFPSDATLRLVNLNSSYGLCAGRVEIYHGGTWGTVCDDSWTIQEAEVVCRQLGCGRAVSALGNAYFGSGSGPITLDDVECSGTESTLWQCRNRGWFSHNCNHREDAGVICSGNHLSTPAPFLNITRPNTDYSCGGFLSQPSGDFSSPFYPGNYPNNAKCVWDIEVQNNYRVTVIFRDVQLEGGCNYDYIEVFDGPYRSSPLIARVCDGARGSFTSSSNFMSIRFISDHSITRRGFRAEYYSSPSNDSTNLLCLPNHMQASVSRSYLQSLGFSASDLVISTWNGYYECRPQITPNLVIFTIPYSGCGTFKQADNDTIDYSNFLTAAVSGGIIKRRTDLRIHVSCRMLQNTWVDTMYIANDTIHVANNTIQVEEVQYGNFDVNISFYTSSSFLYPVTSRPYYVDLNQDLYVQAEILHSDAVLTLFVDTCVASPYSNDFTSLTYDLIRSGCVRDDTYGPYSSPSLRIARFRFRAFHFLNRFPSVYLRCKMVVCRAYDPSSRCYRGCVLRSKRDVGSYQEKVDVVLGPIQLQTPPRREEEPR

SEQ ID NO: 10785 - protein, 2403 aa, Homo sapiens
MGISTVILEMCLLWGQVLSTGGWIPRTTDYASLIPSEVPLDTTVAEGSPFPSELTLESTAAEGSPISLESTLESTVAEGSLIPSESTLESTVAEGSDSGLALRLVNGDGRCQGRVEILYRGSWGTVCDDSWDTNDANVVCRQLGCGWAMSAPGNAWFGQGSGPIALDDVRCSGHESYLWSCPHNGWLSHNCGHGEDAGVICSAAQPQSTLRPESWPVRISPPVPTEGSESSLALRLVNGGDRCRGRVEVLYRGSWGTVCDDYWDTNDANVVCRQLGCGWAMSAPGNAQFGQGSGPIVLDDVRCSGHESYLWSCPHNGWLTHNCGHSEDAGVICSAPLSRPTPSPDTWPTSHASTAGPESSLALRLVNGGDRCQGRVEVLYRGSWGTVCDDSWDTSDANVVCRQLGCGWATSAPGNARFGQGSGPIVLDDVRCSGYESYLWSCPHNGWLSHNCQHSEDAGVICSDTLPTITLPASTVGSESSLALRLVNGGDRCQGRVEVLYRGSWGTVCDDSWDTNDANVVCRQLGCGWAMLAPGNARFGQGSGPIVLDDVRCSGNESYLWSCPHNGWLSHNCGHSEDAGVICSGPESSLALGLVNGGDRCQGRVEVLYRGSWGTVCDDSWDTNDANVVCRQLGCGWATSAPGNARFGQGSGPIVLDDVRCSGHESYLWSCPNNGWLSHNCGHHEDAGVICSAAQSRSTPRPDTLSTITLPPSTVGSESSLTLRLVNGSDRCQGRVEVLYRGSWGTVCDDSWDTNDANVVCRQLGCGWATSAPGNARFGQGSGPIVLDDVRCSGHESYLWSCPHNGWLSHNCGHHEDAGVICSVSQSRPTPSPDTWPTSHASTAGSESSLALRLVNGGDRCQGRVEVLYRGSWGTVCDDSWDTSDANVVCRRLGCGWATSAPGNARFGQGSGPIVLDDVRCSGYESYLWSCPHNGWLSHNCQHSEDAGVICSAAHSWSTPSPDTLPTITLPASTVGSESSLALRLVNGGDRCQGRVEVLYQGSWGTVCDDSWDTNDANVVCRQLGCGWAMSAPGNARFGQGSGPIVLDDVRCSGHESYLWSCPHNGWLSHNCGHSEDAGVICSASQSRPTPSPDTWPTSHASTAGSESSLALRLVNGGDRCQGRVEVLYRGSWGTVCDDYWDTNDANVVCRQLGCGWAMSAPGNARFGQGSGPIVLDDVRCSGHESYLWSCPHDGWLSHNCGHHEDAGVICSASQSQPTPSPDTWPTSHASTAGSESSLALRLVNGGDRCQGRVEVLYRGPWGTVCDDYWDTNDANVVCRQLGCGWATSAPGNARFGQGSGPIVLDDVRCSGHESYLWSCPHNGWLSHNCGHHEDAGVICSASQSQPTPSPDTWPTSHASTAGSESSLALRLVNGGDRCQGRVEVLYRGSWGTVCDDYWDTNDANVVCRQLGCGWATSAPGSARFGQGSGPIALDDVRCSGHESYLWSCPHNGWLSHNCGHHEDAGVICSASQSQPTPSPDTWPTSRASTAGSESTLALRLVNGGDRCRGRVEVLYQGSWGTVCDDYWDTNDANVVCRQLGCGWAMSAPGNAQFGQGSGPIVLDDVRCSGHESYLWSCPHNGWLSHNCGHHEDAGVICSAAQSQSTPRPDTWLTTNLPALTVGSESSLALRLVNGGDRCRGRVEVLYRGSWGTVCDDSWDTNDANVVCRQLGCGWAMSAPGNARFGQGSGPIVLDDVRCSGNESYLWSCPHKGWLTHNCGHHEDAGVICSATQINSTTTDWWHPTTTTTARPSSNCGGFLFYASGTFSSPSYPAYYPNNAKCVWEIEVNSGYRINLGFSNLKLEAHHNCSFDYVEIFDGSLNSSLLLGKICNDTRQIFTSSYNRMTIHFRSDISFQNTGFLAWYNSFPSDATLRLVNLNSSYGLCAGRVEIYHGGTWGTVCDDSWTIQEAEVVCRQLGCGRAVSALGNAYFGSGSGPITLDDVECSGTESTLWQCRNRGWFSHNCNHREDAGVICSGNHLSTPAPFLNITRPNTDYSCGGFLSQPSGDFSSPFYPGNYPNNAKCVWDIEVQNNYRVTVIFRDVQLEGGCNYDYIEVFDGPYRSSPLIARVCDGARGSFTSSSNFMSIRFISDHSITRRGFRAEYYSSPSNDSTNLLCLPNHMQASVSRSYLQSLGFSASDLVISTWNGYYECRPQITPNLVIFTIPYSGCGTFKQADNDTIDYSNFLTAAVSGGIIKRRTDLRIHVSCRMLQNTWVDTMYIANDTIHVANNTIQVEEVQYGNFDVNISFYTSSSFLYPVTSRPYYVDLNQDLYVQAEILHSDAVLTLFVDTCVASPYSNDFTSLTYDLIRSGCVRDDTYGPYSSPSLRIARFRFRAFHFLNRFPSVYLRCKMVVCRAYDPSSRCYRGCVLRSKRDVGSYQEKVDVVLGPIQLQTPPRREEEPR

SEQ ID NO: 10786 - protein, 401 aa, Homo sapiens
MNKLLCCALVFLDISIKWTTQETFPPKYLHYDEETSHQLLCDKCPPGTYLKQHCTAKWKTVCAPCPDHYYTDSWHTSDECLYCSPVCKELQYVKQECNRTHNRVCECKEGRYLEIEFCLKHRSCPPGFGVVQAGTPERNTVCKRCPDGFFSNETSSKAPCRKHTNCSVFGLLLTQKGNATHDNICSGNSESTQKCGIDVTLCEEAFFRFAVPTKFTPNWLSVLVDNLPGTKVNAESVERIKRQHSSQEQTFQLLKLWKHQNKDQDIVKKIIQDIDLCENSVQRHIGHANLTFEQLRSLMESLPGKKVGAEDIEKTIKACKPSDQILKLLSLWRIKNGDQDTLKGLMHALKHSKTYHFPKTVTQSLKKTIRFLHSFTMYKLYQKLFLEMIGNQVQSVKISCL

SEQ ID NO: 10787 - protein, 455 aa, Homo sapiens
MVDFPGYNLSGAVASFLFILLTMKQSEDFRVIGPAHPILAGVGEDALLTCQLLPKRTTMHVEVRWYRSEPSTPVFVHRDGVEVTEMQMEEYRGWVEWIENGIAKGNVALKIHNIQPSDNGQYWCHFQDGNYCGETSLLLKVAGLGSAPSIHMEGPGESGVQLVCTARGWFPEPQVYWEDIRGEKLLAVSEHRIQDKDGLFYAEATLVVRNASAESVSCLVHNPVLTEEKGSVISLPEKLQTELASLKVNGPSQPILVRVGEDIQLTCYLSPKANAQSMEVRWDRSHRYPAVHVYMDGDHVAGEQMAEYRGRTVLVSDAIDEGRLTLQILSARPSDDGQYRCLFEKDDVYQEASLDLKVVSLGSSPLITVEGQEDGEMQPMCSSDGWFPQPHVPWRDMEGKTIPSSSQALTQGSHGLFHVQTLLRVTNISAVDVTCSISIPFLGEEKIATFSLSGW

SEQ ID NO: 10788 - protein, 317 aa, Homo sapiens
MWLYLAVFVGLYYLLHWYRERQVLSHLRDKYVFITGCDSGFGKLLARQLDARGLRVLAACLTEKGAEQLRGQTSDRLETVTLDVTKTESVAAAAQWVKECVRDKGLWGLVNNAGISLPTAPNELLTKQDFVTILDVNLLGVIDVTLSLLPLVRKARGRVVNVSSVMGRVSLFGGGYCISKYGVEAFSDSLRRELSYFGVKVAMIEPGYFKTAVTSKERFLKSFLEIWDRSSPEVKEAYGEKFVADYKKSAEQMEQKCTQDLSLVTNCMEHALIACHPRTRYSAGWDAKLLYLPMSYMPTFLVDAIMYWVSPSPAKAL

SEQ ID NO: 10789 - protein, 543 aa, Homo sapiens
MLLRSKPALPPPLMLLLLGPLGPLSPGALPRPAQAQDVVDLDFFTQEPLHLVSPSFLSVTIDANLATDPRFLILLGSPKLRTLARGLSPAYLRFGGTKTDFLIFDPKKESTFEERSYWQSQVNQDICKYGSIPPDVEEKLRLEWPYQEQLLLREHYQKKFKNSTYSRSSVDVLYTFANCSGLDLIFGLNALLRTADLQWNSSNAQLLLDYCSSKGYNISWELGNEPNSFLKKADIFINGSQLGEDFIQLHKLLRKSTFKNAKLYGPDVGQPRRKTAKMLKSFLKAGGEVIDSVTWHHYYLNGRTATREDFLNPDVLDIFISSVQKVFQVVESTRPGKKVWLGETSSAYGGGAPLLSDTFAAGFMWLDKLGLSARMGIEVVMRQVFFGAGNYHLVDENFDPLPDYWLSLLFKKLVGTKVLMASVQGSKRRKLRVYLHCTNTDNPRYKEGDLTLYAINLHNVTKYLRLPYPFSNKQVDKYLLRPLGPHGLLSKSVQLNGLTLKMVDDQTLPPLMEKPLRPGSSLGLPAFSYSFFVIRNAKVAACI

SEQ ID NO: 10790 - protein, 357 aa, Homo sapiens
MAPRRVRSFLRGLPALLLLLLFLGPWPAASHGGKYSREKNQPKPSPKRESGEEFRMEKLNQLWEKAQRLHLPPVRLAELHADLKIQERDELAWKKLKLDGLDEDGEKEARLIRNLNVILAKYGLDGKKDARQVTSNSLSGTQEDGLDDPRLEKLWHKAKTSGKFSGEELDKLWREFLHHKEKVHEYNVLLETLSRTEEIHENVISPSDLSDIKGSVLHSRHTELKEKLRSINQGLDRLRRVSHQGYSTEAEFEEPRVIDLWDLAQSANLTDKELEAFREELKHFEAKIEKHNHYQKQLEIAHEKLRHAESVGDGERVSRSREKHALLEGRTKELGYTVKKHLQDLSGRISRARHNEL

SEQ ID NO: 10791 - protein, 638 aa, Homo sapiens
MKGGCVSQWKAAAGFLFCVMVFASAERPVFTNHFLVELHKGGEDKARQVAAEHGFGVRKLPFAEGLYHFYHNGLAKAKRRRSLHHKQQLERDPRVKMALQQEGFDRKKRGYRDINEIDINMNDPLFTKQWYLINTGQADGTPGLDLNVAEAWELGYTGKGVTIGIMDDGIDYLHPDLASNYNAEASYDFSSNDPYPYPRYTDDWFNSHGTRCAGEVSAAANNNICGVGVAYNSKVAGIRMLDQPFMTDIIEASSISHMPQLIDIYSASWGPTDNGKTVDGPRELTLQAMADGVNKGRGGKGSIYVWASGDGGSYDDCNCDGYASSMWTISINSAINDGRTALYDESCSSTLASTFSNGRKRNPEAGVATTDLYGNCTLRHSGTSAAAPEAAGVFALALEANLGLTWRDMQHLTVLTSKRNQLHDEVHQWRRNGVGLEFNHLFGYGVLDAGAMVKMAKDWKTVPERFHCVGGSVQDPEKIPSTGKLVLTLTTDACEGKENFVRYLEHVQAVITVNATRRGDLNINMTSPMGTKSILLSRRPRDDDSKVGFDKWPFMTTHTWGEDARGTWTLELGFVGSAPQKGVLKEWTLMLHGTQSAPYIDQVVRDYQSKLAMSKKEELEEELDEAVERSLKSILNKN

SEQ ID NO: 10792 - protein, 444 aa, Homo sapiens
MAPPVRLERPFPSRRFPGLLLAALVLLLSSFSDQCNVPEWLPFARPTNLTDDFEFPIGTYLNYECRPGYSGRPFSIICLKNSVWTSAKDKCKRKSCRNPPDPVNGMAHVIKDIQFRSQIKYSCPKGYRLIGSSSATCIISGNTVIWDNKTPVCDRIICGLPPTIANGDFTSISREYFHYGSVVTYHCNLGSRGKKVFELVGEPSIYCTSKDDQVGIWSGPAPQCIIPNKCTPPNVENGILVSDNRSLFSLNEVVEFRCQPGFGMKGPSHVKCQALNKWEPELPSCSRVCQPPPDVLHAERTQRDKDNFSPGQEVFYSCEPGYDLRGSTYLHCTPQGDWSPAAPRCEVKSCDDFLGQLPNGHVLFPLNLQLGAKVDFVCDEGFQLKGSSASYCVLAGMESLWNSSVPVCERKSCETPPVPVNGMVHVITDIHVGSRINYSCTTGF

SEQ ID NO: 10793 - protein, 407 aa, Homo sapiens
MDGLPGRALGAACLLLLAAGWLGPEAWGSPTPPPTPAAPPPPPPPGSPGGSQDTCTSCGGFRRPEELGRVDGDFLEAVKRHILSRLQMRGRPNITHAVPKAAMVTALRKLHAGKVREDGRVEIPHLDGHASPGADGQERVSEIISFAETDGLASSRVRLYFFISNEGNQNLFVVQASLWLYLKLLPYVLEKGSRRKVRVKVYFQEQGHGDRWNMVEKRVDLKRSGWHTFPLTEAIQALFERGERRLNLDVQCDSCQELAVVPVFVDPGEESHRPFVVVQARLGDSRHRIRKRGLECDGRTNLCCRQQFFIDFRLIGWNDWIIAPTGYYGNYCEGSCPAYLAGVPGSASSFHTAVVNQYRMRGLNPGTVNSCCIPTKLSTMSMLYFDDEYNIVKRDVPNMIVEECGCA

SEQ ID NO: 10794 - protein, 653 aa, Homo sapiens
MRPLRPRAALLALLASLLAAPPVAPAEAPHLVQVDAARALWPLRRFWRSTGFCPPLPHSQADQYVLSWDQQLNLAYVGAVPHRGIKQVRTHWLLELVTTRGSTGRGLSYNFTHLDGYLDLLRENQLLPGFELMGSASGHFTDFEDKQQVFEWKDLVSSLARRYIGRYGLAHVSKWNFETWNEPDHHDFDNVSMTMQGFLNYYDACSEGLRAASPALRLGGPGDSFHTPPRSPLSWGLLRHCHDGTNFFTGEAGVRLDYISLHRKGARSSISILEQEKVVAQQIRQLFPKFADTPIYNDEADPLVGWSLPQPWRADVTYAAMVVKVIAQHQNLLLANTTSAFPYALLSNDNAFLSYHPHPFAQRTLTARFQVNNTRPPHVQLLRKPVLTAMGLLALLDEEQLWAEVSQAGTVLDSNHTVGVLASAHRPQGPADAWRAAVLIYASDDTRAHPNRSVAVTLRLRGVPPGPGLVYVTRYLDNGLCSPDGEWRRLGRPVFPTAEQFRRMRAAEDPVAAAPRPLPAGGRLTLRPALRLPSLLLVHVCARPEKPPGQVTRLRALPLTQGQLVLVWSDEHVGSKCLWTYEIQFSQDGKAYTPVSRKPSTFNLFVFSPDTGAVSGSYRVRALDYWARPGPFSDPVPYLEVPVPRGPPSPGNP

SEQ ID NO: 10795 - protein, 806 aa, Homo sapiens
MVALPMVLVLLLVLSRGESELDAKIPSTGDATEWRNPHLSMLGSCQPAPSCQKCILSHPSCAWCKQLNFTASGEAEARRCARREELLARGCPLEELEEPRGQQEVLQDQPLSQGARGEGATQLAPQRVRVTLRPGEPQQLQVRFLRAEGYPVDLYYLMDLSYSMKDDLERVRQLGHALLVRLQEVTHSVRIGFGSFVDKTVLPFVSTVPSKLRHPCPTRLERCQSPFSFHHVLSLTGDAQAFEREVGRQSVSGNLDSPEGGFDAILQAALCQEQIGWRNVSRLLVFTSDDTFHTAGDGKLGGIFMPSDGHCHLDSNGLYSRSTEFDYPSVGQVAQALSAANIQPIFAVTSAALPVYQELSKLIPKSAVGELSEDSSNVVQLIMDAYNVRGQGKGRCLSSTVTLEHSSLPPGVHISYESQCEGPEKREGKAEDRGQCNHVRINQTVTFWVSLQATHCLPEPHLLRLRALGFSEELIVELHTLCDCNCSDTQPQAPHCSDGQGHLQCGVCSCAPGRLGRLCECSVAELSSPDLESGCRAPNGTGPLCSGKGHCQCGRCSCSGQSSGHLCECDDASCERHEGILCGGFGRCQCGVCHCHANRTGRACECSGDMDSCISPEGGLCSGHGRCKCNRCQCLDGYYGALCDQCPGCKTPCERHRDCAECGAFRTGPLATNCSTACAHTNVTLALAPILDDGWCKERTLDNQLFFFLVEDDARGTVVLRVRPQEKGADHTQAIVLGCVGGIVAVGLGLVLAYRLSVEIYDRREYSRFEKEQQQLNWKQDSNPLYKSAITTTINPRFQEADSPTL

SEQ ID NO: 10796 - protein, 372 aa, Homo sapiens
MAAPVPWACCAVLAAAAAVVYAQRHSPQEAPHVQYERLGSDVTLPCGTANWDAAVTWRVNGTDLAPDLLNGSQLVLHGLELGHSGLYACFHRDSWHLRHQVLLHVGLPPREPVLSCRSNTYPKGFYCSWHLPTPTYIPNTFNVTVLHGSKIMVCEKDPALKNRCHIRYMHLFSTIKYKVSISVSNALGHNATAITFDEFTIVKPDPPENVVARPVPSNPRRLEVTWQTPSTWPDPESFPLKFFLRYRPLILDQWQHVELSDGTAHTITDAYAGKEYIIQVAAKDNEIGTWSDWSVAAHATPWTEEPRHLTTEAQAAETTTSTTSSLAPPPTTKICDPGELGSGGGPSAPFLVSVPITLALAAAAATASSLLI

SEQ ID NO: 10797 - protein, 1007 aa, Homo sapiens
KSECLSKRGWEGVRLCRGERQREEAAAGYCEFGIRLGGTAHSGEMDSLPRLTSVLTLLFSGLWHLGLTATNYNCDDPLASLLSPMAFSSSSDLTGTHSPAQLNWRVGTGGWSPADSNAQQWLQMDLGNRVEITAVATQGRYGSSDWVTSYSLMFSDTGRNWKQYKQEDSIWTFAGNMNADSVVHHKLLHSVRARFVRFVPLEWNPSGKIGMRVEVYGCSYKSDVADFDGRSSLLYRFNQKLMSTLKDVISLKFKSMQGDGVLFHGEGQRGDHITLELQKGRLALHLNLGDSKARLSSSLPSATLGSLLDDQHWHSVLIERVGKQVNFTVDKHTQHFRTKGETDALDIDYELSFGGIPVPGKPGTFLKKNFHGCIENLYYNGVNIIDLAKRRKHQIYTVGNVTFSCSEPQIVPITFVNSSGSYLLLPGTPQIDGLSVSFQFRTWNKDGLLLSTELSEGSGTLLLSLEGGILRLVIQKMTERVAEILTGSNLNDGLWHSVSINARRNRITLTLDDEAAPPAPDSTWVQIYSGNSYYFGGCPDNLTDSQCLNPIKAFQGCMRLIFIDNQPKDLISVQQGSLGNFSDLHIDLCSIKDRCLPNYCEHGGSCSQSWTTFYCNCSDTSYTGATCHNSIYEQSCEVYRHQGNTAGFFYIDSDGSGPLGPLQVYCNITEDKIWTSVQHNNTELTRVRGANPEKPYAMALDYGGSMEQLEAVIDGSEHCEQEVAYHCRRSRLLNTPDGTPFTWWIGRSNERHPYWGGSPPGVQQCECGLDESCLDIQHFCNCDADKDEWTNDTGFLSFKDHLPVTQIVITDTDRSNSEAAWRIGPLRCYGDRRFWNAVSFYTEASYLHFPTFHAEFSADISFFFKTTALSGVFLENLGIKDFIRLEISSPSEITFAIDVGNGPVELVVQSPSLLNDNQWHYVRAERNLKETSLQVDNLPRSTRETSEEGHFRLQLNSQLFVGGTSSRQKGFLGCIRSLHLNGQKMDLEERAKVTSGVRPGCSIKKLK

SEQ ID NO: 10798 - protein, 497 aa, Homo sapiens
MSCVLGGVIPLGLLFLVCGSQGYLLPNVTLLEELLSKYQHNESHSRVRRAIPREDKEEILMLHNKLRGQVQPQASNMEYMTWDDELEKSAAAWASQCIWEHGPTSLLVSIGQNLGAHWGRYRSPGFHVQSWYDEVKDYTYPYPSECNPWCPERCSGPMCTHYTQIVWATTNKIGCAVNTCRKMTVWGEVWENAVYFVCNYSPKGNWIGEAPYKNGRPCSECPPSYGGSCRNNLCYREETYTPKPETDEMNEVETAPIPEENHVWLQPRVMRPTKPKKTSAVNYMTQVVRCDTKMKDRCKGSTCNRYQCPAGCLNHKAKIFGTLFYESSSSICRAAIHYGILDDKGGLVDITRNGKVPFFVKSERHGVQSLSKYKPSSSFMVSKVKVQDLDCYTTVAQLCPFEKPATHCPRIHCPAHCKDEPSYWAPVFGTNIYADTSSICKTAVHAGVISNESGGDVDVMPVDKKKTYVGSLRNGVQSESLGTPRDGKAFRIFAVRQ

SEQ ID NO: 10799 - protein, 184 aa, Homo sapiens
MSRLSRSLLWAATCLGVLCVLSADKNTTQHPNVTTLAPISNVTSAPVTSLPLVTTPAPETCEGRNSCVSCFNVSVVNTTCFWIECKDESYCSHNSTVSDCQVGNTTDFCSAKPTVQPSPSTTSKTVTTSGTTNNTVTPTSQPVRKSTFDAASFIGGIVLVLGVQAVIFFLYKFCKSKERNYHTL

SEQ ID NO: 10800 - protein, 913 aa, Homo sapiens
MDWESRCCCPGRLDLLCVLALLGGCLLPVCRTRVYTNHWAVKIAGGFPEANRIASKYGFINIGQIGALKDYYHFYHSRTIKRSVISSRGTHSFISMEPKVEWIQQQVVKKRTKRDYDSSRVQSTYFNDPKWPSMWYMHCSDNTHPCQSDMNIEGAWKRGYTGKNIVVTILDDGIERTHPDLMQNYDALASCDVNGNDLDPMPRYDASNENKHGTRCAGEVAAAANNSHCTVGIAFNAKIGGVRMLDGDVTDMVEAKSVSFNPQHVHIYSASWGPDDDGKTVDGPAPLTRQAFENGVRMGRRGLGSVFVWASGNGGRSKDHCSCDGYTNSIYTISISSTAESGKKPWYLEECSSTLATTYSSGESYDKKIITTDLRQRCTDNHTGTSASAPMAAGIIALALEANPFLTWRDVQHVIVRTSRAGHLNANDWKTNAAGFKVSHLYGFGLMDAEAMVMEAEKWTTVPRQHVCVESTDRQIKTIRPNSAVRSIYKASGCSDNPNRHVNYLEHVVVRITITHPRRGDLAIYLTSPSGTRSQLLANRLFDHSMEGFKNWEFMTIHCWGERAAGDWVLEVYDTPSQLRNFKTPGKLKEWSLVLYGTSVRPYSPTNEFPKVERFRYSRVEDPTDDYGTEDYAGPCDPECSEVGCDGPGPDHCNDCLHYYYKLKNNTRICVSSCPPGHYHADKKRCRKCAPNCESCFGSHGDQCMSCKYGYFLNEETNSCVTHCPDGSYQDTKKNLCRKCSENCKTCTEFHNCTECRDGLSLQGSRCSVSCEDGRYFNGQDCQPCHRFCATCAGAGADGCINCTEGYFMEDGRCVQSCSISYYFDHSSENGYKSCKKCDISCLTCNGPGFKNCTSCPSGYLLDLGMCQMGAICKDATEESWAEGGFCMLVKKNNLCQRKVLQQLCCKTCTFQG

SEQ ID NO: 10801 - protein, 913 aa, Homo sapiens
MGWGSRCCCPGRLDLLCVLALLGGCLLPVCRTRVYTNHWAVKIAGGFPEANRIASKYGFINIGQIGALKDYYHFYHSRTIKRSVISSRGTHSFISMEPKVEWIQQQVVKKRTKRDYDFSRAQSTYFNDPKWPSMWYMHCSDNTHPCQSDMNIEGAWKRGYTGKNIVVTILDDGIERTHPDLMQNYDALASCDVNGNDLDPMPRYDASNENKHGTRCAGEVAAAANNSHCTVGIAFNAKIGGVRMLDGDVTDMVEAKSVSFNPQHVHIYSASWGPDDDGKTVDGPAPLTRQAFENGVRMGRRGLGSVFVWASGNGGRSKDHCSCDGYTNSIYTISISSTAESGKKPWYLEECSSTLATTYSSGESYDKKIITTDLRQRCTDNHTGTSASAPMAAGIIALALEANPFLTWRDVQHVIVRTSRAGHLNANDWKTNAAGFKVSHLYGFGLMDAEAMVMEAEKWTTVPRQHVCVESTDRQIKTIRPNSAVRSIYKASGCSDNPNRHVNYLEHVVVRITITHPRRGDLAIYLTSPSGTRSQLLANRLFDHSMEGFKNWEFMTIHCWGERAAGDWVLEVYDTPSQLRNFKTPGKLKEWSLVLYGTSVQPYSPTNEFPKVERFRYSRVEDPTDDYGTEDYAGPCDPECSEVGCDGPGPDHCNDCLHYYYKLKNNTRICVSSCPPGHYHADKKRCRKCAPNCESCFGSHGDQCMSCKYGYFLNEETNSCVTHCPDGSYQDTKKNLCRKCSENCKTCTEFHNCTECRDGLSLQGSRCSVSCEDGRYFNGQDCQPCHRFCATCAGAGADGCINCTEGYFMEDGRCVQSCSISYYFDHSSENGYKSCKKCDISCLTCNGPGFKNCTSCPSGYLLDLGMCQMGAICKDATEESWAEGGFCMLVKKNNLCQRKVLQQLCCKTCTFQG

SEQ ID NO: 10802 - protein, 1821 aa, Homo sapiens
MRPRTKARSPGRALRNPWRGFLPLTLALFVGAGHAQRDPVGRYEPAGGDANRLRRPGGSYPAAAAAKVYSLFREQDAPVAGLQPVERAQPGWGSPRRPTEAEARRPSRAQQSRRVQPPAQTRRSTPLGQQQPAPRTRAAPALPRLGTPQRSGAAPPTPPRGRLTGRNVCGGQCCPGWTTANSTNHCIKPVCEPPCQNRGSCSRPQLCVCRSGFRGARCEEVIPDEEFDPQNSRLAPRRWAERSPNLRRSSAAGEGTLARAQPPAPQSPPAPQSPPAGTLSGLSQTHPSQQHVGLSRTVRLHPTATASSQLSSNALPPGPGLEQRDGTQQAVPLEHPSSPWGLNLTEKIKKIKIVFTPTICKQTCARGHCANSCERGDTTTLYSQGGHGHDPKSGFRIYFCQIPCLNGGRCIGRDECWCPANSTGKFCHLPIPQPDREPPGRGSRPRALLEAPLKQSTFTLPLSNQLASVNPSLVKVHIHHPPEASVQIHQVAQVRGGVEEALVENSVETRPPPWLPASPGHSLWDSNNIPARSGEPPRPLPPAAPRPRGLLGRCYLNTVNGQCANPLLELTTQEDCCGSVGAFWGVTLCAPCPPRPASPVIENGQLECPQGYKRLNLTHCQDINECLTLGLCKDAECVNTRGSYLCTCRPGLMLDPSRSRCVSDKAISMLQGLCYRSLGPGTCTLPLAQRITKQICCCSRVGKAWGSECEKCPLPGTEAFREICPAGHGYTYASSDIRLSMRKAEEEELARPPREQGQRSSGALPGPAERQPLRVVTDTWLEAGTIPDKGDSQAGQVTTSVTHAPAWVTGNATTPPMPEQGIAEIQEEQVTPSTDVLVTLSTPGIDRCAAGATNVCGPGTCVNLPDGYRCVCSPGYQLHPSQAYCTDDNECLRDPCQGKGRCINRVGSYSCFCYPGYTLATSGATQECQDINECEQPGVCSGGQCTNTEGSYHCECDQGYIMVRKGHCQDINECRHPGTCPDGRCVNSPGSYTCLACEEGYRGQSGSCVDVNECLTPGVCAHGKCTNLEGSFRCSCEQGYEVTSDEKGCQDVDECASRASCPTGLCLNTEGSFACSACENGYWVNEDGTACEDLDECAFPGVCPSGVCTNTAGSFSCKDCDGGYRPSPLGDSCEDVDECEDPQSSCLGGECKNTVGSYQCLCPQGFQLANGTVCEDVNECMGEEHCAPHGECLNSHGSFFCLCAPGFVSAEGGTSCQDVDECATTDPCVGGHCVNTEGSFNCLCETGFQPSPESGECVDIDECEDYGDPVCGTWKCENSPGSYRCVLGCQPGFHMAPNGDCIDIDECANDTMCGSHGFCDNTDGSFRCLCDQGFEISPSGWDCVDVNECELMLAVCGAALCENVEGSFLCLCASDLEEYDAQEGHCRPRGAGGQSMSEAPTGDHAPAPTRMDCYSGQKGHAPCSSVLGRNTTQAECCCTQGATWGDACDLCPSEDSAEFSEICPSGKGYIPVEGAWTFGQTMYTDADECVIFGPGLCPNGRCLNTVPGYVCLCNPGFHYDASHKKCEDHDECQDLACENGECVNTEGSFHCFCSPPLTLDLSQQRCMNSTSSTEDLPDHDIHMDICWKKVTNDVCSEPLRGHRTTYTECCCQDGKAWSQQCALCPPRSSEVYAQLCNVARIEAEREAGVHFRPGYEYGPGPDDLHYSIYGPDGAPFYNYLGPEDTVPEPAFPNTAGHSADRTPILESPLQPSELQPHYVASHPEPPAGFEGLQAEECGILNGCENGRCVRVREGYTCDCFEGFQLDAAHMACVDVNECDDLNGPAVLCVHGYCENTEGSYRCHCSPGYVAEAGPPHCTAKE

SEQ ID NO: 10803 - protein, 145 aa, Homo sapiens
MVAWRSAFLVCLAFSLATLVQRGSGDFDDFNLEDAVKETSSVKPALGMYHKLDGLKQQNFILSLFWMLEVLYQGVGWATFSLKALGKNLSLTFPTSGGSRCSLVCGCITPISASVVTWCSPFCVSLLSLTKMLVSGFKAHLDNPG

SEQ ID NO: 10804 - protein, 607 aa, Homo sapiens
MAATAAVSPSDYLQPAASTTQARSQPSPLALLAATCSKIGPPAVEAAVTPPAPPQPTPRKLVPIKPAPLPLSPGKNSFGILSSKGNILQIQGSQLSASYPGGQLVFAIQNPTMINKGTRSNANIQYQAVPQIQASNSQTIQVQPNLTNQIQIIPGTNQAIITPSPSSHKPVPIKPAPIQKSSTTTTPVQSGANVVKLTGGGGNVTLTLPVNNLVNASDTGAPTQLLTESPPTPLSKTNKKARKKSLPASQPPVAVAEQVETVLIETTADNIIQAGNNLLIVQSPGGGQPAVVQQVQVVPPKAEQQQVVQIPQQALRVVQAASATLPTVPQKPSQNFQIQAAEPTPTQVYIRTPSGEVQTVLVQDSPPATAAATSNTTCSSPASRAPHLSGTSKKHSAAILRKERPLPKIAPAGSIISLNAAQLAAAAQAMQTININGVQVQGVPVTITNTGGQQQLTVQNVSGNNLTISGLSPTQIQLQMEQALAGETQPGEKRRRMACTCPNCKDGEKRSGEQGKKKHVCHIPDCGKTFRKTSLLRAHVRLHTGERPFVCNWFFCGKRFTRSDELQRHARTHTGDKRFECAQCQKRFMRSDHLTKHYKTHLVTKNL

SEQ ID NO: 10805 - protein, 249 aa, Homo sapiens
MAATAAVSPSDYLQPAASTTQDSQPSPLALLAATCSKIGPPAVEAAVTPPAPPQPTPRKLVPIKPAPLPLSPGKNSFGILSSKGNILQIQGSQLSASYPGGQLVFAIQNPTMINKGTRSNANIQYQAVPQIQASNSQTIQVQPNLTNQIQIIPGTNQAIITPSPSSHKPVPIKPAPIQKSSTTTTPVQSGANVVKLTGGGGNVTLTLPVNNLVNASDTGAPTQLLTASCQTGMLNSTRMFLFLAFINVL

SEQ ID NO: 10806 - protein, 4012 aa, Homo sapiens
MGVLKVWLGLALALAEFAVLPHHSEGACVYQDSLLADATIWKPDSCQSCRCHGDIVICKPAVCRNPQCAFEKGEVLQIAANQCCPECVLRTPGSCHHEKKIHEHGTEWASSPCSVCSCNHGEVRCTPQPCPPLSCGHQELAFIPEGSCCPVCVGLGKPCSYEGHVFQDGEDWRLSRCAKCLCRNGVAQCFTAQCQPLFCNQDETVVRVPGKCCPQCSARSCSAAGQVYEHGEQWSENACTTCICDRGEVRCHKQACLPLRCGKGQSRARRHGQCCEECVSPAGSCSYDGVVRYQDEMWKGSACEFCMCDHGQVTCQTGECAKVECARDEELIHLDGKCCPECISRNGYCVYEETGEFMSSNASEVKRIPEGEKWEDGPCKVCECRGAQVTCYEPSCPPCPVGTLALEVKGQCCPDCTSVHCHPDCLTCSQSPDHCDLCQDPTKLLQNGWCVHSCGLGFYQAGSLCLACQPQCSTCTSGLECSSCQPPLLMRHGQCVPTCGDGFYQDRHSCAVCHESCAGCWGPTEKHCLACRDPLHVLRDGGCESSCGKGFYNRQGTCSACDQSCDSCGPSSPRCLTCTEKTVLHDGKCMSECPGGYYADATGRCKVCHNSCASCSGPTPSHCTACSPPKALRQGHCLPRCGEGFYSDHGVCKACHSSCLACMGPAPSHCTGCKKPEEGLQVEQLSDVGIPSGECLAQCRAHFYLESTGICEACHQSCFRCAGKSPHNCTDCGPSHVLLDGQCLSQCPDGYFHQEGSCTECHPTCRQCHGPLESDCISCYPHISLTNGNCRTSCREEQFLNLVGYCADCHHLCQHCAADLHNTGSICLRCQNAHYLLLGDHCVPDCPSGYYAERGACKKCHSSCRTCQGRGPFSCSSCDTNLVLSHTGTCSTTCFPGHYLDDNHVCQPCNTHCGSCDSQASCTSCRDPNKVLLFGECQYESCAPQYYLDFSTNTCKECDWSCSACSGPLKTDCLQCMDGYVLQDGACVEQCLSSFYQDSGLCKNCDSYCLQCQGPHECTRCKGPFLLLEAQCVQECGKGYFADHAKHKCTACPQGCLQCSHRDRCHLCDHGFFLKSGLCVYNCVPGFSVHTSNETCSGKIHTPSLHVNGSLILPIGSIKPLDFSLLNVQDQEGRVEDLLFHVVSTPTNGQLVLSRNGKEVQLDKAGRFSWKDVNEKKVRFVHSKEKLRKGYLFLKISDQQFFSEPQLINIQAFSTQAPYVLRNEVLHISRGERATITTQMLDIRDDDNPQDVVIEIIDPPLHGQLLQTLQSPATPIYQFQLDELSRGLLHYAHDGSDSTSDVAVLQANDGHSFHNILFQVKTVPQNDRGLQLVANSMVWVPEGGMLQITNRILQAEAPGASAEEIIYKITQDYPQFGEVVLLVNMPADSPADEGQHLPDGRTATPTSTFTQQDINEGIVWYRHSGAPAQSDSFRFEVSSASNAQTRLESHMFNIAILPQTPEAPKVSLEASLHMTAREDGLTVIQPHSLSFINSEKPSGKIVYNITLPLHPNQGIIEHRDHPHSPIRYFTQEDINQGKVMYRPPPAAPHLQELMAFSFAGLPESVKFHFTVSDGEHTSPEMVLTIHLLPSDQQLPVFQVTAPRLAVSPGGSTSVGLQVVVRDAETAPKELFFELRRPPQHGVLLKHTAEFRRPMATGDTFTYEDVEKNALQYIHDGSSTREDSMEISVTDGLTVTMLEVRVEVSLSEDRGPRLAAGSSLSITVASKSTAIITRSHLAYVDDSSPDPEIWIQLNYLPSYGTLLRISGSEVEELSEVSNFTMEDINNKKIRYSAVFETDGHLVTDSFYFSVSDMDHNHLDNQIFTIMITPAENPPPVIAFADLITVDEGGRAPLSFHHFFATDDDDNLQRDAIIKLSALPKYGCIENTGTGDRFGPETASDLEASFPIQDVLENYIYYFQSVHESIEPTHDIFSFYVSDGTSRSEIHSINITIERKNDEPPRMTLQPLRVQLSSGVVISNSSLSLQDLDTPDNELIFVLTKKPDHGHVLWRQTASEPLENGRVLVQGSTFTYQDILAGLVGYVPSVPGMVVDEFQFSLTDGLHVDTGRMKIYTELPASDTPHLAINQGLQLSAGSVARITEQHLKVTDIDSDDHQVMYIMKEDPGAGRLQMMKHGNLEQISIKGPIRSFTQADISQGHVEYSHGTGEPGGSFAFKFDVVDGEGNRLIDKSFSISILEDKSPPVITTNKGLVLDENSVKKITTLQLSATDQDSGPTELIYRITRQPQLGHLEHAASPGIQISSFTQADLTSRNVQYVHSSEAEKHSDAFSFTLSDGVSEVTQTFHITLHPVDDSLPVVQNLGMRVQEGMRKTITEFELKAVDADTEAESVTFTIVQPPRHGTIERTSNGQHFHLTSTFTMKDIYQNRVSYSHDGSNSLKDRFTFTVSDGTNPFFIIEEGGKEIMTAAPQPFRVDILPVDDGTPRIVTNLGLQWLEYMDGKATNLITKKELLTMDPDTEDAQLVYEITTGPKHGFVENKLQPGRAAATFTQEDVNLGLIRYVLHKEKIREMMDSFQFLVKDSKPNVVSDNVFHIQWSLISFKYTSYNVSEKAGSVSVTVQRTGNLNQYAIVLCRTEQGTASSSSRVSSQPGQQDYVEYAGQVQFDEREDTKSCTIVINDDDVFENVESFTVELSMPAYALLGEFTQAKVIINDTEDEPTLEFDKKIYWVNESAGFLFAPIERKGDASSIVSAICYTVPKSAMGSSLYALESGSDFKSRGMSAASRVIFGPGVTMSTCDVMLIDDSEYEEEEEFEIALADASDNARIGRVATAKVLISGPNDASTVSLGNTAFTVSEDAGTVKIPVIRHGTDLSTFASVWCATRPSDPASATPGVDYVPSSRKVEFGPGVIEQYCTLTILDDTQYPVIEGLETFVVFLSSAQGAELTKPFQAVIAINDTFQDVPSMQFAKDLLLVKEKEGVLHVPITRSGDLSYESSVRCYTQSHSAQVMEDFEERQNADSSRITFLKGDKVKNCTVYIHDDSMFEPEEQFRVYLGLPLGNHWSGARIGKNNMATITISNDEDAPTIEFEEAAYQVREPAGPDAIAILNIKVIRRGDQNRTSKVRCSTRDGSAQSGVDYYPKSRVLKFSPGVDHIFFKVEILSNEDREWHESFSLVLGPDDPVEAVLGDVTTATVTILDQEAAGSLILPAPPIVVTLADYDHVEEVTKEGVKKSPSPGYPLVCVTPCDPHFPRYAVMKERCSEAGINQTSVQFSWEVAAPTDGNGARSPFETITDNTPFTSVNHMVLDSIYFSRRFHVRCVAKAVDKVGHVGTPLRSNIVTIGTDSAICHTPVVAGTSRGFQAQSFIATLKYLDVKHKEHPNRIHISVQIPHQDGMLPLISTMPLHNLHFLLSESIYRHQHVCSNLVTTYDLRGISEAGFLDDVVYDSTALGPGYDRPFQFDPSVREPKTIQLYKHLNLKSCVWTFDAYYDMTELIDVCGGSVTADFQVRDSAQSFLTVHVPLYVSYIYVTAPRGWASLEHHTEMEFSFFYDTVLWRTGIQTDSVLSARLQIIRIYIREDGRLVIEFKTHAKFRGQFVMEHHTLPEVKSFVLTPDHLGGIEFDLQLLWSAQTFDSPHQLWRATSSYNRKDYSGEYTIYLIPCTVQPTQPWVDPGEKPLACTAHAPERFLIPIAFQQTNRPVPVVYSLNTEFQLCNNEKVFLMDPNTSDMSLAEMDYKGAFSKGQILYGRVLWNPEQNLNSAYKLQLEKVYLCTGKDGYVPFFDPTGTIYNEGPQYGCIQPNKHLKHRFLLLDRNQPEVTDKYFHDVPFEAHFASELPDFHVVSNMPGVDGFTLKVDALYKVEAGHQWYLQVIYIIGPDTISGPRVQRSLTAPLRRNRRDLVEPDGQLILDDSLIYDNEGDQVKNGTNMKSLNLEMQELAVAASLSQTGASIGSALAAIMLLLLVFLVACFINRKCQKQRKKKPAEDILEEYPLNTKVEVPKRHPDRVEKNVNRHYCTVRNVNILSEPEAAYTFKGAKVKRLNLEVRVHNNLQDGTEV

SEQ ID NO: 10807 - protein, 780 aa, Homo sapiens
MRARPRPRPLWVTVLALGALAGVGVGGPNICTTRGVSSCQQCLAVSPMCAWCSDEALPLGSPRCDLKENLLKDNCAPESIEFPVSEARVLEDRPLSDKGSGDSSQVTQVSPQRIALRLRPDDSKNFSIQVRQVEDYPVDIYYLMDLSYSMKDDLWSIQNLGTKLATQMRKLTSNLRIGFGAFVDKPVSPYMYISPPEALENPCYDMKTTCLPMFGYKHVLTLTDQVTRFNEEVKKQSVSRNRDAPEGGFDAIMQATVCDEKIGWRNDASHLLVFTTDAKTHIALDGRLAGIVQPNDGQCHVGSDNHYSASTTMDYPSLGLMTEKLSQKNINLIFAVTENVVNLYQNYSELIPGTTVGVLSMDSSNVLQLIVDAYGKIRSKVELEVRDLPEELSLSFNATCLNNEVIPGLKSCMGLKIGDTVSFSIEAKVRGCPQEKEKSFTIKPVGFKDSLIVQVTFDCDCACQAQAEPNSHRCNNGNGTFECGVCRCGPGWLGSQCECSEEDYRPSQQDECSPREGQPVCSQRGECLCGQCVCHSSDFGKITGKYCECDDFSCVRYKGEMCSGHGQCSCGDCLCDSDWTGYYCNCTTRTDTCMSSNGLLCSGRGKCECGSCVCIQPGSYGDTCEKCPTCPDACTFKKECVECKKFDREPYMTENTCNRYCRDEIESVKELKDTGKDAVNCTYKNEDDCVVRFQYYEDSSGKSILYVVEEPECPKGPDILVVLLSVMGAILLIGLAALLIWKLLITIHDRKEFAKFEEERARAKWDTVRDGAGRFLKSLV

SEQ ID NO: 10808 - protein, 784 aa, Homo sapiens
MRARPRPRPLWVTVLALGALAGVGVGGPNICTTRGVSSCQQCLAVSPMCAWCSDEALPLGSPRCDLKENLLKDNCAPESIEFPVSEARVLEDRPLSDKGSGDSSQVTQVSPQRIALRLRPDDSKNFSIQVRQVEDYPVDIYYLMDLSYSMKDDLWSIQNLGTKLATQMRKLTSNLRIGFGAFVDKPVSPYMYISPPEALENPCYDMKTTCLPMFGYKHVLTLTDQVTRFNEEVKKQSVSRNRDAPEGGFDAIMQATVCDEKIGWRNDASHLLVFTTDAKTHIALDGRLAGIVQPNDGQCHVGSDNHYSASTTMDYPSLGLMTEKLSQKNINLIFAVTENVVNLYQNYSELIPGTTVGVLSMDSSNVLQLIVDAYGKIRSKVELEVRDLPEELSLSFNATCLNNEVIPGLKSCMGLKIGDTVSFSIEAKVRGCPQEKEKSFTIKPVGFKDSLIVQVTFDCDCACQAQAEPNSHRCNNGNGTFECGVCRCGPGWLGSQCECSEEDYRPSQQDECSPREGQPVCSQRGECLCGQCVCHSSDFGKITGKYCECDDFSCVRYKGEMCSGHGQCSCGDCLCDSDWTGYYCNCTTRTDTCMSSNGLLCSGRGKCECGSCVCIQPGSYGDTCEKCPTCPDACTFKKECVECKKFDREPYMTENTCNRYCRDEIESVKELKDTGKDAVNCTYKNEDDCVVRFQYYEDSSGKSILYVVEEPECPKGPDILVVLLSVMGAILLIGLAALLIWKLLITIHDRKEFAKFEEERARAKWDTHYAQSLRKWNQPVSIDG

SEQ ID NO: 10809 - protein, 500 aa, Homo sapiens
MSNSVPLLCFWSLCYCFAAGSPVPFGPEGRLEDKLHKPKATQTEVKPSVRFNLRTSKDPEHEGCYLSVGHSQPLEDCSFNMTAKTFFIIHGWTMSGIFENWLHKLVSALHTREKDANVVVVDWLPLAHQLYTDAVNNTRVVGHSIARMLDWLQEKDDFSLGNVHLIGYSLGAHVAGYAGNFVKGTVGRITGLDPAGPMFEGADIHKRLSPDDADFVDVLHTYTRSFGLSIGIQMPVGHIDIYPNGGDFQPGCGLNDVLGSIAYGTITEVVKCEHERAVHLFVDSLVNQDKPSFAFQCTDSNRFKKGICLSCRKNRCNSIGYNAKKMRNKRNSKMYLKTRAGMPFRVYHYQMKIHVFSYKNMGEIEPTFYVTLYGTNADSQTLPLEIVERIEQNATNTFLVYTEEDLGDLLKIQLTWEGASQSWYNLWKEFRSYLSQPRNPGRELNIRRIRVKSGETQRKLTFCTEDPENTSISPGRELWFRKCRDGWRMKNETSPTVELP

SEQ ID NO: 10810 - protein, 163 aa, Homo sapiens
MSLLLLVVSALHILILILLFVATLDKSWWTLPGKESLNLWYDCTWNNDTKTWACSNVSENGWLKAVQVLMVLSLILCCLSFILFMFQLYTMRRGGLFYATGLCQLCTSVAVFTGALIYAIHAEEILEKHPRGGSFGYCFALAWVAFPLALVSGIIYIHLRKRE

SEQ ID NO: 10811 - protein, 1203 aa, Homo sapiens
MDKLPPSMRKRLYSLPQQVGAKAWIMDEEEDAEEEGAGGRQDPSRRSIRLRPLPSPSPSAAAGGTESRSSALGAADSEGPARGAGKSSTNGDCRRFRGSLASLGSRGGGSGGTGSGSSHGHLHDSAEERRLIAEGDASPGEDRTPPGLAAEPERPGASAQPAASPPPPQQPPQPASASCEQPSVDTAIKVEGGAAAGDQILPEAEVRLGQAGFMQRQFGAMLQPGVNKFSLRMFGSQKAVEREQERVKSAGFWIIHPYSDFRFYWDLTMLLLMVGNLIIIPVGITFFKDENTTPWIVFNVVSDTFFLIDLVLNFRTGIVVEDNTEIILDPQRIKMKYLKSWFMVDFISSIPVDYIFLIVETRIDSEVYKTARALRIVRFTKILSLLRLLRLSRLIRYIHQWEEIFHMTYDLASAVVRIVNLIGMMLLLCHWDGCLQFLVPMLQDFPDDCWVSINNMVNNSWGKQYSYALFKAMSHMLCIGYGRQAPVGMSDVWLTMLSMIVGATCYAMFIGHATALIQSLDSSRRQYQEKYKQVEQYMSFHKLPPDTRQRIHDYYEHRYQGKMFDEESILGELSEPLREEIINFNCRKLVASMPLFANADPNFVTSMLTKLRFEVFQPGDYIIREGTIGKKMYFIQHGVVSVLTKGNKETKLADGSYFGEICLLTRGRRTASVRADTYCRLYSLSVDNFNEVLEEYPMMRRAFETVALDRLDRIGKKNSILLHKVQHDLNSGVFNYQENEIIQQIVQHDREMAHCAHRVQAAASATPTPTPVIWTPLIQAPLQAAAATTSVAIALTHHPRLPAAIFRPPPGSGLGNLGAGQTPRHLKRLQSLIPSALGSASPASSPSQVDTPSSSSFHIQQLAGFSAPAGLSPLLPSSSSSPPPGACGSPSAPTPSAGVAATTIAGFGHFHKALGGSLSSSDSPLLTPLQPGARSPQAAQPSPAPPGARGGLGLPEHFLPPPPSSRSPSSSPGQLGQPPGELSLGLATGPLSTPETPPRQPEPPSLVAGASGGASPVGFTPRGGLSPPGHSPGPPRTFPSAPPRASGSHGSLLLPPASSPPPPQVPQRRGTPPLTPGRLTQDLKLISASQPALPQDGAQTLRRASPHSSGESMAAFPLFPRAGGGSGGSGSSGGLGPPGRPYGAIPGQHVTLPRKTSSGSLPPPLSLFGARATSSGGPPLTAGPQREPGARPEPVRSKLPSNL

SEQ ID NO: 10812 - protein, 341 aa, Homo sapiens
MAKGLLVTYALWAVGGPAGLHHLYLGRDSHALLWMLTLGGGGLGWLWEFWKLPSFVAQANRAQGQRQSPRGVTPPLSPIRFAAQVIVGIYFGLVALISLSSMVNFYIVALPLAVGLGVLLVAAVGNQTSDFKNTLGSAFLTSPIFYGRPIAILPISVAASITAQRHRRYKALVASEPLSVRLYRLGLAYLAFTGPLAYSALCNTAATLSYVAETFGSFLNWFSFFPLLGRLMEFVLLLPYRIWRLLMGETGFNSSCFQEWAKLYEFVHSFQDEKRQLAYQVLGLSEGATNEEIHRSYQELVKVWHPDHNLDQTEEAQRHFLEIQAAYEVLSQPRKPWGSRR

SEQ ID NO: 10813 - protein, 251 aa, Homo sapiens
MAAENEASQESALGAYSPVDYMSITSFPRLPEDEPAPAAPLRGRKDEDAFLGDPDTDPDSFLKSARLQRLPSSSSEMGSQDGSPLRETRKDPFSAAAAECSCRQDGLTVIVTACLTFATGVTVALVMQIYFGDPQIFQQGAVVTDAARCTSLGIEVLSKQGSSVDAAVAAALCLGIVAPHSSGLGGGGVMLVHDIRRNESHLIDFRESAPGALREETLQRSWETKVGTLVRRESSGESLFIALLLTQALIC

SEQ ID NO: 10814 - protein, 213 aa, Homo sapiens
MGSQDGSPLRETRKDPFSAAAAECSCRQDGLTVIVTACLTFATGVTVALVMQIYFGDPQIFQQGAVVTDAARCTSLGIEVLSKQGSSVDAAVAAALCLGIVAPHSSGLGGGGVMLVHDIRRNESHLIDFRESAPGALREETLQRSWETKPGLLVGVPGMVKGLHEAHQLYGRLPWSQVLAFAAAVAQDGFNVTHDLGQWGLGIWERHEVDGEG

SEQ ID NO: 10815 - protein, 297 aa, Homo sapiens
MKHIINSYENINNTARNNSDCPRVVLPEEIFFTISIVGVLENLIVLLAVFKNKNLQAPMYFFICSLAISDMLGSLYKILENILIILRNMGYLKPRGSFETTADDIIDSLFVLSLLGSIFSLSVIAADRYITIFHALRYHSIVTMRRTVVVLTVIWTFCTGTGITMVIFSHHVPTVITFTSLFPLMLVFILCLYVHMFLLARSHTRKISTLPRANMKGAITLTILLGVFIFCWAPFVLHVLLMTFCPSNPYCACYMSLFQVNGMLIMCNAVIDPFIYAFRSPELRDAFKKMIFCSRYW

SEQ ID NO: 10816 - protein, 2113 aa, Homo sapiens
MTGAGEPRREEPPPQPSAGLRSRESGAPSAGGWERAERGRGAAARPATGPPPRRIGPLYGMWLVTFLLLLDSLHKARPEDVGTSLYFVNDSLQQVTFSSSVGVVVPCPAAGSPSAALRWYLATGDDIYDVPHIRHVHANGTLQLYPFSPSAFNSFIHDNDYFCTAENAAGKIRSPNIRVKAVFREPYTVRVEDQRSMRGNVAVFKCLIPSSVQEYVSVVSWEKDTVSIIPEHRFFITYHGGLYISDVQKEDALSTYRCITKHKYSGETRQSNGARLSVTDPAESIPTILDGFHSQEVWAGHTVELPCTASGYPIPAIRWLKDGRPLPADSRWTKRITGLTISDLRTEDSGTYICEVTNTFGSAEATGILMVIDPLHVTLTPKKLKTGIGSTVILSCALTGSPEFTIRWYRNTELVLPDEAISIRGLSNETLLITSAQKSHSGAYQCFATRKAQTAQDFAIIALEDGTPRIVSSFSEKVVNPGEQFSLMCAAKGAPPPTVTWALDDEPIVRDGSHRTNQYTMSDGTTISHMNVTGPQIRDGGVYRCTARNLVGSAEYQARINVRGPPSIRAMRNITAVAGRDTLINCRVIGYPYYSIKWYKDALLLPDNHRQVVFENGTLKLTDVQKGMDEGEYLCSVLIQPQLSISQSVHVAVKVPPLIQPFEFPPASIGQLLYIPCVVSSGDMPIRITWRKDGQVIISGSGVTIESKEFMSSLQISSVSLKHNGNYTCIASNAAATVSRERQLIVRVPPRFVVQPNNQDGIYGKAGVLNCSVDGYPPPKVMWKHAKGSGNPQQYHPVPLTGRIQILPNSSLLIRHVLEEDIGYYLCQASNGVGTDISKSMFLTVKIPAMITSHPNTTIAIKGHAKELNCTARGERPIIIRWEKGDTVIDPDRVMRYAIATKDNGDEVVSTLKLKPADRGDSVFFSCHAINSYGEDRGLIQLTVQEPPDPPELEIREVKARSMNLRWTQRFDGNSIITGFDIEYKNKSDSWDFKQSTRNISPTINQANIVDLHPASVYSIRMYSFNKIGRSEPSKELTISTEEAAPDGPPMDVTLQPVTSQSIQVTWKAPKKELQNGVIRGYQIGYRENSPGSNGQYSIVEMKATGDSEVYTLDNLKKFAQYGVVVQAFNRAGTGPSSSEINATTLEDVPSQPPENVRALSITSDVAVISWSEPPRSTLNGVLKGYRVIFWSLYVDGEWGEMQNITTTRERVELRGMEKFTNYSVQVLAYTQAGDGVRSSVLYIQTKEDVPGPPAGIKAVPSSASSVVVSWLPPTKPNGVIRKYTIFCSSPGSGQPAPSEYETSPEQLFYRIAHLNRGQQYLLWVAAVTSAGRGNSSEKVTIEPAGKAPAKIISFGGTVTTPWMKDVRLPCNSVGDPAPAVKWTKDSEDSAIPVSMDGHRLIHTNGTLLLRAVKAEDSGYYTCTATNTGGFDTIIVNLLVQVPPDQPRLTVSKTSASSITLTWIPGDNGGSSIRGFVLQYSVDNSEEWKDVFISSSERSFKLDSLKCGTWYKVKLAAKNSVGSGRISEIIEAKTHGREPSFSKDQHLFTHINSTHARLNLQGWNNGGCPITAIVLEYRPKGTWAWQGLRANSSGEVFLTELREATWYELRMRACNSAGCGNETAQFATLDYDGSTIPPIKSAQGEGDDVKKLFTIGCPVILATLGVALLFIVRKKRKEKRLKRLRDAKSLAEMLISKNNRSFDTPVKGPPQGPRLHIDIPRVQLLIEDKEGIKQLGDDKATIPVTDAEFSQAVNPQSFCTGVSLHHPTLIQSTGPLIDMSDIRPGTNPVSRKNVKSAHSTRNRYSSQWTLTKCQASTPARTLTSDWRTVGSQHGVTVTESDSYSASLSQDTDKGRNSMVSTESASSTYEELARAYEHAKLEEQLQHAKFEITECFISDSSSDQMTTGTNENADSMTSMSTPSEPGICRFTASPPKPQDADRGKNVAVPIPHRANKSDYCNLPLYAKSEAFFRKADGREPCPVVPPREASIRNLARTYHTQARHLTLDPASKSLGLPHPGAPAAASTATLPQRTLAMPAPPAGTAPPAPGPTPAEPPTAPSAAPPAPSTEPPRAGGPHTKMGGSRDSLLEMSTSGVGRSQKQGAGAYSKSYTLV

SEQ ID NO: 10817 - protein, 892 aa, Homo sapiens
GGDEQVRDAAAVPAGLPRLEGGDKTLREPGAGAQEVTLKVHISDASTHQPVADALIEIFTNQASIASGTSGTDGVAFIKFQYKLGSQLIVTASKHAYVPNSAPWKPIRLPVFSSLSLGLLPERSATLMVYEDVVQIVSGFQGARPQPRVHFQRRALRLPENTSYSDLTAFLTAASSPSEVDSFPYLRGLDGNGTGNSTRHDLTPVTAVSVHLLSSNGTPVLVDGPIYVTVPLATQSSLRHNAYVAAWRFDQKLGTWLKSGLGLVHQEGSQLTWTYIAPQLGYWVAAMSPPIPGPVVTQDITTYHTVFLLAILGGMAFILLVLLCLLLYYCRRKCLKPRQHHRKLQLPAGLESSKRDQSTSMSHINLLFSRRASEFPGPLSVTSHGRPEAPGTKELMSGVHLEMMSPGGEGDLHTPMLKLSYSTSQEFSSREELLSCKEEDKSQISFDNLTPSGTLGKDYHKSVEVFSLKARKSMEREGYESSGMMTTGVVTTPCSHSLYLKSRTEKVQPPREANSPFRNICTPRLHHLRKNSCWTADPLNVMMSRSVDHLERPTSFPRPGQLICCSSVDQVNDSVYRKVLPALVIPAHYMKLPGDHSYVSQPLVVPADQQLEIERLQAELSNPHAGIFPHPSSQIQPQPLSSQAISQQHLQDAGTREWSPQNASMSESLSIPASLNDAALAQMNSEVQLLTEKALMELGGGKPLPHTRAWFVSLDGRSNAHVRHSYIDLQRAGRNGSNDASLDSGVDMNEPKSARKGRGDALSLQQNYPPVQEHQQKEPRAPDSTAYTQLVYLDDVEQSGSECGTTVCTPEDSALRCLLEGSSRRSGGQLPSLQEETTRRTADAPSEPAASPHQRRSAHEEEEDDDDDDQGEDKKSPWQKREERPLMAFNIK

SEQ ID NO: 10818 - protein, 1055 aa, Homo sapiens
MPMKWSGWRWSWGPATHTALPPPQGFCRSALHPLSLLVQAIMLAMTLALGTLPAFLPCELQPHGLVNCNWLFLKSVPHFSMAAPRGNVTSLSLSSNRIHHLHDSDFAHLPSLRHLNLKWNCPPVGLSPMHFPCHMTIEPSTFLAVPTLEELNLSYNNIMTVPALPKSLISLSLSHTNILMLDSASLAGLHALRFLFMDGNCYYKNPCRQALEVAPGALLGLGNLTHLSLKYNNLTVVPRNLPSSLEYLLLSYNRIVKLAPEDLANLTALRVLDVGGNCRRCDHAPNPCMECPRHFPQLHPDTFSHLSRLEGLVLKDSSLSWLNASWFRGLGNLRVLDLSENFLYKCITKTKAFQGLTQLRKLNLSFNYQKRVSFAHLSLAPSFGSLVALKELDMHGIFFRSLDETTLRPLARLPMLQTLRLQMNFINQAQLGIFRAFPGLRYVDLSDNRISGASELTATMGEADGGEKVWLQPGDLAPAPVDTPSSEDFRPNCSTLNFTLDLSRNNLVTVQPEMFAQLSHLQCLRLSHNCISQAVNGSQFLPLTGLQVLDLSHNKLDLYHEHSFTELPRLEALDLSYNSQPFGMQGVGHNFSFVAHLRTLRHLSLAHNNIHSQVSQQLCSTSLRALDFSGNALGHMWAEGDLYLHFFQGLSGLIWLDLSQNRLHTLLPQTLRNLPKSLQVLRLRDNYLAFFKWWSLHFLPKLEVLDLAGNQLKALTNGSLPAGTRLRRLDVSCNSISFVAPGFFSKAKELRELNLSANALKTVDHSWFGPLASALQILDVSANPLHCACGAAFMDFLLEVQAAVPGLPSRVKCGSPGQLQGLSIFAQDLRLCLDEALSWDCFALSLLAVALGLGVPMLHHLCGWDLWYCFHLCLAWLPWRGRQSGRDEDALPYDAFVVFDKTQSAVADWVYNELRGQLEECRGRWALRLCLEERDWLPGKTLFENLWASVYGSRKTLFVLAHTDRVSGLLRASFLLAQQRLLEDRKDVVVLVILSPDGRRSRYVRLRQRLCRQSVLLWPHQPSGQRSFWAQLGMALTRDNHHFYNRNFCQGPTAE

SEQ ID NO: 10819 - protein, 1017 aa, Homo sapiens
MAIMLAMTLALGTLPAFLPCELQPHGLVNCNWLFLKSVPHFSMAAPRGNVTSLSLSSNRIHHLHDSDFAHLPSLRHLNLKWNCPPVGLSPMHFPCHMTIEPSTFLAVPTLEELNLSYNNIMTVPALPKSLISLSLSHTNILMLDSASLAGLHALRFLFMDGNCYYKNPCRQALEVAPGALLGLGNLTHLSLKYNNLTVVPRNLPSSLEYLLLSYNRIVKLAPEDLANLTALRVLDVGGNCRRCDHAPNPCMECPRHFPQLHPDTFSHLSRLEGLVLKDSSLSWLNASWFRGLGNLRVLDLSENFLYKCITKTKAFQGLTQLRKLNLSFNYQKRVSFAHLSLAPSFGSLVALKELDMHGIFFRSLDETTLRPLARLPMLQTLRLQMNFINQAQLGIFRAFPGLRYVDLSDNRISGASELTATMGEADGGEKVWLQPGDLAPAPVDTPSSEDFRPNCSTLNFTLDLSRNNLVTVQPEMFAQLSHLQCLRLSHNCISQAVNGSQFLPLTGLQVLDLSHNKLDLYHEHSFTELPRLEALDLSYNSQPFGMQGVGHNFSFVAHLRTLRHLSLAHNNIHSQVSQQLCSTSLRALDFSGNALGHMWAEGDLYLHFFQGLSGLIWLDLSQNRLHTLLPQTLRNLPKSLQVLRLRDNYLAFFKWWSLHFLPKLEVLDLAGNQLKALTNGSLPAGTRLRRLDVSCNSISFVAPGFFSKAKELRELNLSANALKTVDHSWFGPLASALQILDVSANPLHCACGAAFMDFLLEVQAAVPGLPSRVKCGSPGQLQGLSIFAQDLRLCLDEALSWDCFALSLLAVALGLGVPMLHHLCGWDLWYCFHLCLAWLPWRGRQSGRDEDALPYDAFVVFDKTQSAVADWVYNELRGQLEECRGRWALRLCLEERDWLPGKTLFENLWASVYGSRKTLFVLAHTDRVSGLLRASFLLAQQRLLEDRKDVVVLVILSPDGRRSRYVRLRQRLCRQSVLLWPHQPSGQRSFWAQLGMALTRDNHHFYNRNFCQGPTAE

SEQ ID NO: 10820 - protein, 975 aa, Homo sapiens
MAAPRGNVTSLSLSSNRIHHLHDSDFAHLPSLRHLNLKWNCPPVGLSPMHFPCHMTIEPSTFLAVPTLEELNLSYNNIMTVPALPKSLISLSLSHTNILMLDSASLAGLHALRFLFMDGNCYYKNPCRQALEVAPGALLGLGNLTHLSLKYNNLTVVPRNLPSSLEYLLLSYNRIVKLAPEDLANLTALRVLDVGGNCRRCDHAPNPCMECPRHFPQLHPDTFSHLSRLEGLVLKDSSLSWLNASWFRGLGNLRVLDLSENFLYKCITKTKAFQGLTQLRKLNLSFNYQKRVSFAHLSLAPSFGSLVALKELDMHGIFFRSLDETTLRPLARLPMLQTLRLQMNFINQAQLGIFRAFPGLRYVDLSDNRISGASELTATMGEADGGEKVWLQPGDLAPAPVDTPSSEDFRPNCSTLNFTLDLSRNNLVTVQPEMFAQLSHLQCLRLSHNCISQAVNGSQFLPLTGLQVLDLSHNKLDLYHEHSFTELPRLEALDLSYNSQPFGMQGVGHNFSFVAHLRTLRHLSLAHNNIHSQVSQQLCSTSLRALDFSGNALGHMWAEGDLYLHFFQGLSGLIWLDLSQNRLHTLLPQTLRNLPKSLQVLRLRDNYLAFFKWWSLHFLPKLEVLDLAGNQLKALTNGSLPAGTRLRRLDVSCNSISFVAPGFFSKAKELRELNLSANALKTVDHSWFGPLASALQILDVSANPLHCACGAAFMDFLLEVQAAVPGLPSRVKCGSPGQLQGLSIFAQDLRLCLDEALSWDCFALSLLAVALGLGVPMLHHLCGWDLWYCFHLCLAWLPWRGRQSGRDEDALPYDAFVVFDKTQSAVADWVYNELRGQLEECRGRWALRLCLEERDWLPGKTLFENLWASVYGSRKTLFVLAHTDRVSGLLRASFLLAQQRLLEDRKDVVVLVILSPDGRRSRYVRLRQRLCRQSVLLWPHQPSGQRSFWAQLGMALTRDNHHFYNRNFCQGPTAE

SEQ ID NO: 10821 - protein, 1056 aa, Homo sapiens
MLYSSCKSRLLDSVEQDFHLEIAKKGFCRSALHPLSLLVQAIMLAMTLALGTLPAFLPCELQPHGLVNCNWLFLKSVPHFSMAAPRGNVTSLSLSSNRIHHLHDSDFAHLPSLRHLNLKWNCPPVGLSPMHFPCHMTIEPSTFLAVPTLEELNLSYNNIMTVPALPKSLISLSLSHTNILMLDSASLAGLHALRFLFMDGNCYYKNPCRQALEVAPGALLGLGNLTHLSLKYNNLTVVPRNLPSSLEYLLLSYNRIVKLAPEDLANLTALRVLDVGGNCRRCDHAPNPCMECPRHFPQLHPDTFSHLSRLEGLVLKDSSLSWLNASWFRGLGNLRVLDLSENFLYKCITKTKAFQGLTQLRKLNLSFNYQKRVSFAHLSLAPSFGSLVALKELDMHGIFFRSLDETTLRPLARLPMLQTLRLQMNFINQAQLGIFRAFPGLRYVDLSDNRISGASELTATMGEADGGEKVWLQPGDLAPAPVDTPSSEDFRPNCSTLNFTLDLSRNNLVTVQPEMFAQLSHLQCLRLSHNCISQAVNGSQFLPLTGLQVLDLSHNKLDLYHEHSFTELPRLEALDLSYNSQPFGMQGVGHNFSFVAHLRTLRHLSLAHNNIHSQVSQQLCSTSLRALDFSGNALGHMWAEGDLYLHFFQGLSGLIWLDLSQNRLHTLLPQTLRNLPKSLQVLRLRDNYLAFFKWWSLHFLPKLEVLDLAGNQLKALTNGSLPAGTRLRRLDVSCNSISFVAPGFFSKAKELRELNLSANALKTVDHSWFGPLASALQILDVSANPLHCACGAAFMDFLLEVQAAVPGLPSRVKCGSPGQLQGLSIFAQDLRLCLDEALSWDCFALSLLAVALGLGVPMLHHLCGWDLWYCFHLCLAWLPWRGRQSGRDEDALPYDAFVVFDKTQSAVADWVYNELRGQLEECRGRWALRLCLEERDWLPGKTLFENLWASVYGSRKTLFVLAHTDRVSGLLRASFLLAQQRLLEDRKDVVVLVILSPDGRRSRYVRLRQRLCRQSVLLWPHQPSGQRSFWAQLGMALTRDNHHFYNRNFCQGPTAE

SEQ ID NO: 10822 - protein, 1032 aa, Homo sapiens
MGFCRSALHPLSLLVQAIMLAMTLALGTLPAFLPCELQPHGLVNCNWLFLKSVPHFSMAAPRGNVTSLSLSSNRIHHLHDSDFAHLPSLRHLNLKWNCPPVGLSPMHFPCHMTIEPSTFLAVPTLEELNLSYNNIMTVPALPKSLISLSLSHTNILMLDSASLAGLHALRFLFMDGNCYYKNPCRQALEVAPGALLGLGNLTHLSLKYNNLTVVPRNLPSSLEYLLLSYNRIVKLAPEDLANLTALRVLDVGGNCRRCDHAPNPCMECPRHFPQLHPDTFSHLSRLEGLVLKDSSLSWLNASWFRGLGNLRVLDLSENFLYKCITKTKAFQGLTQLRKLNLSFNYQKRVSFAHLSLAPSFGSLVALKELDMHGIFFRSLDETTLRPLARLPMLQTLRLQMNFINQAQLGIFRAFPGLRYVDLSDNRISGASELTATMGEADGGEKVWLQPGDLAPAPVDTPSSEDFRPNCSTLNFTLDLSRNNLVTVQPEMFAQLSHLQCLRLSHNCISQAVNGSQFLPLTGLQVLDLSHNKLDLYHEHSFTELPRLEALDLSYNSQPFGMQGVGHNFSFVAHLRTLRHLSLAHNNIHSQVSQQLCSTSLRALDFSGNALGHMWAEGDLYLHFFQGLSGLIWLDLSQNRLHTLLPQTLRNLPKSLQVLRLRDNYLAFFKWWSLHFLPKLEVLDLAGNQLKALTNGSLPAGTRLRRLDVSCNSISFVAPGFFSKAKELRELNLSANALKTVDHSWFGPLASALQILDVSANPLHCACGAAFMDFLLEVQAAVPGLPSRVKCGSPGQLQGLSIFAQDLRLCLDEALSWDCFALSLLAVALGLGVPMLHHLCGWDLWYCFHLCLAWLPWRGRQSGRDEDALPYDAFVVFDKTQSAVADWVYNELRGQLEECRGRWALRLCLEERDWLPGKTLFENLWASVYGSRKTLFVLAHTDRVSGLLRASFLLAQQRLLEDRKDVVVLVILSPDGRRSRYVRLRQRLCRQSVLLWPHQPSGQRSFWAQLGMALTRDNHHFYNRNFCQGPTAE

SEQ ID NO: 10823 - protein, 529 aa, Homo sapiens
MFTVLTRQPCEQAGLKALYRTPTIIALVVLLVSIVVLVSITVIQIHKQEVLPPGLKYGIVLDAGSSRTTVYVYQWPAEKENNTGVVSQTFKCSVKGSGISSYGNNPQDVPRAFEECMQKVKGQVPSHLHGSTPIHLGATAGMRLLRLQNETAANEVLESIQSYFKSQPFDFRGAQIISGQEEGVYGWITANYLMGNFLEKNLWHMWVHPHGVETTGALDLGGASTQISFVAGEKMDLNTSDIMQVSLYGYVYTLYTHSFQCYGRNEAEKKFLAMLLQNSPTKNHLTNPCYPRDYSISFTMGHVFDSLCTVDQRPESYNPNDVITFEGTGDPSLCKEKVASIFDFKACHDQETCSFDGVYQPKIKGPFVAFAGFYYTASALNLSGSFSLDTFNSSTWNFCSQNWSQLPLLLPKFDEVYARSYCFSANYIYHLFVNGYKFTEETWPQIHFEKEVGNSSIAWSLGYMLSLTNQIPAESPLIRLPIEPPVFVGTLAFFTVAALLCLAFLAYLCSATRRKRHSEHAFDHAVDSD

SEQ ID NO: 10824 - protein, 1503 aa, Homo sapiens
MAAPAEPCAGQGVWNQTEPEPAATSLLSLCFLRTAGVWVPPMYLWVLGPIYLLFIHHHGRGYLWMSPLFKAKMVLGFALIVLCTSSVAVALWKIQQGTPEAPEFLIHPTVWLTTMSFAVFLIHTERKKGVQSSGVLFGYWLLCFVLPATNAAQQASGAGFQSDPVRHLSTYLCLSLVVAQFVLSCLADQPPFFPEDPQQSNPCPETGAAFPSKATFWWVSGLVWRGYRRPLRPKDLWSLGRENSSEELVSRLEKEWMRNRSAARRHNKAIAFKRKGGSGMKAPETEPFLRQEGSQWRPLLKAIWQVFHSTFLLGTLSLIISDVFRFTVPKLLSLFLEFIGDPKPPAWKGYLLAVLMFLSACLQTLFEQQNMYRLKVLQMRLRSAITGLVYRKVLALSSGSRKASAVGDVVNLVSVDVQRLTESVLYLNGLWLPLVWIVVCFVYLWQLLGPSALTAIAVFLSLLPLNFFISKKRNHHQEEQMRQKDSRARLTSSILRNSKTIKFHGWEGAFLDRVLGIRGQELGALRTSGLLFSVSLVSFQVSTFLVALVVFAVHTLVAENAMNAEKAFVTLTVLNILNKAQAFLPFSIHSLVQARVSFDRLVTFLCLEEVDPGVVDSSSSGSAAGKDCITIHSATFAWSQESPPCLHRINLTVPQGCLLAVVGPVGAGKSSLLSALLGELSKVEGFVSIEGAVAYVPQEAWVQNTSVVENVCFGQELDPPWLERVLEACALQPDVDSFPEGIHTSIGEQGMNLSGGQKQRLSLARAVYRKAAVYLLDDPLAALDAHVGQHVFNQVIGPGGLLQGTTRILVTHALHILPQADWIIVLANGAIAEMGSYQELLQRKGALVCLLDQARQPGDRGEGETEPGTSTKDPRGTSAGRRPELRRERSIKSVPEKDRTTSEAQTEVPLDDPDRAGWPAGKDSIQYGRVKATVHLAYLRAVGTPLCLYALFLFLCQQVASFCRGYWLSLWADDPAVGGQQTQAALRGGIFGLLGCLQAIGLFASMAAVLLGGARASRLLFQRLLWDVVRSPISFFERTPIGHLLNRFSKETDTVDVDIPDKLRSLLMYAFGLLEVSLVVAVATPLATVAILPLFLLYAGFQSLYVVSSCQLRRLESASYSSVCSHMAETFQGSTVVRAFRTQAPFVAQNNARVDESQRISFPRLVADRWLAANVELLGNGLVFAAATCAVLSKAHLSAGLVGFSVSAALQVTQTLQWVVRNWTDLENSIVSVERMQDYAWTPKEAPWRLPTCAAQPPWPQGGQIEFRDFGLRYRPELPLAVQGVSFKIHAGEKVGIVGRTGAGKSSLASGLLRLQEAAEGGIWIDGVPIAHVGLHTLRSRISIIPQDPILFPGSLRMNLDLLQEHSDEAIWAALETVQLKALVASLPGQLQYKCADRGEDLSVGQKQLLCLARALLRKTQILILDEATAAVDPGTELQMQAMLGSWFAQCTVLLIAHRLRSVMDCARVLVMDKGQVAESGSPAQLLAQKGLFYRLAQESGLV

SEQ ID NO: 10825 - protein, 793 aa, Homo sapiens
MEARVERAVQKRQVLFLCVFLGMSWAGAEPLRYFVAEETERGTFLTNLAKDLGLGVGELRARGTRIVSDQNMQILLLSSLTGDLLLNEKLDREELCGPREPCVLPFQLLLEKPFQIFRAELWVRDINDHAPVFLDREISLKILESTTPGAAFLLESAQDSDVGTNSLSNYTISPNAYFHINVHDSGEGNIYPELVLNQVLDREEIPEFSLTLTALDGGSPPRSGTALVRILVLDVNDNAPDFVRSLYKVQVPENSPVGSMVVSVSARDLDTGSNGEIAYAFSYATERILKTFQINPTSGSLHLKAQLDYEAIQTYTLTIQAKDGGGLSGKCTVVVDVTDINDNRPELLLSSLTSPIAENSPETVVAVFRIRDRDSGNNGKTVCSIQDDVPFILKPSVENFYTLVTEKPLDRERNTEYNITITVTDLGTPRLKTEHNITVLVSDVNDNAPAFTQTSYTLFVRENNSPALPIGSVSATDRDSGTNAQVIYSLLPSQDPHLPLASLVSINADNGHLFALRSLDYEALQAFEFRVGATDRGSPALSSEALVRVLVLDANDNSPFVLYPLQNSSAPCTEPLPRAAEPGYLVTKVVAVDGDSGQNAWLSYQLLKATEPGLFGVWAHNGEVRTARLLSERDAAKQRLVVLVKDNGEPPRSATATLHVLLVDGFSQPYLRLPEAAPDQANSLTVYLVVALASVSSLFLLSVLLFVAVRLCRRSRAAPVGRCSVPEGPFPRHLVDLSGTGTLSQSYQYEVCLTGGSGTNEFKFLKPIIPNLLPQSTGREVEENRPFQNNLGF

SEQ ID NO: 10826 - protein, 776 aa, Homo sapiens
MEIGWMHNRRQRQVLVFFVLLSLSGAGAELGSYSVVEETERGSFVANLGKDLGLGLTEMSTRKARIISQGNKQHLQLKAQTGDLLINEKLDREELCGPTEPCILHFQVLMENPLEIFQAELRVIDINDHSPMFTEKEMILKIPENSPLGTEFPLNHALDLDVGSNNVQNYKISPSSHFRVLIHEFRDGRKYPELVLDKELDREEEPQLRLTLTALDGGSPPRSGTAQVRIEVVDINDNAPEFEQPIYKVQIPENSPLGSLVATVSARDLDGGANGKISYTLFQPSEDISKTLEVNPMTGEVRLRKQVDFEMVTSYEVRIKATDGGGLSGKCTLLLQVVDVNDNPPQVTMSALTSPIPENSPEIVVAVFSVSDPDSGNNGKTISSIQEDLPFLLKPSVKNFYTLVTERALDREARAEYNITLTVTDMGTPRLKTEHNITVQISDVNDNAPTFTQTSYTLFVRENNSPALHIGSVSATDRDSGTNAQVTYSLLPPQDPHLPLASLVSINADNGHLFALRSLDYEALREFEFRVSATDRGSPALSSEALVRVLVLDANDNSPFVLYPLQNGSAPCTELVPRAAEPGYLVTKVVAVDGDSGQNAWLSYQLLKATEPGLFGVWAHNGEVRTARLLSERDAAKQRLVVLVKDNGEPPRSATATLHVLLVDGFSQPFLPLPEAAPGQTQANSLTVYLVVALASVSSLFLFSVLLFVAVRLCRRSRAASVGRCSMPEGPFPGRLVDVSGTGTLSQSYQYEVCLTGGSETSEFKFLKPIIPNFSP

SEQ ID NO: 10827 - protein, 776 aa, Homo sapiens
MEIGWMHNRRQRQVLVFFVLLSLSGAGAELGSYSVVEETERGSFVANLGKDLGLGLTEMSTRKARIISQGNKQHLQLKAQTGDLLINEKLDREELCGPTEPCILHFQVLMENPLEIFQAELRVIDINDHSPMFTEKEMILKIPENSPLGTEFPLNHALDLDVGSNNVQNYKISPSSHFRVLIHEFRDGRKYPELVLDKELDREEEPQLRLTLTALDGGSPPRSGTAQVRIEVVDINDNAPEFEQPIYKVQIPENSPLGSLVATVSARDLDGGANGKISYTLFQPSEDISKTLEVNPMTGEVRLRKQVDFEMVTSYEVRIKATDGGGLSGKCTLLLQVVDVNDNPPQVTMSALTSPIPENSPEIVVAVFSVSDPDSGNNGKTISSIQEDLPFLLKPSVKNFYTLVTERALDREARAEYNITLTVTDMGTPRLKTEHNITVQISDVNDNAPTFTQTSYTLFVRENNSPALHIGSVSATDRDSGTNAQVTYSLLPPQDPHLPLASLVSINADNGHLFALRSLDYEALQAFEFRVGATDRGSPALSREALVRVLVLDANDNSPFVLYPLQNGSAPCTELVPRAAEPGYLVTKVVAVDGDSGQNAWLSYQLLKATEPGLFGVWAHNGEVRTARLLSERDAAKQRLVVLVKDNGEPPRSATATLHVLLVDGFSQPFLPLPEAAPGQTQANSLTVYLVVALASVSSLFLFSVLLFVAVRLCRRSRAASVGRCSMPEGPFPGRLVDVSGTGTLSQSYQYEVCLTGGSETSEFKFLKPIIPNFSP

SEQ ID NO: 10828 - protein, 152 aa, Homo sapiens
MDDMDRDLGDEYGWKQVHGDVFRPSSHPLIFSSLIGSGCQIFAVSLIVIIVAMIEDLYTERGSMLSTAIFVYAATSPVNGYFGGSLYARQGGRRWIKQMFIGAFLIPAMVCGTAFFINFIAIYYHASRAIPFGTMVSCLNLTFKLKKYTHSN

SEQ ID NO: 10829 - protein, 291 aa, Homo sapiens
MTKEYQDLQHLDNEESDHHQLRKGPPPPQPLLQRLCSGPRLLLLSLGLSLLLLVVVCVIGSQNSQLQEELRGLRETFSNFTASTEAQVKGLSTQGGNVGRKMKSLESQLEKQQKDLSEDHSSLLLHVKQFVSDLRSLSCQMAALQGNGSERTCCPVNWVEHERSCYWFSRSGKAWADADNYCRLEDAHLVVVTSWEEQKFVQHHIGPVNTWMGLHDQNGPWKWVDGTDYETGFKNWRPEQPDDWYGHGLGGGEDCAHFTDDGRWNDDVCQRPYRWVCETELDKASQEPPLL

SEQ ID NO: 10830 - protein, 1086 aa, Homo sapiens
MANLLKTVVTGCSCPLLSNLGSCKGLRVKKDFLRTFYTHQELWCKAPVKPGIPYKQLTVGVPKEIFQNEKRVALSPAGVQNLVKQGFNVVVESGAGEASKFSDDHYRVAGAQIQGAKEVLASDLVVKVRAPMVNPTLGVHEADLLKTSGTLISFIYPAQNPELLNKLSQRKTTVLAMDQVPRVTIAQGYDALSSMANIAGYKAVVLAANHFERFFTGQITAAGKVPPAKILIVGGGVAGLASAGAAKSMGAIVRGFDTRAAALEQFKSLGAEPLEVDLKESGEGQGGYAKEMSKEFIEAEMKLFAQQCKEVDILISTALIPGKKAPVLFNKEMIESMKEGSVVVDLAAEAGGNFETTKPGELYIHKGITHIGYTDLPSRMATQASTLYSNNITKLLKAISPDKDNFYFDVKDDFDFGTMGHVIRGTVVMKDGKVIFPAPTPKNIPQGAPVKQKTVAELEAEKAATITPFRKTMSTASAYTAGLTGILGLGIAAPNLAFSQMVTTFGLAGIVGYHTVWGVTPALHSPLMSVTNAISGLTAVGGLALMGGHLYPSTTSQGLAALAAFISSVNIAGGFLVTQRMLDMFKRPTDPPEYNYLYLLPAGTFVGGYLAALYSGYNIEQIMYLGSGLCCVGALAGLSTQGTARLGNALGMIGVAGGLAATLGVLKPGPELLAQMSGAMALGGTIGLTIAKRIQISDLPQLVAAFHSLVGLAAVLTCIAEYIIEYPHFATDAAANLTKIVAYLGTYIGGVTFSGSLIAYGKLQGLLKSAPLLLPGRHLLNAGLLAASVGGIIPFMVDPSFTTGITCLGSVSALSAVMGVTLTAAIGGADMPVVITVLNSYSGWALCAEGFLLNNNLLTIVGALIGSSGAILSYIMCVAMNRSLANVILGGYGTTSTAGGKPMEISGTHTEINLDNAIDMIREANSIIITPGYGLCAAKAQYPIADLVKMLTEQGKKVRFGIHPVAGRMPGQLNVLLAEAGVPYDIVLEMDEINHDFPDTDLVLVIGANDTVNSAAQEDPNSIIAGMPVLEVWKSKQVIVMKRSLGVGYAAVDNPIFYRPNTAMLLGDAKKTCDALQAKVRESYQK

SEQ ID NO: 10831 - protein, 253 aa, Homo sapiens
MHYYRYSNAKVSCWYKYLLFSYNIIFWGVLSDLTKVTRMHGIDPVVLVLMVGVVMFTLGFAGCVGALRENICLLNFFCGTIVLIFFLELAVAVLAFLFQDWVRDRFREFFESNIKSYRDDIDLQNLIDSLQKANQCCGAYGPEDWDLNVYFNCSGASYSREKCGVPFSCCVPDPAQKVVNTQCGYDVRIQLKSKWDESIFTKGCIQALESWLPRNIYIVAGVFIAISLLQIFGIFLARTLISDIEAVKAGHHF

SEQ ID NO: 10832 - protein, 270 aa, Homo sapiens
MHYYRYSNAKVSCWYKYLLFSYNIIFWLAGVVFLGVGLWAWSEKGVLSDLTKVTRMHGIDPVVLVLMVGVVMFTLGFAGCVGALRENICLLNFFCGTIVLIFFLELAVAVLAFLFQDWVRDRFREFFESNIKSYRDDIDLQNLIDSLQKANQCCGAYGPEDWDLNVYFNCSGASYSREKCGVPFSCCVPDPAQKVVNTQCGYDVRIQLKSKWDESIFTKGCIQALESWLPRNIYIVAGVFIAISLLQIFGIFLARTLISDIEAVKAGHHF

SEQ ID NO: 10833 - protein, 494 aa, Homo sapiens
MDGSGERSLPEPGSQSSAASDDIEIVVNVGGVRQVLYGDLLSQYPETRLAELINCLAGGYDTIFSLCDDYDPGKREFYFDRDPDAFKCVIEVYYFGEVHMKKGICPICFKNEMDFWKVDLKFLDDCCKSHLSEKREELEEIARRVQLILDDLGVDAAEGRWRRCQKCVWKFLEKPESSCPARVVAVLSFLLILVSSVVMCMGTIPELQVLDAEGNRVEHPTLENVETACIGWFTLEYLLRLFSSPNKLHFALSFMNIVDVLAILPFYVSLTLTHLGARMMELTNVQQAVQALRIMRIARIFKLARHSSGLQTLTYALKRSFKELGLLLMYLAVGIFVFSALGYTMEQSHPETLFKSIPQSFWWAIITMTTVGYGDIYPKTTLGKLNAAISFLCGVIAIALPIHPIINNFVRYYNKQRVLETAAKHELELMELNSSSGGEGKTGGSRSDLDNLPPEPAGKEAPSCSSRLKLSHSDTFIPLLTEEKHHRTRLQSCK

SEQ ID NO: 10834 - protein, 410 aa, Homo sapiens [sequence omitted]

SEQ ID NO: 10835 - protein, 322 aa, Homo sapiens
MNSLKDGNHTALTGFILLGLTDDPILRVILFMIILSGNLSIIILIRISSQLHHPMYFFLSHLAFADMAYSSSVTPNMLVNFLVERNTVSYLGCAIQLGSAAFFATVECVLLAAMAYDRFVAICSPLLYSTKMSTQVSVQLLLVVYIAGFLIAVSYTTSFYFLLFCGPNQVNHFFCDFAPLLELSCSDISVSTVVLSFSSGSIIVVTVCVIAVCYIYILITILKMRSTEGHHKAFSTCTSHLTVVTLFYGTITFIYVMPNFSYSTDQNKVVSVLYTVVIPMLNPLIYSLRNKEIKGALKRELVRKILSHDACYFSRTSNNDIT

SEQ ID NO: 10836 - protein, 1532 aa, Homo sapiens
PLQISRRKHQEKKERGGFIQSCFQFLQNLKPGGYGMDVTKKNKRDGTEVTERIVTETVTTRLTSLPPKGGTSNGYAKTASLGGGSRLEKQSLTHGSSGYINSTGSTRGHASTSSYRRAHSPASTLPNSPGSTFERKTHVTRHAYEGSSSGNSSPEYPRKEFASSSTRGRSQTRESEIRVRLQSASPSTRWTELDDVKRLLKGSRSASVSPTRNSSNTLPIPKKGTVETKIVTASSQSVSGTYDATILDANLPSHVWSSTLPAGSSMGTYHNNMTTQSSSLLNTNAYSAGSVFGVPNNMASCSPTLHPGLSTSSSVFGMQNNLAPSLTTLSHGTTTTSTAYGVKKNMPQSPAAVNTGVSTSAACTTSVQSDDLLHKDCKFLILEKDNTPAKKEMELLIMTKDSGKVFTASPASIAATSFSEDTLKKEKQAAYNADSGLKAEANGDLKTVSTKGKTTTADIHSYSSSGGGGSGGGGGVGGAGGGPWGPAPAWCPCGSCCSWWKWLLGLLLTWLLLLGLLFGLIALAEEVRKLKARVDELERIRRSILPYGDSMDRIEKDRLQGMAPAAGADLDKIGLHSDSQEELWMFVRKKLMMEQENGNLRGSPGPKGDMGSPGPKGDRGFPGTPGIPGPLGHPGPQGPKGQKGSVGDPGMEGPMGQRGREGPMGPRGEAGPPGSGEKGERGAAGEPGPHGPPGVPGSVGPKGSSGSPGPQGPPGPVGLQGLRGEVGLPGVKGDKGPMGPPGPKGDQGEKGPRGLTGEPGMRGLPGAVGEPGAKGAMGPAGPDGHQGPRGEQGLTGMPGIRGPPGPSGDPGKPGLTGPQGPQGLPGTPGRPGIKGEPGAPGKIVTSEGSSMLTVPGPPGPPGAMGPPGPPGAPGPAGPAGLPGHQEVLNLQGPPGPPGPRGPPGPSIPGPPGPRGPPGEGLPGPPGPPGSFLSNSETFLFGPPGPPGPPGPKGDQGPPGPRGHQGEQGLPGFSTSGSSSFGLNLQGPPGPPGPQGPKGDKGDPGVPGALGIPSGPSEGGSSSTMYVSGPPGPPGPPGPPGSISSSGQEIQQYISEYMQSDSIRSYLSGVQGPPGPPGPPGPVTTITGETFDYSELASHVVSYLRTSGYGVSLFSSSISSEDILAVLQRDDVRQYLRQYLMGPRGPPGPPGASGDGSLLSLDYAELSSRILSYMSSSGISIGLPGPPGPPGLPGTSYEELLSLLRGSEFRGIVGPPGPPGPPGIPGNVWSSISVEDLSSYLHTAGLSFIPGPPGPPGPPGPRGPPGVSGALATYAAENSDSFRSELISYLTSPDVRSFIVGPPGPPGPQGPPGDSRLLSTDASHSRGSSSSSHSSSVRRGSSYSSSMSTGGGGAGSLGAGGAFGEAAGDRGPYGTDIGPGGGYGAAAEGGMYAGNGGLLGADFAGDLDYNELAVRVSESMQRQGLLQGMAYTVQGPPGQPGPQGPPGISKVFSAYSNVTADLMDFFQTYGAIQGPPGQKGEMGTPGPKGDRGPAGPPGHPGPPGPRGHKGEKGDKGDQVYAGRRRRRSIAVKP

SEQ ID NO: 10837 - protein, 503 aa, Homo sapiens
MEAAVAAPRPRLLLLVLAAAAAAAAALLPGATALQCFCHLCTKDNFTCVTDGLCFVSVTETTDKVIHNSMCIAEIDLIPRDRPFVCAPSSKTGSVTTTYCCNQDHCNKIELPTTVKSSPGLGPVELAAVIAGPVCFVCISLMLMVYICHNRTVIHHRVPNEEDPSLDRPFISEGTTLKDLIYDMTTSGSGSGLPLLVQRTIARTIVLQESIGKGRFGEVWRGKWRGEEVAVKIFSSREERSWFREAEIYQTVMLRHENILGFIAADNKDNGTWTQLWLVSDYHEHGSLFDYLNRYTVTVEGMIKLALSTASGLAHLHMEIVGTQGKPAIAHRDLKSKNILVKKNGTCCIADLGLAVRHDSATDTIDIAPNHRVGTKRYMAPEVLDDSINMKHFESFKRADIYAMGLVFWEIARRCSIGGIHEDYQLPYYDLVPSDPSVEEMRKVVCEQKLRPNIPNRWQSCEALRVMAKIMRECWYANGAARLTALRIKKTLSQLSQQEGIKM

SEQ ID NO: 10838 - protein, 884 aa, Homo sapiens
MEQAGTRPAATEHPRLRRPMPWLLLLPLLLLLLLLLPGPAASQLRYSVPEEQAPGALVGNVARALGLELRRLGPGCLRINHLGAPSPRYLELDLTSGALFVNERIDREALCEQRPRCLLSLEVLAHNPVAVSAVEVEILDINDNSPRFPRPNYQLQVSESVAPGARFHIESAQDPDVGANSVQTYELSPSEHFELDLKPLQENSKVLELVLRKGLDREQAALHHLVLTAVDGGIPARSGTAQISVRVLDTNDNSPAFDQSTYRVQLREDSPPGTLVVKLNASDPDEGSNGELRYSLSSYTSDRERQLFSIDASTGEVRVIGGLDYEEASSYQIYVQATDRGPVPMAGHCKVLVDIVDVNDNAPEVVLTDLYSPVPENATPNTIVAVLSVNDQDSGPNRKVSLGLEATLPFRLNGFGNSYTLVVSGPLDRERVAVYNITVTATDGGIPQLTSLRTLKVEISDINDNPPSFLEDSYSIYIQENNLPGVLLCTVQATDPDEKENAEVTYSLLEREIQGLPVTSYVSINSASGSLYAVNSFDYEKFREFFVTVEAQDKGSPPLSSTVTANVYVVDMNDHAPHILYPTSTNSSAAFEMVPRTAPAGYLVTKVIAMDSDSGQNAWLFYHLAQTSDLDLFKVELHTGEIRTTRKMGDESGSTFNLTVVVRDNGEPSLSASVAITVAVVDRVSKILPDTQRHVKSPRTYSEITLYLIIALSTVSFIFLLTIIILSIIKCYRYTAYGTACCGGFCGVRERSPAELYKQANNNIDARIPHGLKVQPHFIEVRGNGSLTKTYCYKACLTAGSGSDTFMFYNTGAQTGPGPSGAQAAVTDSRNLTGQSGQNAGNLIILKNEAVSQNEVRQWSGGLLQTHAFVTHPPISCDLALLSH

SEQ ID NO: 10839 - protein, 453 aa, Homo sapiens
MASSLPWLCIILWLENALGKLEVEGNFYSENVSRILDNLLEGYDNRLRPGFGGAVTEVKTDIYVTSFGPVSDVEMEYTMDVFFRQTWTDERLKFGGPTEILSLNNLMVSKIWTPDTFFRNGKKSIAHNMTTPNKLFRIMQNGTILYTMRLTINADCPMRLVNFPMDGHACPLKFGSYAYPKSEIIYTWKKGPLYSVEVPEESSSLLQYDLIGQTVSSETIKSNTGEYVIMTVYFHLQRKMGYFMIQIYTPCIMTVILSQVSFWINKESVPARTVFGITTVLTMTTLSISARHSLPKVSYATAMDWFIAVCFAFVFSALIEFAAVNYFTNLQTQKAKRKAQFAAPPTVTISKATEPLEAEIVLHPDSKYHLKKRITSLSLPIVSSSEANKVLTRAPILQSTPVTPPPLPPAFGGTSKIDQYSRILFPVAFAGFNLVYWVVYLSKDTMEVSSSVE

SEQ ID NO: 10840 - protein, 335 aa, Homo sapiens
MAQVRALHKIMALFSANSIGAMNNSDTRIAGCFLTGIPGLEQLHIWLSIPFCIMYITALEGNGILICVILSQAILHEPMYIFLSMLASADVLLSTTTMPKALANLWLGYSLISFDGCLTQMFFIHFLFIHSAVLLAMAFDRYVAICSPLRYVTILTSKVIGKIVTAALSHSFIIMFPSIFLLEHLHYCQINIIAHTFCEHMGIAHLSCSDISINVWYGLAAALLSTGLDIMLITVSYIHILQAVFRLLSQDARSKALSTCGSHICVILLFYVPALFSVFAYRFGGRSVPCYVHILLASLYVVIPPMLNPVIYGVRTKPILEGAKQMFSNLAKGSK

SEQ ID NO: 10841 - protein, 981 aa, Homo sapiens
GRIPSPSVDSFYFYGLSLSIHGAEKRLQIHQRRSVASRPASRRRLPVVRHSSLPPGRRSIKMEASSSGITNGKTKVFHPVAKDVNILFDELEAVSSPCKDDDSLLHPGNLTSTSDDASRLEAGGETVPERNKSNGLYFRDGKCRIDYILVYRKSNPQTEKREVFERNIRAEGLQMEKESSLINSDIIFVKLHAPWEVLGRYAEQMNVRMPFRRKIYYLPRRYKFMSRIDKQISRFRRWLPKKPMRLDKETLPDLEENDCYTAPFSQQRIHHFIIHNKETFFNNATRSRIVHHILQRIKYEEGKNKIGLNRLLTNGSYEAAFPLHEGSYRSKNSIRTHGAENHRHLLYECWASWGVWYKYQPLDLVRRYFGEKIGLYFAWLGWYTGMLFPAAFIGLFVFLYGVTTLDHSQVSKEVCQATDIIMCPVCDKYCPFMRLSDSCVYAKVTHLFDNGATVFFAVFMAVWATVFLEFWKRRRAVIAYDWDLIDWEEEEEEIRPQFEAKYSKKERMNPISGKPEPYQAFTDKCSRLIVSASGIFFMICVVIAAVFGIVIYRVVTVSTFAAFKWALIRNNSQVATTGTAVCINFCIIMLLNVLYEKVALLLTNLEQPRTESEWENSFTLKMFLFQFVNLNSSTFYIAFFLGRFTGHPGAYLRLINRWRLEECHPSGCLIDLCMQMGIIMVLKQTWNNFMELGYPLIQNWWTRRKVRQEHGPERKISFPQWEKDYNLQPMNAYGLFDEYLEMILQFGFTTIFVAAFPLAPLLALLNNIIEIRLDAYKFVTQWRRPLASRAKDIGIWYGILEGIGILSVITNAFVIAITSDFIPRLVYAYKYGPCAGQGEAGQKCMVGYVNASLSVFRISDFENRSEPESDGSEFSGTPLKYCRYRDYRDPPHSLVPYGYTLQFWHVLAARLAFIIVFEHLVFCIKHLISYLIPDLPKDLRDRMRREKYLIQEMMYEAELERLQKERKERKKNGKAHHNEWP

SEQ ID NO: 10842 - protein, 507 aa, Homo sapiens
MGCWGRNRGRLLCMLALTFMFMVLEVVVSRVTSSLAMLSDSFHMLSDVLALVVALVAERFARRTHATQKNTFGWIRAEVMGALVNAIFLTGLCFAILLEAIERFIEPHEMQQPLVVLGVGVAGLLVNVLGLCLFHHHSGFSQDSGHGHSHGGHGHGHGLPKGPRVKSTRPGSSDINVAPGEQGPDQEETNTLVANTSNSNGLKLDPADPENPRSGDTVEVQVNGNLVREPDHMELEEDRAGQLNMRGVFLHVLGDALGSVIVVVNALVFYFSWKGCSEGDFCVNPCFPDPCKAFVEIINSTHASVYEAGPCWVLYLDPTLCVVMVCILLYTTYPLLKESALILLQTVPKQIDIRNLIKELRNVEGVEEVHELHVWQLAGSRIIATVHIKCEDPTSYMEVAKTIKDVFHNHGIHATTIQPEFASVGSKSSVVPCELACRTQCALKQCCGTLPQAPSGKDAEKTPAVSISCLELSNNLEKKPRRTKAENIPAVVIEIKNMPNKQPESSL

SEQ ID NO: 10843 - protein, 650 aa, Homo sapiens
MAAKSDGRLKMKKSSDVAFTPLQNSDHSGSVQGLAPGLPSGSGAEDEEAAGGGCCPDGGGCSRCCCCCAGSGGSAGSGGSGGVAGPGGGGAGSAALCLRLGREQRRYSLWDCLWILAAVAVYFADVGTDVWLAVDYYLRGQRWWFGLTLFFVVLGSLSVQVFSFRWFVHDFSTEDSATAAAASSCPQPGADCKTVVGGGSAAGEGEARPSTPQRQASNASKSNIAAANSGSNSSGATRASGKHRSASCSFCIWLLQSLIHILQLGQIWRYFHTIYLGIRSRQSGENDRWRFYWKMVYEYADVSMLHLLATFLESAPQLVLQLCIIVQTHSLQALQGFTAAASLVSLAWALASYQKALRDSRDDKKPISYMAVIIQFCWHFFTIAARVITFALFASVFQLYFGIFIVLHWCIMTFWIVHCETEFCITKWEEIVFDMVVGIIYIFSWFNVKEGRTRCRLFIYYFVILLENTALSALWYLYKAPQIADAFAIPALCVVFSSFLTGVVFMLMYYAFFHPNGPRFGQSPSCACEDPAAAFTLPPDVATSTLRSISNNRSVVSDRDQKFAERDGCVPVFQVRPTAPSTPSSRPPRIEESVIKIDLFRNRYPAWERHVLDRSLRKAILAFECSPSPPRLQYKDDALIQERLEYETTL

SEQ ID NO: 10844 - protein, 226 aa, Homo sapiens
MPGGPGVLQALPATIFLLFLLSAVYLGPGCQALWMHKVPASLMVSLGEDAHFQCPHNSSNNANVTWWRVLHGNYTWPPEFLGPGEDPNGTLIIQNVNKSHGGIYVCRVQEGNESYQQSCGTYLRVRQPPPRPFLDMGEGTKNRIITAEGIILLFCAVVPGTLLLFRKRWQNEKLGLDAGDEYEDENLYEGLNLDDCSMYEDISRGLQGTYQDVGSLNIGDVQLEKP

SEQ ID NO: 10845 - protein, 229 aa, Homo sapiens
MARLALSPVPSHWMVALLLLLSAEPVPAARSEDRYRNPKGSACSRIWQSPRFIARKRGFTVKMHCYMNSASGNVSWLWKQEMDENPQQLKLEKGRMEESQNESLATLTIQGIRFEDNGIYFCQQKCNNTSEVYQGCGTELRVMGFSTLAQLKQRNTLKDGIIMIQTLLIILFIIVPIFLLLDKDDSKAGMEEDHTYEGLDIDQTATYEDIVTLRTGEVKWSVGEHPGQE

SEQ ID NO: 10846 - protein, 281 aa, Homo sapiens
MSAQESCLSLIKYFLFVFNLFFFVLGSLIFCFGIWILIDKTSFVSFVGLAFVPLQIWSKVLAISGIFTMGIALLGCVGALKELRCLLGLYFGMLLLLFATQITLGILISTQRAQLERSLRDVVEKTIQKYGTNPEETAAEESWDYVQFQLRCCGWHYPQDWFQVLILRGNGSEAHRVPCSCYNLSATNDSTILDKVILPQLSRLGHLARSRHSADICAVPAESHIYREGCAQGLQKWLHNNLISIVGICLGVGLLELGFMTLSIFLCRNLDHVYNRLARYR

SEQ ID NO: 10847 - protein, 327 aa, Homo sapiens
MRALPGLLEARARTPRLLLLQCLLAAARPSSADGSAPDSPFTSPPLREEIMANNFSLESHNISLTEHSSMPVEKNITLERPSNVNLTCQFTTSGDLNAVNVTWKKDGEQLENNYLVSATGSTLYTQYRFTIINSKQMGSYSCFFREEKEQRGTFNFKVPELHGKNKPLISYVGDSTVLTCKCQNCFPLNWTWYSSNGSVKVPVGVQMNKYVINGTYANETKLKITQLLEEDGESYWCRALFQLGESEEHIELVVLSYLVPLKPFLVIVAEVILLVATILLCEKYTQKKKKHSDEGKEFEQIEQLKSDDSNGIENNVPRHRKNESLGQ

SEQ ID NO: 10848 - protein, 254 aa, Homo sapiens [sequence omitted]

SEQ ID NO: 10849 - protein, 458 aa, Homo sapiens
VLALATLIAAFGSSFQYGYNVAAVNSPALLMQQFYNETYYGRTGEFMEDFPLTLLWSVTVSMFPFGGFIGSLLVGPLVNKFGRKGALLFNNIFSIVPAILMGCSRVATSFELIIISRLLVGICAGVSSNVVPMYLGELAPKNLRGALGVVPQLFITVGILVAQIFGLRNLLANVDGWPVLLALTGVPALLQLLTLPFFPESPRYSLIQKGDEATARQALRRLRGHTDMEAELEDMRAEARAERAEGHLSVLHLCALRSLRWQLLSIIVLMAGQQLSGINAINYYADTIYTSAGVEAAHSQYVTVGSGVVNIVMTITSAVLVERLGRRHLLLAGYGICGSACLVLTVVLLFQNRVPELSYLGIICVFAYIAGHSIGPSPVPSVVRTEIFLQSSRRAAFMVDGAVHWLTNFIIGFLFPSIQEAIGAYSFIIFAGICLLTAIYIYVVIPETKGKTFVEINR

SEQ ID NO: 10850 - protein, 474 aa, Homo sapiens
MEQQDQSMKEGRLTLVLALATLIAAFGSSFQYGYNVAAVNSPALLMQQFYNETYYGRTGEFMEDFPLTLLWSVTVSMFPFGGFIGSLLVGPLVNKFGRKGALLFNNIFSIVPAILMGCSRVATSFELIIISRLLVGICAGVSSNVVPMYLGELAPKNLRGALGVVPQLFITVGILVAQIFGLRNLLANVDGWPILLGLTGVPAALQLLLLPFFPESPRYLLIQKKDEAAAKKALQTLRGWDSVDREVAEIRQEDEAEKAAGFISVLKLFRMRSLRWQLLSIIVLMGGQQLSGVNAIYYYADQIYLSAGVPEEHVQYVTAGTGAVNVVMTFCAVFVVELLGRRLLLLLGFSICLIACCVLTAALALQVRTGQGLGCSGPLCLQGGCSPPPTGPIPALLITEIFLQSSRPSAFMVGGSVHWLSNFTVGLIFPFIQEAIGAYSFIIFAGICLLTAIYIYVVIPETKGKTFVEINRIF

SEQ ID NO: 10851 - protein, 459 aa, Homo sapiens
LATLIAAFGSSFQYGYNVAAVNSPALLMQQFYNETYYGRTGEFMEDFPLTLLWSVTVSMFPFGGFIGSLLVGPLVNKFGRKGALLFNNIFSIVPAILMGCSRVATSFELIIISRLLVGICAGVSSNVVPMYLGELAPKNLRGALGVVPQLFITVGILVAQIFGLRNLLANVDGWPILLGLTGVPAALQLLLLPFFPESPRYLLIQKKDEAAAKKALQTLRGWDSVDREVAEIRQEDEAEKAAGFISVLKLFRMRSLRWQLLSIIVLMGGQQLSGVNAIYYYADQIYLSAGVPEEHVQYVTAGTGAVNVVMTFCAVFVVELLGRRLLLLLGFSICLIACCVLTAALALQNRVPELSYLGIICVFAYIAGHSIGPSPVPSVVRTEIFLQSSRRAAFMVDGAVHWLTNFIIGFLFPSIQEAIGAYSFIIFAGICLLTAIYIYVVIPETKGKTFVEINRIFAK

SEQ ID NO: 10852 - protein, 501 aa, Homo sapiens
MEQQDQSMKEGRLTLVLALATLIAAFGSSFQYGYNVAAVNSPALLMQQFYNETYYGRTGEFMEDFPLTLLWSVTVSMFPFGGFIGSLLVGPLVNKFGRKGALLFNNIFSIVPAILMGCSRVATSFELIIISRLLVGICAGVSSNVVPMYLGELAPKNLRGALGVVPQLFITVGILVAQIFGLRNLLANVDGWPILLGLTGVPAALQLLLLPFFPESPRYLLIQKKDEAAAKKALQTLRGWDSVDREVAEIRQEDEAEKAAGFISVLKLFRMRSLRWQLLSIIVLMGGQQLSGVNAIYYYADQIYLSAGVPEEHVQYVTAGTGAVNVVMTFCAVFVVELLGRRLLLLLGFSICLIACCVLTAALALQDTVSWMPYISIVCVISYVIGHALGPSPIPALLITEIFLQSSRPSAFMVGGSVHWLSNFTVGLIFPFIQEGLGPYSFIVFAVICLLTTIYIFLIVPETKAKTFIEINQIFTKMNKVSEVYPEKEELKELPPVTSEQ

SEQ ID NO: 10853 - protein, 311 aa, Homo sapiens
LALATLIAAFGSSFQYGYNVAAVNSPALLMQQFYNETYYGRTGEFMEDFPLTLLWSVTVSMFPFGGFIGSLLVGPLVNKFGRKGALLFNNIFSIVPAILMGCSRVATSFELIIISRLLVGICAGVSSNVVPMYLGELAPKNLRGALGVVPQLFITVGILVAQIFGLRNLLANIYYYADQIYLSAGVPEEHVQYVTAGTGAVNVVMTFCAVFVVELLGRRLLLLLGFSICLIACCVLTAALALQDTVSWMPYISIVCVISYVIGHALGPSPIPALLITEIFLQSSRPSAFMVGGSVHWLSNFTVGLIFPFIQ

SEQ ID NO: 10854 - protein, 475 aa, Homo sapiens
MEQQDQSMKEGRLTLVLALATLIAAFGSSFQYGYNVAAVNSPALLMQQFYNETYYGRTGEFMEDFPLTLLWSVTVSMFPFGGFIGSLLVGPLVNKFGRKGALLFNNIFSIVPAILMGCSRVATSFELIIISRLLVGICAGVSSNVVPMYLGELAPKNLRGALGVVPQLFITVGILVAQIFGLRNLLANVDGWPILLGLTGVPAALQLLLLPFFPESPRYLLIQKKDEAAAKKALQTLRGWDSVDREVAEIRQEDEAEKAAGFISVLKLFRMRSLRWQLLSIIVLMGGQQLSGVNAIYYYADQIYLSAGVPEEHVQYVTAGTGAVNVVMTFCAVFVVELLGRRLLLLLGFSICLIACCVLTAALALQDTVSWMPYISIVCVISYVIGHALGPSPIPALLITEIFLQSSRPSAFMVGGSVHWLSNFTVGLIFPFIQEAIGAYSFIIFAGICLLTAIYIYVVIPETKGKTFVEINRIF

SEQ ID NO: 10855 - protein, 244 aa, Homo sapiens
MEQQDQSMKEGRLTLVLALATLIAAFGSSFQYGYNVAAVNSPALLMQQFYNETYYGRTGEFMEDFPLTLLWSVTVSMFPFGGFIGSLLVGPLVNKFGRKGALLFNNIFSIVPAILMGCSRVATSFELIIISRLLVGICAGVSSNVVPMYLGELAPKNLRGALGVVPQLFITVGILVAQIFGLRNLLANVDGEFRTSREHPHPFTTTLGPLLVFQSHHHRTGLSADWSLLTGWMSLGGPSCPEPT

SEQ ID NO: 10856 - protein, 792 aa, Homo sapiens
GAYYLISRSLGPEFGGAIGLIFAFANAVAVAMYVVGFAETVVELLKEHSILMIDEINDIRIIGAITVVILLGISVAGMEWEAKAQIVLLVILLLAIGDFVIGTFIPLESKKPKGFFGYKSEIFNENFGPDFREEETFFSVFAIFFPAATGILAGANISGDLADPQSAIPKGTLLAILITTLVYVGIAVSVGSCVVRDATGNVNDTIVTELTNCTSAACKLNFDFSSCESSPCSYGLMNNFQVMSMVSGFTPLISAGIFSATLSSALASLVSAPKIFQALCKDNIYPAFQMFAKGYGKNNEPLRGYILTFLIALGFILIAELNVIAPIISNFFLASYALINFSVFHASLAKSPGWRPAFKYYNMWISLLGAILCCIVMFVINWWAALLTYVIVLGLYIYVTYKKPDVNWGSSTQALTYLNALQHSIRLSGVEDHVKNFRPQCLVMTGAPNSRPALLHLVHDFTKNVGLMICGHVHMGPRRQAMKEMSIDQAKYQRWLIKNKMKAFYAPVHADDLREGAQYLMQAAGLGRMKPNTLVLGFKKDWLQADMRDVDMYINLFHDAFDIQYGVVVIRLKEGLDISHLQGQGNDRNSAKGTLIFTLLTFYILLNPLESKGPIVPLNVADQKLLEASTQFQKKQGKNTIDVWWLFDDGGLTLLIPYLLTTKKKWKDCKIRVFIGGKINRIDHDRRAMATLLSKFRIDFSDIMVLGDINTKPKKEKNDCPVSFQTYRQIRLNELLKEHSSTANIIVMSLPVARKGAVSSALYMAWLEALSKDLPPILLVRGNHQSVLTFYS

SEQ ID NO: 10857 - protein, 1196 aa, Homo sapiens
MEPRPTAPSSGAPGLAGVGETPSAAALAAARVELPGTAVPSVPEDAAPASRDGGGVRDEGPAAAGDGLGRPLGPTPSQSRFQVDLVSENAGRAAAAAAAAAAAAAAAGAGAGAKQTPADGEASGESEPAKGSEEAKGRFRVNFVDPAASSSAEDSLSDAAGVGVDGPNVSFQNGGDTVLSEGSSLHSGGGGGSGHHQHYYYDTHTNTYYLRTFGHNTMDAVPRIDHYRHTAAQLGEKLLRPSLAELHDELEKEPFEDGFANGEESTPTRDAVVTYTAESKGVVKFGWIKGVLVRCMLNIWGVMLFIRLSWIVGQAGIGLSVLVIMMATVVTTITGLSTSAIATNGFVRGGGAYYLISRSLGPEFGGAIGLIFAFANAVAVAMYVVGFAETVVELLKEHSILMIDEINDIRIIGAITVVILLGISVAGMEWEAKAQIVLLVILLLAIGDFVIGTFIPLESKKPKGFFGYKSEIFNENFGPDFREEETFFSVFAIFFPAATGILAGANISGDLADPQSAIPKGTLLAILITTLVYVGIAVSVGSCVVRDATGNVNDTIVTELTNCTSAACKLNFDFSSCESSPCSYGLMNNFQVMSMVSGFTPLISAGIFSATLSSALASLVSAPKIFQALCKDNIYPAFQMFAKGYGKNNEPLRGYILTFLIALGFILIAELNVIAPIISNFFLASYALINFSVFHASLAKSPGWRPAFKYYNMWISLLGAILCCIVMFVINWWAALLTYVIVLGLYIYVTYKKPDVNWGSSTQALTYLNALQHSIRLSGVEDHVKNFRPQCLVMTGAPNSRPALLHLVHDFTKNVGLMICGHVHMGPRRQAMKEMSIDQAKYQRWLIKNKMKAFYAPVHADDLREGAQYLMQAAGLGRMKPNTLVLGFKKDWLQADMRDVDMYINLFHDAFDIQYGVVVIRLKEGLDISHLQGQEELLSSQEKSPGTKDVVVSVEYSKKSDLDTSKPLSEKPITHKESKGPIVPLNVADQKLLEASTQFQKKQGKNTIDVWWLFDDGGLTLLIPYLLTTKKKWKDCKIRVFIGGKINRIDHDRRAMATLLSKFRIDFSDIMVLGDINTKPKKENIIAFEEIIEPYRLHEDDKEQDIADKMKEDEPWRITDNELELYKTKTYRQIRLNELLKEHSSTANIIVMSLPVARKGAVSSALYMAWLEALSKDLPPILLVRGNHQSVLTFYS

SEQ ID NO: 10858 - protein, 1150 aa, Homo sapiens
MEPRPTAPSSGAPGLAGVGETPSAAALAAARVELPGTAVPSVPEDAAPASRDGGGVRDEGPAAAGDGLGRPLGPTPSQSRFQVDLVSENAGRAAAAAAAAAAAAAAAGAGAGAKQTPADGEASGESEPAKGSEEAKGRFRVNFVDPAASSSAEDSLSDAAGVGVDGPNVSFQNGGDTVLSEGSSLHSGGGGGSGHHQHYYYDTHTNTYYLRTFGHNTMDAVPRIDHYRHTAAQLGEKLLRPSLAELHDELEKEPFEDGFANGEESTPTRDAVVTYTAESKGVVKFGWIKGVLVRCMLNIWGVMLFIRLSWIVGQAGIGLSVLVIMMATVVTTITGLSTSAIATNGFVRGGGAYYLISRSLGPEFGGAIGLIFAFANAVAVAMYVVGFAETVVELLKEHSILMIDEINDIRIIGAITVVILLGISVAGMEWEAKAQIVLLVILLLAIGDFVIGTFIPLESKKPKGFFGYKSEIFNENFGPDFREEETFFSVFAIFFPAATGILAGANISGDLADPQSAIPKGTLLAILITTLVYVGIAVSVGSCVVRDATGNVNDTIVTELTNCTSAACKLNFDFSSCESSPCSYGLMNNFQVMSMVSGFTPLISAGIFSATLSSALASLVSAPKIFQALCKDNIYPAFQMFAKGYGKNNEPLRGYILTFLIALGFILIAELNVIAPIISNFFLASYALINFSVFHASLAKSPGWRPAFKYYNMWISLLGAILCCIVMFVINWWAALLTYVIVLGLYIYVTYKKPDVNWGSSTQALTYLNALQHSIRLSGVEDHVKNFRPQCLVMTGAPNSRPALLHLVHDFTKNVGLMICGHVHMGPRRQAMKEMSIDQAKYQRWLIKNKMKAFYAPVHADDLREGAQYLMQAAGLGRMKPNTLVLGFKKDWLQADMRDVDMYINLFHDAFDIQYGVVVIRLKEGLDISHLQGQEELLSSQEKSPGTKDVVVSVEYSKKSDLDTSKPLSEKPITHKVEEEDGKTATQPLLKKESKGPIVPLNVADQKLLEASTQFQKKQGKNTIDVWWLFDDGGLTLLIPYLLTTKKKWKDCKIRVFIGGKINRIDHDRRAMATLLSKFRIDFSDIMVLGDINTKPKKENIIAFEEIIEPYRLHEDDKEQDIADKMKEDEPWRITDNELELYKTKFYEPC

SEQ ID NO: 10859 - protein, 1212 aa, Homo sapiens
MEPRPTAPSSGAPGLAGVGETPSAAALAAARVELPGTAVPSVPEDAAPASRDGGGVRDEGPAAAGDGLGRPLGPTPSQSRFQVDLVSENAGRAAAAAAAAAAAAAAAGAGAGAKQTPADGEASGESEPAKGSEEAKGRFRVNFVDPAASSSAEDSLSDAAGVGVDGPNVSFQNGGDTVLSEGSSLHSGGGGGSGHHQHYYYDTHTNTYYLRTFGHNTMDAVPRIDHYRHTAAQLGEKLLRPSLAELHDELEKEPFEDGFANGEESTPTRDAVVTYTAESKGVVKFGWIKGVLVRCMLNIWGVMLFIRLSWIVGQAGIGLSVLVIMMATVVTTITGLSTSAIATNGFVRGGGAYYLISRSLGPEFGGAIGLIFAFANAVAVAMYVVGFAETVVELLKEHSILMIDEINDIRIIGAITVVILLGISVAGMEWEAKAQIVLLVILLLAIGDFVIGTFIPLESKKPKGFFGYKSEIFNENFGPDFREEETFFSVFAIFFPAATGILAGANISGDLADPQSAIPKGTLLAILITTLVYVGIAVSVGSCVVRDATGNVNDTIVTELTNCTSAACKLNFDFSSCESSPCSYGLMNNFQVMSMVSGFTPLISAGIFSATLSSALASLVSAPKIFQALCKDNIYPAFQMFAKGYGKNNEPLRGYILTFLIALGFILIAELNVIAPIISNFFLASYALINFSVFHASLAKSPGWRPAFKYYNMWISLLGAILCCIVMFVINWWAALLTYVIVLGLYIYVTYKKPDVNWGSSTQALTYLNALQHSIRLSGVEDHVKNFRPQCLVMTGAPNSRPALLHLVHDFTKNVGLMICGHVHMGPRRQAMKEMSIDQAKYQRWLIKNKMKAFYAPVHADDLREGAQYLMQAAGLGRMKPNTLVLGFKKDWLQADMRDVDMYINLFHDAFDIQYGVVVIRLKEGLDISHLQGQEELLSSQEKSPGTKDVVVSVEYSKKSDLDTSKPLSEKPITHKVEEEDGKTATQPLLKKESKGPIVPLNVADQKLLEASTQFQKKQGKNTIDVWWLFDDGGLTLLIPYLLTTKKKWKDCKIRVFIGGKINRIDHDRRAMATLLSKFRIDFSDIMVLGDINTKPKKENIIAFEEIIEPYRLHEDDKEQDIADKMKEDEPWRITDNELELYKTKTYRQIRLNELLKEHSSTANIIVMSLPVARKGAVSSALYMAWLEALSKDLPPILLVRGNHQSVLTFYS

SEQ ID NO: 10860 - protein, 243 aa, Homo sapiens
MCSRGWDSCLALELLLLPLSLLVTSIQGHLVHMTVVSGSNVTLNISESLPENYKQLTWFYTFDQKIVEWDSRKSKYFESKFKGRVRLDPQSGALYISKVQKEDNSTYIMRVLKKTGNEQEWKIKLQVLDPVPKPVIKIEKIEDMDDNCYLKLSCVIPGESVNYTWYGDKRPFPKELQNSVLETTLMPHNYSRCYTCQVSNSVSSKNGTVCLSPPCTLARSFGVEWIASWLVVTVPTILGLLLT

SEQ ID NO: 10861 - protein, 240 aa, Homo sapiens
MAGPPRLLLLPLLLALARGLPGALAAQEVQQSPHCTTVPVGASVNITCSTSGGLRGIYLRQLGPQPQDIIYYEDGVVPTTDRRFRGRIDFSGSQDNLTITMHRLQLSDTGTYTCQAITEVNVYGSGTLVLVTEEQSQGWHRCSDAPPRASALPAPPTGSALPDPQTASALPDPPAASALPAALAVISFLLGLGLGVACVLARTQIKKLCSWRDKNSAACVVYEDMSHSRCNTLSSPNQYQ

SEQ ID NO: 10862 - protein, 460 aa, Homo sapiens
MFLATLYFALPLLDLLLSAEVSGGDRLDCVKASDQCLKEQSCSTKYRTLRQCVAGKETNFSLASGLEAKDECRSAMEALKQKSLYNCRCKRGMKKEKNCLRIYWSMYQSLQGNDLLEDSPYEPVNSRLSDIFRVVPFISVEHIPKGNNCLDAAKACNLDDICKKYRSAYITPCTTSVSNDVCNRRKCHKALRQFFDKVPAKHSYGMLFCSCRDIACTERRRQTIVPVCSYEEREKPNCLNLQDSCKTNYICRSRLADFFTNCQPESRSVSSCLKENYADCLLAYSGLIGTVMTPNYIDSSSLSVAPWCDCSNSGNDLEECLKFLNFFKDNTCLKNAIQAFGNGSDVTVWQPAFPVQTTTATTTTALRVKNKPLGPAGSENEIPTHVLPPCANLQAQKLKSNVSGNTHLCISNGNYEKEGLGASSHITTKSMAAPPSCGLSPLLVLVVTALSTLLSLTETS

SEQ ID NO: 10863 - protein, 465 aa, Homo sapiens
MFLATLYFALPLLDLLLSAEVSGGDRLDCVKASDQCLKEQSCSTKYRTLRQCVAGKETNFSLASGLEAKDECRSAMEALKQKSLYNCRCKRGMKKEKNCLRIYWSMYQSLQGNDLLEDSPYEPVNSRLSDIFRVVPFISDVFQQVEHIPKGNNCLDAAKACNLDDICKKYRSAYITPCTTSVSNDVCNRRKCHKALRQFFDKVPAKHSYGMLFCSCRDIACTERRRQTIVPVCSYEEREKPNCLNLQDSCKTNYICRSRLADFFTNCQPESRSVSSCLKENYADCLLAYSGLIGTVMTPNYIDSSSLSVAPWCDCSNSGNDLEECLKFLNFFKDNTCLKNAIQAFGNGSDVTVWQPAFPVQTTTATTTTALRVKNKPLGPAGSENEIPTHVLPPCANLQAQKLKSNVSGNTHLCISNGNYEKEGLGASSHITTKSMAAPPSCGLSPLLVLVVTALSTLLSLTETS

SEQ ID NO: 10864 - protein, 351 aa, Homo sapiens
MSFPCKFVASFLLIFNVSSKGAVSKEITNALETWGALGQDINLDIPSFQMSDDIDDIKWEKTSDKKKIAQFRKEKETFKEKDTYKLFKNGTLKIKHLKTDDQDIYKVSIYDTKGKNVLEKIFDLKIQERVSKPKISWTCINTTLTCEVMNGTDPELNLYQDGKHLKLSQRVITHKWTTSLSAKFKCTAGNKVSKESSVEPVSCPEKGLDIYLIIGICGGGSLLMVFVALLVFYITKRKKQRSRRNDEELETRAHRVATEERGRKPQQIPASTPQNPATSQHPPPPPGHRSQAPSHRPPPPGHRVQHQPQKRPPAPSGTQVHQQKGPPLPRPRVQPKPPHGAAENSLSPSSN

SEQ ID NO: 10865 - protein, 458 aa, Homo sapiens
MARMGLAGAAGRWWGLALGLTAFFLPGVHSQVVQVNDSMYGFIGTDVVLHCSFANPLPSVKITQVTWQKSTNGSKQNVAIYNPSMGVSVLAPYRERVEFLRPSFTDGTIRLSRLELEDEGVYICEFATFPTGNRESQLNLTVMAKPTNWIEGTQAVLRAKKGQDDKVLVATCTSANGKPPSVVSWETRLKGEAEYQEIRNPNGTVTVISRYRLVPSREAHQQSLACIVNYHMDRFKESLTLNVQYEPEVTIEGFDGNWYLQRMDVKLTCKADANPPATEYHWTTLNGSLPKGVEAQNRTLFFKGPINYSLAGTYICEATNPIGTRSGQVEVNITEKPRPQRGLGSAARLLAGTVAVFLILVAVLTVFFLYNRQQKSPPETDGAGTDQPLSQKPEPSPSRQSSLVPEDIQVVHLDPGRQQQQEEEDLQKLSLQPPYYDLGVSPSYHPSVRTTEPRGECP

SEQ ID NO: 10866 - protein, 517 aa, Homo sapiens
MARMGLAGAAGRWWGLALGLTAFFLPGVHSQVVQVNDSMYGFIGTDVVLHCSFANPLPSVKITQVTWQKSTNGSKQNVAIYNPSMGVSVLAPYRERVEFLRPSFTDGTIRLSRLELEDEGVYICEFATFPTGNRESQLNLTVMAKPTNWIEGTQAVLRAKKGQDDKVLVATCTSANGKPPSVVSWETRLKGEAEYQEIRNPNGTVTVISRYRLVPSREAHQQSLACIVNYHMDRFKESLTLNVQYEPEVTIEGFDGNWYLQRMDVKLTCKADANPPATEYHWTTLNGSLPKGVEAQNRTLFFKGPINYSLAGTYICEATNPIGTRSGQVEVNITEFPYTPSPPEHGRRAGPVPTAIIGGVAGSILLVLIVVGGIVVALRRRRHTFKGDYSTKKHVYGNGYSKAGIPQHHPPMAQNLQYPDDSDDEKKAGPLGGSSYEEEEEEEEGGGGGERKVGGPHPKYDEDAKRPYFTVDEAEARQDGYGDRTLGYQYDPEQLDLAENMVSQNDGSFISKKEWYV

SEQ ID NO: 10867 - protein, 847 aa, Homo sapiens
MHLLGPWLLLLVLEYLAFSDSSKWVFEHPETLYAWEGACVWIPCTYRALDGDLESFILFHNPEYNKNTSKFDGTRLYESTKDGKVPSEQKRVQFLGDKNKNCTLSIHPVHLNDSGQLGLRMESKTEKWMERIHLNVSERPFPPHIQLPPEIQESQEVTLTCLLNFSCYGYPIQLQWLLEGVPMRQAAVTSTSLTIKSVFTRSELKFSPQWSHHGKIVTCQLQDADGKFLSNDTVQLNVKHTPKLEIKVTPSDAIVREGDSVTMTCEVSSSNPEYTTVSWLKDGTSLKKQNTFTLNLREVTKDQSGKYCCQVSNDVGPGRSEEVFLQVQYAPEPSTVQILHSPAVEGSQVEFLCMSLANPLPTNYTWYHNGKEMQGRTEEKVHIPKILPWHAGTYSCVAENILGTGQRGPGAELDVQYPPKKVTTVIQNPMPIREGDTVTLSCNYNSSNPSVTRYEWKPHGAWEEPSLGVLKIQNVGWDNTTIACAACNSWCSWASPVALNVQYAPRDVRVRKIKPLSEIHSGNSVSLQCDFSSSHPKEVQFFWEKNGRLLGKESQLNFDSISPEDAGSYSCWVNNSIGQTASKAWTLEVLYAPRRLRVSMSPGDQVMEGKSATLTCESDANPPVSHYTWFDWNNQSLPYHSQKLRLEPVKVQHSGAYWCQGTNSVGKGRSPLSTLTVYYSPETIGRRVAVGLGSCLAILILAICGLKLQRRWKRTQSQQGLQENSSGQSFFVRNKKVRRAPLSEGPHSLGCYNPMMEDGISYTTLRFPEMNIPRTGDAESSEMQRPPPDCDDTVTYSALHKRQVGDYENVIPDFPEDEGIHYSELIQFGVGERPQAQENVDYVILKH

SEQ ID NO: 10868 - protein, 670 aa, Homo sapiens
MHLLGPWLLLLVLEYLAFSDSSKWVFEHPETLYAWEGACVWIPCTYRALDGDLESFILFHNPEYNKNTSKFDGTRLYESTKDGKVPSEQKRVQFLGDKNKNCTLSIHPVHLNDSGQLGLRMESKTEKWMERIHLNVSERPFPPHIQLPPEIQESQEVTLTCLLNFSCYGYPIQLQWLLEGVPMRQAAVTSTSLTIKSVFTRSELKFSPQWSHHGKIVTCQLQDADGKFLSNDTVQLNVKHPPKKVTTVIQNPMPIREGDTVTLSCNYNSSNPSVTRYEWKPHGAWEEPSLGVLKIQNVGWDNTTIACAACNSWCSWASPVALNVQYAPRDVRVRKIKPLSEIHSGNSVSLQCDFSSSHPKEVQFFWEKNGRLLGKESQLNFDSISPEDAGSYSCWVNNSIGQTASKAWTLEVLYAPRRLRVSMSPGDQVMEGKSATLTCESDANPPVSHYTWFDWNNQSLPYHSQKLRLEPVKVQHSGAYWCQGTNSVGKGRSPLSTLTVYYSPETIGRRVAVGLGSCLAILILAICGLKLQRRWKRTQSQQGLQENSSGQSFFVRNKKVRRAPLSEGPHSLGCYNPMMEDGISYTTLRFPEMNIPRTGDAESSEMQRPPPDCDDTVTYSALHKRQVGDYENVIPDFPEDEGIHYSELIQFGVGERPQAQENVDYVILKH

SEQ ID NO: 10869 - protein, 662 aa, Homo sapiens [sequence omitted]

SEQ ID NO: 10870 - protein, 335 aa, Homo sapiens
MGCLLFLLLWALLQAWGSAEVPQRLFPLRCLQISSFANSSWTRTDGLAWLGELQTHSWSNDSDTVRSLKPWSQGTFSDQQWETLQHIFRVYRSSFTRDVKEFAKMLRLSYPLELQVSAGCEVHPGNASNNFFHVAFQGKDILSFQGTSWEPTQEAPLWVNLAIQVLNQDKWTRETVQWLLNGTCPQFVSGLLESGKSELKKQVKPKAWLSRGPSPGPGRLLLVCHVSGFYPKPVWVKWMRGEQEQQGTQPGDILPNADETWYLRATLDVVAGEAAGLSCRVKHSSLEGQDIVLYWGGSYTSMGLIALAVLACLLFLLIVGFTSRFKRQTSYQGVL

SEQ ID NO: 10871 - protein, 296 aa, Homo sapiens
MAGSPTCLTLIYILWQLTGSAASGPVKELVGSVGGAVTFPLKSKVKQVDSIVWTFNTTPLVTIQPEGGTIIVTQNRNRERVDFPDGGYSLKLSKLKKNDSGIYYVGIYSSSLQQPSTQEYVLHVYEHLSKPKVTMGLQSNKNGTCVTNLTCCMEHGEEDVIYTWKALGQAANESHNGSILPISWRWGESDMTFICVARNPVSRNFSSPILARKLCEGAADDPDSSMVLLCLLLVPLLLSLFVLGLFLWFLKRERQEENNPKGRSSKYGLLHCGNTEKDGKSPLTAHDARHTKAICL

SEQ ID NO: 10872 - protein, 328 aa, Homo sapiens [sequence omitted]

SEQ ID NO: 10873 - protein, 370 aa, Homo sapiens
EHAGVRLPTHGRVYQKGHELVLANIAESDAGVYTCHAANLAGQRRQDVNITVATVPSWLKKPQDSQLEEGKPGYLDCLTQATPKPTVVWYRNQMLISETVPTGKSEFGEVFLAKAQGLEEGVAETLVLVKSLQSKDEQQQLDFRRELEMFGKLNHANVVRLLGLCREAEPHYMVLEYVDLGDLKQFLRISKSKDEKLKSQPLSTKQKVALCTQVALGMEHLSNNRFVHKDLAARNCLVSAQRQVKVSALGLSKDVYNSEYYHFRQAWVPLRWMSPEAILEGDFSTKSDVWAFGVLMWEVFTHGEMPHGGQADDEVLADLQAGKARLPQPEGCPSKLYRLMQRCWALSPKDRPSFSEIASALGDSTVDSKP

SEQ ID NO: 10874 - protein, 333 aa, Homo sapiens
MLFLQFLLLALLLPGGDNADASQEHVSFHVIQIFSFVNQSWARGQGSGWLDELQTHGWDSESGTIIFLHNWSKGNFSNEELSDLELLFRFYLFGLTREIQDHASQDYSKYPFEVQVKAGCELHSGKSPEGFFQVAFNGLDLLSFQNTTWVPSPGCGSLAQSVCHLLNHQYEGVTETVYNLIRSTCPRFLLGLLDAGKMYVHRQVRPEAWLSSRPSLGSGQLLLVCHASGFYPKPVWVTWMRNEQEQLGTKHGDILPNADGTWYLQVILEVASEEPAGLSCRVRHSSLGGQDIILYWGHHSSMNWIALVVIVPLVILIVLVLWFKKHCSYQDIL

SEQ ID NO: 10875 - protein, 275 aa, Homo sapiens
MASAPISMLAMLFTLSGLRAQSVAQPEDQVNVAEGNPLTVKCTYSVSGNPYLFWYVQYPNRGLQFLLKYITGDNLVKGSYGFEAEFNKSQTSFHLKKPSALVSDSALYFCAVRDAKAAGNKLTFGGGTRVLVKPNIQNPDPAVYQLRDSKSSDKSVCLFTDFDSQTNVSQSKDSDVYITDKTVLDMRSMDFKSNSAVAWSNKSDFACANAFNNSIIPEDTFFPSPESSCDVKLVEKSFETDTNLNFQNLSVIGFRILLLKVAGFNLLMTLRLWSS

SEQ ID NO: 10876 - protein, 202 aa, Homo sapiens [sequence omitted]

SEQ ID NO: 10877 - protein, 334 aa, Homo sapiens
MESAAALHFSRPASLLLLLLSLCALVSAQFIVVGPTDPILATVGENTTLRCHLSPEKNAEDMEVRWFRSQFSPAVFVYKGGRERTEEQMEEYRGRTTFVSKDISRGSVALVIHNITAQENGTYRCYFQEGRSYDEAILHLVVAGLGSKPLISMRGHEDGGIRLECISRGWYPKPLTVWRDPYGGVAPALKEVSMPDADGLFMVTTAVIIRDKSVRNMSCSINNTLLGQKKESVIFIPESFMPSVSPCAVALPIIVVILMIPIAVCIYWINKLQKEKKILSGEKEFERETREIALKELEKERVQKEEELQVKEKLQEELRWRRTFLHAELQFFSN

SEQ ID NO: 10878 - protein, 566 aa, Homo sapiens
MESAAALHFSRPASLLLLLLSLCALVSAQFIVVGPTDPILATVGENTTLRCHLSPEKNAEDMEVRWFRSQFSPAVFVYKGGRERTEEQMEEYRGRTTFVSKDISRGSVALVIHNITAQENGTYRCYFQEGRSYDEAILHLVVAGLGSKPLISMRGHEDGGIRLECISRGWYPKPLTVWRDPYGGVAPALKEVSMPDADGLFMVTTAVIIRDKSVRNMSCSINNTLLGQKKESVIFIPESFMPSVSPCAVALPIIVVILMIPIAVCIYWINKLQKEKKILSGEKEFERETREIALKELEKERVQKEEELQVKEKLQEELRWRRTFLHAVDVVLDPDTAHPDLFLSEDRRSVRRCPFRHLGESVPDNPERFDSQPCVLGRESFASGKHYWEVEVENVIEWTVGVCRDSVERKGEVLLIPQNGFWTLEMHKGQYRAVSSPDRILPLKESLCRVGVFLDYEAGDVSFYNMRDRSHIYTCPRSAFSVPVRPFFRGPDTSQSGDPPEPIESIPWSHSHVDKPWSSQQPPHNTPGGRHALLPSGHTREHLPAASFTPTTDLSPSFLLLTRLCF

SEQ ID NO: 10879 - protein, 527 aa, Homo sapiens
MESAAALHFSRPASLLLLLLSLCALVSAQFIVVGPTDPILATVGENTTLRCHLSPEKNAEDMEVRWFRSQFSPAVFVYKGGRERTEEQMEEYRGRTTFVSKDISRGSVALVIHNITAQENGTYRCYFQEGRSYDEAILHLVVAGLGSKPLISMRGHEDGGIRLECISRGWYPKPLTVWRDPYGGVAPALKEVSMPDADGLFMVTTAVIIRDKSVRNMSCSINNTLLGQKKESVIFIPESFMPSVSPCAVALPIIVVILMIPIAVCIYWINKLQKEKKILSGEKEFERETREIALKELEKERVQKEEELQVKEKLQEELRWRRTFLHAVDVVLDPDTAHPDLFLSEDRRSVRRCPFRHLGESVPDNPERFDSQPCVLGRESFASGKHYWEVEVENVIEWTVGVCRDSVERKGEVLLIPQNGFWTLEMHKGQYRAVSSPDRILPLKESLCRVGVFLDYEAGDVSFYNMRDRSHIYTCPRSAFSVPVRPFFRLGCEDSPIFICPALTGANGVTVPEEGLTLHRVGTHQSL

SEQ ID NO: 10880 - protein, 333 aa, Homo sapiens
MATAERRALGIGFQWLSLATLVLICAGQGGRREDGGPACYGGFDLYFILDKSGSVLHHWNEIYYFVEQLAHKFISPQLRMSFIVFSTRGTTLMKLTEDREQIRQGLEELQKVLPGGDTYMHEGFERASEQIYYENRQGYRTASVIIALTDGELHEDLFFYSEREANRSRDLGAIVYCVGVKDFNETQLARIADSKDHVFPVNDGFQALQGIIHSILKKSCIEILAAEPSTICAGESFQVVVRGNGFRHARNVDRVLCSFKINDSVTLNEKPFSVEDTYLLCPAPILKEVGMKAALQVSMNDGLSFISSSVIITTTHCSLHKIASGPTTAACME

SEQ ID NO: 10881 - protein, 368 aa, Homo sapiens
MATAERRALGIGFQWLSLATLVLICAGQGGRREDGGPACYGGFDLYFILDKSGSVLHHWNEIYYFVEQLAHKFISPQLRMSFIVFSTRGTTLMKLTEDREQIRQGLEELQKVLPGGDTYMHEGFERASEQIYYENRQGYRTASVIIALTDGELHEDLFFYSEREANRSRDLGAIVYCVGVKDFNETQLARIADSKDHVFPVNDGFQALQGIIHSILKKSCIEILAAEPSTICAGESFQVVVRGNGFRHARNVDRVLCSFKINDSVTLNEKPFSVEDTYLLCPAPILKEVGMKAALQVSMNDGLSFISSSVIITTTHCSDGSILAIALLILFLLLALALLWWFWPLCCTVIIKEVPPPPAEESEENKIK

SEQ ID NO: 10882 - protein, 564 aa, Homo sapiens
MATAERRALGIGFQWLSLATLVLICAGQGGRREDGGPACYGGFDLYFILDKSGSVLHHWNEIYYFVEQLAHKFISPQLRMSFIVFSTRGTTLMKLTEDREQIRQGLEELQKVLPGGDTYMHEGFERASEQIYYENRQGYRTASVIIALTDGELHEDLFFYSEREANRSRDLGAIVYCVGVKDFNETQLARIADSKDHVFPVNDGFQALQGIIHSILKKSCIEILAAEPSTICAGESFQVVVRGNGFRHARNVDRVLCSFKINDSVTLNEKPFSVEDTYLLCPAPILKEVGMKAALQVSMNDGLSFISSSVIITTTHCSDGSILAIALLILFLLLALALLWWFWPLCCTVIIKEVPPPPAEESEEEDDDGLPKKKWPTVDASYYGGRGVGGIKRMEVRWGEKGSTEEGAKLEKAKNARVKMPEQEYEFPEPRNLNNNMRRPSSPRKWYSPIKGKLDALWVLLRKGYDRVSVMRPQPGDTGRCINFTRVKNNQPAKYPLNNAYHTSSPPPAPIYTPPPPAPHCPPPPPSAPTPPIPSPPSTLPPPPQAPPPNRAPPPSRPPPRPSV

SEQ ID NO: 10883 - protein, 297 aa, Homo sapiens
MATAERRALGIGFQWLSLATLVLICAGQGGRREDGGPACYGGFDLYFILDKSGSVLHHWNEIYYFVEQLAHKFISPQLRMSFIVFSTRGTTLMKLTEDREQIRQGLEELQKVLPGGDTYMHEGFERASEQIYYENRQGYRTASVIIALTDGELHEDLFFYSEREANRSRDLGAIVYCVGVKDFNETQLARIADSKDHVFPVNDGFQALQGIIHSILKKSCIEILAAEPSTICAGESFQVVVRGNGFRHARNVDRVLCSFKINDSVTLSKSLQSPWVSSTSGFKEGNSHPCLPARPHT

SEQ ID NO: 10884 - protein, 195 aa, Homo sapiens
MAWEARREPGPRRAAVRETVMLLLCLGVPTGRPYNVDTESALLYQGPHNTLFGYSVVLHSHGANRWLLVGAPTANWLANASVINPGAIYRCRIGKNPGQTCEQLQLGSPNGEPCGKTCLEERDNQWLGVTLSRQPGENGSIVTCGHRWKNIFYIKNENKLPTGGCYGVPPDLRTELSKRIAPCYQGSISKYRART

SEQ ID NO: 10885 - protein, 169 aa, Homo sapiens
MCSRGWDSCLALELLLLPLSLLVTSIQGHLVHMTVVSGSNVTLNISESLPENYKQLTWFYTFDQKIVEWDSRKSKYFESKFKGRVRLDPQSGALYISKVQKEDNSTYIMRVLKKTGNEQEWKIKLQVLGESGEPKSKSPLQWPQMDHCRASWEAWGTLGEEERKTSGQV

SEQ ID NO: 10886 - protein, 742 aa, Homo sapiens
MGGRVFLAFCVWLTLPGAETQDSRGCARWCPQNSSCVNATACRCNPGFSSFSEIITTPTETCDDINECATPSKVSCGKFSDCWNTEGSYDCVCSPGYEPVSGAKTFKNESENTCQDVDECSSGQHQCDSSTVCFNTVGSYSCRCRPGWKPRHGIPNNQKDTVCEDMTFSTWTPPPGVHSQTLSRFFDKVQDLGRDSKTSSAEVTIQNVIKLVDELMEAPGDVEALAPPVRHLIATQLLSNLEDIMRILAKSLPKGPFTYISPSNTELTLMIQERGDKNVTMGQSSARMKLNWAVAAGAEDPGPAVAGILSIQNMTTLLANASLNLHSKKQAELEEIYESSIRGVQLRRLSAVNSIFLSHNNTKELNSPILFAFSHLESSDGEAGRDPPAKDVMPGPRQELLCAFWKSDSDRGGHWATEGCQVLGSKNGSTTCQCSHLSSFAILMAHYDVEDWKLTLITRVGLALSLFCLLLCILTFLLVRPIQGSRTTIHLHLCICLFVGSTIFLAGIENEGGQVGLRCRLVAGLLHYCFLAAFCWMSLEGLELYFLVVRVFQGQGLSTRWLCLIGYGVPLLIVGVSAAIYSKGYGRPRYCWLDFEQGFLWSFLGPVTFIILCNAVIFVTTVWKLTQKFSEINPDMKKLKKARALTITAIAQLFLLGCTWVFGLFIFDDRSLVLTYVFTILNCLQGAFLYLLHCLLNKKVREEYRKWACLVAGGSKYSEFTSTTSGTGHNQTRALRASESGI

SEQ ID NO: 10887 - protein, 1370 aa, Homo sapiens
MGTGGRRGAAAAPLLVAVAALLLGAAGHLYPGEVCPGMDIRNNLTRLHELENCSVIEGHLQILLMFKTRPEDFRDLSFPKLIMITDYLLLFRVYGLESLKDLFPNLTVIRGSRLFFNYALVIFEMVHLKELGLYNLMNITRGSVRIEKNNELCYLATIDWSRILDSVEDNYIVLNKDDNEECGDICPGTAKGKTNCPATVINGQFVERCWTHSHCQKVCPTICKSHGCTAEGLCCHSECLGNCSQPDDPTKCVACRNFYLDGRCVETCPPPYYHFQDWRCVNFSFCQDLHHKCKNSRRQGCHQYVIHNNKCIPECPSGYTMNSSNLLCTPCLGPCPKVCHLLEGEKTIDSVTSAQELRGCTVINGSLIINIRGGNNLAAELEANLGLIEEISGYLKIRRSYALVSLSFFRKLRLIRGETLEIGNYSFYALDNQNLRQLWDWSKHNLTTTQGKLFFHYNPKLCLSEIHKMEEVSGTKGRQERNDIALKTNGDKASCENELLKFSYIRTSFDKILLRWEPYWPPDFRDLLGFMLFYKEAPYQNVTEFDGQDACGSNSWTVVDIDPPLRSNDPKSQNHPGWLMRGLKPWTQYAIFVKTLVTFSDERRTYGAKSDIIYVQTDATNPSVPLDPISVSNSSSQIILKWKPPSDPNGNITHYLVFWERQAEDSELFELDYCLKGLKLPSRTWSPPFESEDSQKHNQSEYEDSAGECCSCPKTDSQILKELEESSFRKTFEDYLHNVVFVPRPSRKRRSLGDVGNVTVAVPTVAAFPNTSSTSVPTSPEEHRPFEKVVNKESLVISGLRHFTGYRIELQACNQDTPEERCSVAAYVSARTMPEAKADDIVGPVTHEIFENNVVHLMWQEPKEPNGLIVLYEVSYRRYGDEELHLCVSRKHFALERGCRLRGLSPGNYSVRIRATSLAGNGSWTEPTYFYVTDYLDVPSNIAKIIIGPLIFVFLFSVVIGSIYLFLRKRQPDGPLGPLYASSNPEYLSASDVFPCSVYVPDEWEVSREKITLLRELGQGSFGMVYEGNARDIIKGEAETRVAVKTVNESASLRERIEFLNEASVMKGFTCHHVVRLLGVVSKGQPTLVVMELMAHGDLKSYLRSLRPEAENNPGRPPPTLQEMIQMAAEIADGMAYLNAKKFVHRDLAARNCMVAHDFTVKIGDFGMTRDIYETDYYRKGGKGLLPVRWMAPESLKDGVFTTSSDMWSFGVVLWEITSLAEQPYQGLSNEQVLKFVMDGGYLDQPDNCPERVTDLMRMCWQFNPKMRPTFLEIVNLLKDDLHPSFPEVSFFHSEENKAPESEELEMEFEDMENVPLDRSSHCQREEAGGRDGGSSLGFKRSYEEHIPYTHMNGGKKNGRILTLPRSNPS

SEQ ID NO: 10888 - protein, 1382 aa, Homo sapiens
MGTGGRRGAAAAPLLVAVAALLLGAAGHLYPGEVCPGMDIRNNLTRLHELENCSVIEGHLQILLMFKTRPEDFRDLSFPKLIMITDYLLLFRVYGLESLKDLFPNLTVIRGSRLFFNYALVIFEMVHLKELGLYNLMNITRGSVRIEKNNELCYLATIDWSRILDSVEDNYIVLNKDDNEECGDICPGTAKGKTNCPATVINGQFVERCWTHSHCQKVCPTICKSHGCTAEGLCCHSECLGNCSQPDDPTKCVACRNFYLDGRCVETCPPPYYHFQDWRCVNFSFCQDLHHKCKNSRRQGCHQYVIHNNKCIPECPSGYTMNSSNLLCTPCLGPCPKVCHLLEGEKTIDSVTSAQELRGCTVINGSLIINIRGGNNLAAELEANLGLIEEISGYLKIRRSYALVSLSFFRKLRLIRGETLEIGNYSFYALDNQNLRQLWDWSKHNLTTTQGKLFFHYNPKLCLSEIHKMEEVSGTKGRQERNDIALKTNGDKASCENELLKFSYIRTSFDKILLRWEPYWPPDFRDLLGFMLFYKEAPYQNVTEFDGQDACGSNSWTVVDIDPPLRSNDPKSQNHPGWLMRGLKPWTQYAIFVKTLVTFSDERRTYGAKSDIIYVQTDATNPSVPLDPISVSNSSSQIILKWKPPSDPNGNITHYLVFWERQAEDSELFELDYCLKGLKLPSRTWSPPFESEDSQKHNQSEYEDSAGECCSCPKTDSQILKELEESSFRKTFEDYLHNVVFVPRKTSSGTGAEDPRPSRKRRSLGDVGNVTVAVPTVAAFPNTSSTSVPTSPEEHRPFEKVVNKESLVISGLRHFTGYRIELQACNQDTPEERCSVAAYVSARTMPEAKADDIVGPVTHEIFENNVVHLMWQEPKEPNGLIVLYEVSYRRYGDEELHLCVSRKHFALERGCRLRGLSPGNYSVRIRATSLAGNGSWTEPTYFYVTDYLDVPSNIAKIIIGPLIFVFLFSVVIGSIYLFLRKRQPDGPLGPLYASSNPEYLSASDVFPCSVYVPDEWEVSREKITLLRELGQGSFGMVYEGNARDIIKGEAETRVAVKTVNESASLRERIEFLNEASVMKGFTCHHVVRLLGVVSKGQPTLVVMELMAHGDLKSYLRSLRPEAENNPGRPPPTLQEMIQMAAEIADGMAYLNAKKFVHRDLAARNCMVAHDFTVKIGDFGMTRDIYETDYYRKGGKGLLPVRWMAPESLKDGVFTTSSDMWSFGVVLWEITSLAEQPYQGLSNEQVLKFVMDGGYLDQPDNCPERVTDLMRMCWQFNPKMRPTFLEIVNLLKDDLHPSFPEVSFFHSEENKAPESEELEMEFEDMENVPLDRSSHCQREEAGGRDGGSSLGFKRSYEEHIPYTHMNGGKKNGRILTLPRSNPS

SEQ ID NO: 10889 - protein, 1368 aa, Homo sapiens [sequence omitted]

SEQ ID NO: 10890 - protein, 135 aa, Homo sapiens
MDSWTFCCVSLCILVAKHTDAGVIQSPRHEVTEMGQEVTLRCKPISGHNSLFWYRQTMMRGLELLIYFNNNVPIDDSGMPEDRFSAKMPNASFSTLKIQPSEPRDSAVYFCASSFSTCSANYGYTFGSGTRLTVV

SEQ ID NO: 10891 - protein, 141 aa, Homo sapiens
MTKTKGKRRGTRYTFSRPFRKHGVVPLATYMRIYKKGVIVDIKGMGTVQKGMPHKCHHGKTGRVYNVTQHAVGIVVNKQVKSKILAKRINVRIEHIKHSESWDSFLKYMKENDPPPREAHFVRTNEKEPELLEPIPYELMA

SEQ ID NO: 10892 - protein, 160 aa, Homo sapiens [sequence omitted]

SEQ ID NO: 10893 - protein, 96 aa, Homo sapiens
MTNTKGKRRATRYMFSRPFRKHGAVPLATYMRIYKKGDIVDIKGMGTVQKGMPHKCYHGKTGRVYNVTQHAVGIVVNKQVKGKILAKRINVRIEHI

SEQ ID NO: 10894 - protein, 118 aa, Homo sapiens
MGMGTVQKGMPHKCYHGKTGRVYNVTQHAVGIVVNKQVKGKILAKRINVRIEHIKHSKSRDSFLKRVKENDQKKKEAKEKGTWVQLKRQPTPPREAHFVRTNGKEPELLEPIPYEFMA

SEQ ID NO: 10895 - protein, 118 aa, Homo sapiens
MGMGTAQKGMPHKCYHGKTGRVYNVTQHAVGIVVNKQVKGKILAKRIKVRIEHIKHSKSRDSFLKHVKENDQKKKDAKEKGTWVQLKRQPAPPREAHFVRTNGKQPELLEPISYEFMA

SEQ ID NO: 10896 - protein, 118 aa, Homo sapiens
MGMGTVQKGMPHKCYHGKTGRVYNVTQHAVGIVVNKQVKGKILAKRINVRIEHIKHSKSRDSFLKRVKENDQKKKEAKEKGTWVQLKRQPAPPRVAHFVRTNGKEPELLEPIPYEFME

SEQ ID NO: 10897 - protein, 355 aa, Homo sapiens
MVPARLGPAVAMVTGAGRRVLAGWAHARGDYKPRRAAAGPSATLDMALRRPPRLRLCARLPDFFLLLLFRGCLIGAVNLKSSNRTPVVQEFESVELSCIITDSQTSDPRIEWKKIQDEQTTYVFFDNKIQGDLAGRAEILGKTSLKIWNVTRRDSALYRCEVVARNDRKEIDEIVIELTVQVKPVTPVCRVPKAVPVGKMATLHCQESEGHPRPHYSWYRNDVPLPTDSRANPRFRNSSFHLNSETGTLVFTAVHKDDSGQYYCIASNDAGSARCEEQEMEVYDLNIGGIIGGVLVVLAVLALITLGICCAYRRGYFINNKQDGESYKNPGKPDGVNYIRTDEEGDFRHKSSFVI

SEQ ID NO: 10898 - protein, 1203 aa, Homo sapiens
MDLRDFYLLAALIACLRLDSAIAQELIYTIREELPENVPIGNIPKDLNISHINAATGTSASLVYRLVSKAGDAPLVKVSSSTGEIFTTSNRIDREKLCAGASYAEENECFFELEVVILPNDFFRLIKIKIIVKDTNDNAPMFPSPVINISIPENTLINSRFPIPSATDPDTGFNGVQHYELLNGQSVFGLDIVETPEGEKWPQLIVQQNLDREQKDTYVMKIKVEDGGTPQKSSTAILQVTVSDVNDNRPVFKEGQVEVHIPENAPVGTSVIQLHATDADIGSNAEIRYIFGAQVAPATKRLFALNNTTGLITVQRSLDREETAIHKVTVLASDGSSTPARATVTINVTDVNDNPPNIDLRYIISPINGTVYLSEKDPVNTKIALITVSDKDTDVNGKVICFIEREVPFHLKAVYDNQYLLETSSLLDYEGTKEFSFKIVASDSGKPSLNQTALVRVKLEDENDNPPIFNQPVIELSVSENNRRGLYLTTISATDEDSGKNADIVYQLGPNASFFDLDRKTGVLTASRVFDREEQERFIFTVTARDNGTPPLQSQAAVIVTVLDENDNSPKFTHNHFQFFVSENLPKYSTVGVITVTDADAGENKAVTLSILNDNDNFVLDPYSGVIKSNVSFDREQQSSYTFDVKATDGGQPPRSSTAKVTINVMDVNDNSPVVISPPSNTSFKLVPLSAIPGSVVAEVFAVDVDTGMNAELKYTIVSGNNKGLFRIDPVTGNITLEEKPAPTDVGLHRLVVNISDLGYPKSLHTLVLVFLYVNDTAGNASYIYDLIRRTMETPLDRNIGDSSQPYQNEDYLTIMIAIIAGAMVVIVVIFVTVLVRCRHASRFKAAQRSKQGAEWMSPNQENKQNKKKKRKKRKSPKSSLLNFVTIEESKPDDAVHEPINGTISLPAELEEQSIGRFDWGPAPPTTFKPNSPDLAKHYKSASPQPAFHLKPDTPVSVKKHHVIQELPLDNTFVGGCDTLSKRSSTSSDHFSASECSSQGGFKTKGPLHTRQSQRRVTFHLPDGSQESCSDSGLGDHEPVGSGTLISHPLPLVQPQDEFYDQASPDKRTEADGNSDPNSDGPLGPRGLAEATEMCTQECLVLGHSDNCWMPPGLGPYQHPKSPLSTFAPQKEWVKKDKLVNGHTLTRAWKEDSNRNQFNDRKQYGSNEGHFNNGSHMTDIPLANLKSYKQAGGATESPKEHQL

SEQ ID NO: 10899 - protein, 327 aa, Homo sapiens
MLFLLLPLLAVLPGDGNADGLKEPLSFHVIWIASFYNHSWKQNLVSGWLSDLQTHTWDSNSSTIVFLWPWSRGNFSNEEWKELETLFRIRTIRSFEGIRRYAHELQFEYPFEIQVTGGCELHSGKVSGSFLQLAYQGSDFVSFQNNSWLPYPVAGNMAKHFCKVLNQNQHENDITHNLLSDTCPRFILGLLDAGKAHLQRQVKPEAWLSHGPSPGPGHLQLVCHVSGFYPKPVWVMWMRGEQEQQGTQRGDILPSADGTWYLRATLEVAAGEAADLSCRVKHSSLEGQDIVLYWEHHSSVGFIILAVIVPLLLLIGLALWFRKRCFC

SEQ ID NO: 10900 - protein, 651 aa, Homo sapiens
MTPILTVLICLGLSLGPRTHVQAGHLPKPTLWAEPGSVITQGSPVTLRCQGGQETQEYRLYREKKTALWITRIPQELVKKGQFPIPSITWEHAGRYRCYYGSDTAGRSESSDPLELVVTGAYIKPTLSAQPSPVVNSGGNVILQCDSQVAFDGFSLCKEGEDEHPQCLNSQPHARGSSRAIFSVGPVSPSRRWWYRCYAYDSNSPYEWSLPSDLLELLVLGVSKKPSLSVQPGPIVAPEETLTLQCGSDAGYNRFVLYKDGERDFLQLAGAQPQAGLSQANFTLGPVSRSYGGQYRCYGAHNLSSEWSAPSDPLDILIAGQFYDRVSLSVQPGPTVASGENVTLLCQSQGWMQTFLLTKEGAADDPWRLRSTYQSQKYQAEFPMGPVTSAHAGTYRCYGSQSSKPYLLTHPSDPLELVVSGPSGGPSSPTTGPTSTSAGPEDQPLTPTGSDPQSGLGRHLGVVIGILVAVILLLLLLLLLFLILRHRRQGKHWTSTQRKADFQHPAGAVGPEPTDRGLQWRSSPAADAQEENLYAAVKHTQPEDGVEMDTRSPHDEDPQAVTYAEVKHSRPRREMASPPSPLSGEFLDTKDRQAEEDRQMDTEAAASEAPQDVTYAQLHSLTLRREATEPPPSQEGPSPAVPSIYATLAIH

SEQ ID NO: 10901 - protein, 652 aa, Homo sapiens
MTPILTVLICLGLSLGPRTHVQAGHLPKPTLWAEPGSVITQGSPVTLRCQGGQETQEYRLYREKKTALWITRIPQELVKKGQFPIPSITWEHAGRYRCYYGSDTAGRSESSDPLELVVTGAYIKPTLSAQPSPVVNSGGNVILQCDSQVAFDGFSLCKEGEDEHPQCLNSQPHARGSSRAIFSVGPVSPSRRWWYRCYAYDSNSPYEWSLPSDLLELLVLGVSKKPSLSVQPGPIVAPEETLTLQCGSDAGYNRFVLYKDGERDFLQLAGAQPQAGLSQANFTLGPVSRSYGGQYRCYGAHNLSSEWSAPSDPLDILIAGQFYDRVSLSVQPGPTVASGENVTLLCQSQGWMQTFLLTKEGAADDPWRLRSTYQSQKYQAEFPMGPVTSAHAGTYRCYGSQSSKPYLLTHPSDPLELVVSGPSGGPSSPTTGPTSTSAGPEDQPLTPTGSDPQSGLGRHLGVVIGILVAVILLLLLLLLLFLILRHRRQGKHWTSTQRKADFQHPAGAVGPEPTDRGLQWRSSPAADAQEENLYAAVKHTQPEDGVEMDTRQSPHDEDPQAVTYAEVKHSRPRREMASPPSPLSGEFLDTKDRQAEEDRQMDTEAAASEAPQDVTYAQLHSLTLRREATEPPPSQEGPSPAVPSIYATLAIH

SEQ ID NO: 10902 - protein, 650 aa, Homo sapiens
MTPILTVLICLGLSLGPRTHVQAGHLPKPTLWAEPGSVITQGSPVTLRCQGGQETQEYRLYREKKTALWITRIPQELVKKGQFPIPSITWEHAGRYRCYYGSDTAGRSESSDPLELVVTGAYIKPTLSAQPSPVVNSGGNVILQCDSQVAFDGFSLCKEGEDEHPQCLNSQPHARGSSRAIFSVGPVSPSRRWWYRCYAYDSNSPYEWSLPSDLLELLVLGVSKKPSLSVQPGPIVAPEETLTLQCGSDAGYNRFVLYKDGERDFLQLAGAQPQAGLSQANFTLGPVSRSYGGQYRCYGAHNLSSEWSAPSDPLDILIAGQFYDRVSLSVQPGPTVASGENVTLLCQSQGWMQTFLLTKEGAADDPWRLRSTYQSQKYQAEFPMGPVTSAHAGTYRCYGSQSSKPYLLTHPSDPLELVVSGPSGGPSSPTTGPTSTSGPEDQPLTPTGSDPQSGLGRHLGVVIGILVAVILLLLLLLLLFLILRHRRQGKHWTSTQRKADFQHPAGAVGPEPTDRGLQWRSSPAADAQEENLYAAVKHTQPEDGVEMDTRSPHDEDPQAVTYAEVKHSRPRREMASPPSPLSGEFLDTKDRQAEEDRQMDTEAAASEAPQDVTYAQLHSLTLRREATEPPPSQEGPSPAVPSIYATLAIH

SEQ ID NO: 10903 - protein, 219 aa, Homo sapiens
MGMSSLKLLKYVLFFFNLLFWICGCCILGFGIYLLIHNNFGVLFHNLPSLTLGNVFVIVGSIIMVVAFLGCMGSIKENKCLLMSFFILLLIILLAEVTLAILLFVYEQKLNEYVAKGLTDSIHRYHSDNSTKAAWDSIQSFLQCCGINGTSDWTSGPPASCPSDRKVEGCYAKARLWFHSNFLYIGIITICVCVIEVLGMSFALTLNCQIDKTSQTIGL

SEQ ID NO: 10904 - protein, 551 aa, Homo sapiens
MRDYDEVIAFLGEWGPFQRLIFFLLSASIIPNGFNGMSVVFLAGTPEHRCRVPDAANLSSAWRNNSVPLRLRDGREVPHSCSRYRLATIANFSALGLEPGRDVDLGQLEQESCLDGWEFSQDVYLSTVVTEWNLVCEDNWKVPLTTSLFFVGVLLGSFVSGQLSDRFGRKNVLFATMAVQTGFSFLQIFSISWEMFTVLFVIVGMGQISNYVVAFILGTEILGKSVRIIFSTLGVCTFFAVGYMLLPLFAYFIRDWRMLLLALTVPGVLCVPLWWFIPESPRWLISQRRFREAEDIIQKAAKMNNTAVPAVIFDSVEELNPLKQQKAFILDLFRTRNIAIMTIMSLLLWMLTSVGYFALSLDAPNLHGDAYLNCFLSALIEIPAYITAWLLLRTLPRRYIIAAVLFWGGGVLLFIQLVPVDYYFLSIGLVMLGKFGITSAFSMLYVFTAELYPTLVRNMAVGVTSTASRVGSIIAPYFVYLGAYNRMLPYIVMGSLTVLIGIFTLFFPESLGMTLPETLEQMQKVKWFRSGKKTRDSMETEENPKVLITAF

SEQ ID NO: 10905 - protein, 551 aa, Homo sapiens
MRDYDEVIAFLGEWGPFQRLIFFLLSASIIPNGFNGMSVVFLAGTPEHRCRVPDAANLSSAWRNNSVPLRLRDGREVPHSCSRYRLATIANFSALGLEPGRDVDLGQLEQESCLDGWEFSQDVYLSTVVTEWNLVCEDNWKVPLTTSLFFVGVLLGSFVSGQLSDRFGRKNVLFATMAVQTGFSFLQIFSISWEMFTVLFVIVGMGQISNYVVAFILGTEILGKSVRIIFSTLGVCTFFAVGYMLLPLFAYFIRDWRMLLLALTVPGVLCVPLWWFIPESPRWLISQRRFREAEDIIQKAAKMNNIAVPAVIFDSVEELNPLKQQKAFILDLFRTRNIAIMTIMSLLLWMLTSVGYFALSLDAPNLHGDAYLNCFLSALIEIPAYITAWLLLRTLPRRYIIAAVLFWGGGVLLFIQLVPVDYYFLSIGLVMLGKFGITSAFSMLYVFTAELYPTLVRNMAVGVTSTASRVGSIIAPYFVYLGAYNRMLPYIVMGSLTVLIGILTLFFPESLGMTLPETLEQMQKVKWFRSGKKTRDSMETEENPKVLITAF

SEQ ID NO: 10906 - protein, 381 aa, Homo sapiens
  VARIANT 208, 209, 210, 211, 212, 213, 214, 215, 216, 217, 218, 219,220, 221, 222, 223, 224, 225, 226, 227, 228, 229, 230, 231,232, 233, 234, 235, 236, 237, 238, 239, 240, 241: Xaa = Any Amino Acid
MREKALHVAPATPRTGYKPPGGGRGTQEGSNVCESSREYTRSKGCELGLHGRAAHPAPRDQYCKGPQKSSDCFEKQNVSATGIYGEGRASSTTLQDLESQYQELAVALDSSSAIISQLTENINSLVRTSKEEKKHEIHLVQKLGRSLFKLKNQTAEPLAPEPPAGPSKVEQLQDETNHLRKELESVGRQLQAEVENNQMLSLLNRRQXXXXXXXXXXXXXXXXXXXXXXXXXXXXXXXXXXGKGRLNCEVRLIFFLLSASIIPNGFNGMSVVFLAGTPEHRCRVPDAANLSSAWRNNSVPLRLRDGREVPHSCSRYRLATIANFSALGLEPGRDVDLGQLEQESCLDGWEFSQDVYLSTVVTEGPLSRQAARAFSDWKAFC

SEQ ID NO: 10907 - protein, 509 aa, Homo sapiens
YDEVIAFLGEWGPFQRLIFFLLSASIIPNGFNGMSVVFLAGTPEHRCRVPDAANLSSAWRNNSVPLRLRDGREVPHSCSRYRLATIANFSALGLEPGRDVDLGQLEQESCLDGWEFSQDVYLSTVVTEWNLVCEDNWKVPLTTSLFFVGVLLGSFVSGQLSDRFGRKNVLFVTMGMQTGFSFLQIFSKNFEMFVVLFVLVGMGQISNYVAAFVLGTEILGKSVRIIFSTLGVCIFYAFGYMVLPLFAYFIRDWRMLLVALTMPGVLCVALWWFIPESPRWLISQGRFEEAEVIIRKAAKANGIVVPSTIFDPSEVSTMLGKMWILLFQLSSALCFRMTISVGYFGLSLDTPNLHGDIFVNCFLSAMVEVPAYVLAWLLLQYLPRRYSMATALFLGGSVLLFMQLVPPDLYYLATVLVMVGKFGVTAAFSMVYVYTAELYPTVVRNMGVGVSSTASRLGSILSPYFVYLGAYDRFLPYILMGSLTILTAILTLFLPESFGTPLPDTIDQM

SEQ ID NO: 10908 - protein, 521 aa, Homo sapiens
YDEVIAFLGEWGPFQRLIFFLLSASIIPNGFNGMSVVFLAGTPEHRCRVPDAANLSSAWRNNSVPLRLRDGREVPHSCSRYRLATIANFSALGLEPGRDVDLGQLEQESCLDGWEFSQDVYLSTVVTEWNLVCEDNWKVPLTTSLFFVGVLLGSFVSGQLSDRFGRKNVLFATMAVQTGFSFLQIFSISWEMFTVLFVIVGMGQISNYVVAFILGTEILGKSVRIIFSTLGVCTFFAVGYMLLPLFAYFIRDWRMLLLALTVPGVLCVPLWWFIPESPRWLISQGRFEEAEVIIRKAAKANGIVVPSTIFDPSEVSTMWVWQSHNILDLLRTWNIRMVTIMSIMLWMTISVGYFGLSLDTPNLHGDIFVNCFLSAMVEVPAYVLAWLLLQYLPRRYSMATALFLGGSVLLFMQLVPPDLYYLATVLVMVGKFGVTAAFSMVYVYTAELYPTVVRNMGVGVSSTASRLGSILSPYFVYLGAYDRFLPYILMGSLTILTAILTLFLPESFGTPLPDTIDQMLR

SEQ ID NO: 10909 - protein, 557 aa, Homo sapiens
MRDYDEVTAFLGEWGPFQRLIFFLLSASIIPNGFTGLSSVFLIATPEHRCRVPDAANLSSAWRNHTVPLRLRDGREVPHSCRRYRLATIANFSALGLEPGRDVDLGQLEQESCLDGWEFSQDVYLSTIVTEWNLVCEDDWKAPLTISLFFVGVLLGSFISGQLSDRFGRKNVLFVTMGMQTGFSFLQIFSKNFEMFVVLFVLVGMGQISNYVAAFVLGTEILGKSVRIIFSTLGVCIFYAFGYMVLPLFAYFIRDWRMLLVALTMPGVLCVALWWFIPESPRWLISQGRFEEAEVIIRKAAKANGIVVPSTIFDPSELQDLSSKKQQSHNILDLLRTWNIRMVTIMSIMLWMTISVGYFGLSLDTPNLHGDIFVNCFLSAMVEVPAYVLAWLLLQYLPRRYSMATALFLGGSVLLFMQLVPPDLYYLATVLVMVGKFGVTAAFSMVYVYTAELYPTVVRNMGVGVSSTASRLGSILSPYFVYLGAYDRFLPYILMGSLTILTAILTLFLPESFGTPLPDTIDQMLRVKGMKHRKTPSHTRMLKDGQERPTILKSTAF

SEQ ID NO: 10910 - protein, 520 aa, Homo sapiens
MRDYDEVIAFLGEWGPFQRLIFFLLSASIIPNGFNGMSVVFLAGTPEHRCRVPDAANLSSAWRNNSVPLRLRDGREVPHSCSRYRLATIANFSALGLEPGRDVDLGQLEQESCLDGWEFSQDVYLSTVVTEWNLVCEDNWKVPLTTSLFFVGVLLGSFVSGQLSDRFGRKNVLFVTMGMQTGFSFLQIFSKNFEMFVVLFVLVGMGQISNYVAAFVLGTEILGKSVRIIFSTLGVCIFYAFGYMVLPLFAYFIRDWRMLLVALTMPGVLCVALWWFIPESPRWLISQGRFEEAEVIIRKAAKANGIVVPSTIFDPNLSSKKQQSHNILDLLRTWNIRMVTIMSIMLWMTISVGYFGLSLDTPNLHGDIFVNCFLSAMVEVPAYVLAWLLLQYLPRRYSMATALFLGGSVLLFMQLVPPDLYYLATVLVMVGKFGVTAAFSMVYVYTAELYPTVVRNMGVGVSSTASRLGSILSPYFVYLGAYDRFLPYILMGSLTILTAILTLFLPESFGTPLPDTIDQM

SEQ ID NO: 10911 - protein, 188 aa, Homo sapiens
MPGGPGVLQALPATIFLLFLLSAVYLGPGCQALWMHKVPASLMVSLGEDAHFQCPHNSSNNANVTWWRVLHGNYTWPPEFLGPGEDPNEPPPRPFLDMGEGTKNRIITAEGIILLFCAVVPGTLLLFRKRWQNEKLGLDAGDEYEDENLYEGLNLDDCSMYEDISRGLQGTYQDVGSLNIGDVQLEKP

SEQ ID NO: 10912 - protein, 509 aa, Homo sapiens
MGCSAKARWAAGALGVAGLLCAVLGAVMIVMVPSLIKQQVLKNVRIDPSSLSFNMWKEIPIPFYLSVYFFDVMNPSEILKGEKPQVRERGPYVYREFRHKSNITFNNNDTVSFLEYRTFQFQPSKSHGSESDYIVMPNILVLGAAVMMENKPMTLKLIMTLAFTTLGERAFMNRTVGEIMWGYKDPLVNLINKYFPGMFPFKDKFGLFAELNNSDSGLFTVFTGVQNISRIHLVDKWNGLSKVDFWHSDQCNMINGTSGQMWPPFMTPESSLEFYSPEACRSMKLMYKESGVFEGIPTYRFVAPKTLFANGSIYPPNEGFCPCLESGIQNVSTCRFSAPLFLSHPHFLNADPVLAEAVTGLHPNQEAHSLFLDIHPVTGIPMNCSVKLQLSLYMKSVAGIGQTGKIEPVVLPLLWFAESGAMEGETLHTFYTQLVLMPKVMHYAQYVLLALGCVLLLVPVICQIRSQEKCYLFWSSSKKGSKDKEAIQAYSESLMTSAPKGSVLQEAKL

SEQ ID NO: 10913 - protein, 552 aa, Homo sapiens
MGCSAKARWAAGALGVAGLLCAVLGAVMIVMVPSLIKQQVLKNVRIDPSSLSFNMWKEIPIPFYLSVYFFDVMNPSEILKGEKPQVRERGPYVYREFRHKSNITFNNNDTVSFLEYRTFQFQPSKSHGSESDYIVMPNILVLGAAVMMENKPMTLKLIMTLAFTTLGERAFMNRTVGEIMWGYKDPLVNLINKYFPGMFPFKDKFGLFAELNNSDSGLFTVFTGVQNISRIHLVDKWNGLSKVDFWHSDQCNMINGTSGQMWPPFMTPESSLEFYSPEACRSMKLMYKESGVFEGIPTYRFVAPKTLFANGSIYPPNEGFCPCLESGIQNVSTCRFSAPLFLSHPHFLNADPVLAEAVTGLHPNQEAHSLFLDIHPVTGIPMNCSVKLQLSLYMKSVAGIGQTGKIEPVVLPLLWFAESGAMEGETLHTFYTQLVLMPKVMHYAQYVLLALGCVLLLVPVICQIRSQVGAGQRAARADSHSLACWGKGASDRTLWPTAAWSPPPAAVLRLCRSGSGHCWGLRSTLASFACRVATTLPVLEGLGPSLGGGTGS

SEQ ID NO: 10914 - protein, 166 aa, Homo sapiens
MKTILSNQTVDIPENVDITLKGRTVIVKGPRGTLRRDFNHINVELSLLGKKKKRLRVDKWWGNRKELATVRTICSHVQNMIKGVTLGFRYKMRSVYAHFPINVVIQENGSLVEIRNFLGEKYIRRVRMRHSAALIQQATTVKNKDIRKFLDGIYVSEKGTVQQADE

SEQ ID NO: 10915 - protein, 192 aa, Homo sapiens [sequence omitted]

SEQ ID NO: 10916 - protein, 336 aa, Homo sapiens
MDYPTLLLALLHVYRALCEEVLWHTSVPFAENMSLECVYPSMGILTQVEWFKIGTQQDSIAIFSPTHGMVIRKPYAERVYFLNSTMASNNMTLFFRNASEDDVGYYSCSLYTYPQGTWQKVIQVVQSDSFEAAVPSNSHIVSEPGKNVTLTCQPQMTWPVQAVRWEKIQPRQIDLLTYCNLVHGRNFTSKFPRQIVSNCSHGRWSVIVIPDVTVSDSGLYRCYLQASAGENETFVMRLTVAEGKTDNQYTLFVAGGTVLLLLFVISITTIIVIFLNRRRRRERRDLFTESWDTQKAPNNYRSPISTGQPTNQSMDDTREDIYVNYPTFSRRPKTRV

SEQ ID NO: 10917 - protein, 552 aa, Homo sapiens
MIGCGACEPKVKMAGGQAAAALPTWKMAARRSLSARGRGILQAAAGRLLPLLLLSCCCGAGGCAAVGENEETVIIGLRLEDTNDVSFMEGGALRVSERTRVKLRVYGQNINNETWSRIAFTEHERRRHSPGERGLGGPAPPEPDSGPQRCGIRTSDIIILPHIILNRRTSGIIEIEIKPLRKMEKSKSYYLCTSLSTPALGAGGSGSTGGAVGGKGGSGVAGLPPPPWAETTWIYHDGEDTKMIVGEEKKFLLPFWLQVIFISLLLCLSGMFSGLNLGLMALDPMELRIVQNCGTEKEKNYAKRIEPVRRQGNYLLCSLLLGNVLVNTTLTILLDDIAGSGLVAVVVSTIGIVIFGEIVPQAICSRHGLAVGANTIFLTKFFMMMTFPASYPVSKLLDCVLGQEIGTVYNREKLLEMLRVTDPYNDLVKEELNIIQGALELRTKTVEDVMTPLRDCFMITGEAILDFNTMSEIMESGYTRIPVFEGERSNIVDLLFVKDLAFVDPDDCTPLKTITKFYNHPLHFVFNDTKLDAMLEEFKKEHTNKKPKSYQH

SEQ ID NO: 10918 - protein, 854 aa, Homo sapiens [sequence omitted]

SEQ ID NO: 10919 - protein, 875 aa, Homo sapiens
MIGCGACEPKVKMAGGQAAAALPTWKMAARRSLSARGRGILQAAAGRLLPLLLLSCCCGAGGCAAVGENEETVIIGLRLEDTNDVSFMEGGALRVSERTRVKLRVYGQNINNETWSRIAFTEHERRRHSPGERGLGGPAPPEPDSGPQRCGIRTSDIIILPHIILNRRTSGIIEIEIKPLRKMEKSKSYYLCTSLSTPALGAGGSGSTGGAVGGKGGSGVAGLPPPPWAETTWIYHDGEDTKMIVGEEKKFLLPFWLQVIFISLLLCLSGMFSGLNLGLMALDPMELRIVQNCGTEKEKNYAKRIEPVRRQGNYLLCSLLLGNVLVNTTLTILLDDIAGSGLVAVVVSTIGIVIFGEIVPQAICSRHGLAVGANTIFLTKFFMMMTFPASYPVSKLLDCVLGQEIGTVYNREKLLEMLRVTDPYNDLVKEELNIIQGALELRTKTVEDVMTPLRDCFMITGEAILDFNTMSEIMESGYTRIPVFEGERSNIVDLLFVKDLAFVDPDDCTPLKTITKFYNHPLHFVFNDTKLDAMLEEFKKGKSHLAIVQRVNNEGEGDPFYEVLGIVTLEDVIEEIIKSEILDETDLYTDNRTKKKVAHRERKQDFSAFKQTDSEMKVKISPQLLLAMHRFLATEVEAFSPSQMSEKILLRLLKHPNVIQELKYDEKNKKAPEYYLYQRNKPVDYFVLILQGKVEVEAGKEGMKFEASAFSYYGVMALTASPVPLSLSRTFVVSRTELLAAGSPGENKSPPRPCGLNHSDSLSRSDRIDAVTPTLGSSNNQLNSSLLQVYIPDYSVRALSDLQFVKISRQQYQNALMASRMDKTPQSSDSENTKIELTLTELHDGLPDETANLLNEQNCVTHSKANHSLHNEGAI

SEQ ID NO: 10920 - protein, 1086 aa, Homo sapiens
MKDSCITVMAMALLSGFFFFAPASSYNLDVRGARSFSPPRAGRHFGYRVLQVGNGVIVGAPGEGNSTGSLYQCQSGTGHCLPVTLRGSNYTSKYLGMTLATDPTDGSILFAAVQFSTSYKTEFDFSDYVKRKDPDALLKHVKHMLLLTNTFGAINYVATEVFREELGARPDATKVLIIITDGEATDSGNIDAAKDIIRYIIGIGKHFQTKESQETLHKFASKPASEFVKILDTFEKLKDLFTELQKKIYVIEGTSKQDLTSFNMELSSSGISADLSRGHAVVGAVGAKDWAGGFLDLKADLQDDTFIGNEPLTPEVRAGYLGYTVTWLPSRQKTSLLASGAPRYQHMGRVLLFQEPQGGGHWSQVQTIHGTQIGSYFGGELCGVDVDQDGETELLLIGAPLFYGEQRGGRVFIYQRRQLGFEEVSELQGDPGYPLGRFGEAITALTDINGDGLVDVAVGAPLEEQGAVYIFNGRHGGLSPQPSQRIEGTQVLSGIQWFGRSIHGVKDLEGDGLADVAVGAESQMIVLSSRPVVDMVTLMSFSPAEIPVHEVECSYSTSNKMKEGVNITICFQIKSLIPQFQGRLVANLTYTLQLDGHRTRRRGLFPGGRHELRRNIAVTTSMSCTDFSFHFPVCVQDLISPINVSLNFSLWEEEGTPRDQRAGKDIPPILRPSLHSETWEIPFEKNCGEDKKCEANLRVSFSPARSRALRLTAFASLSVELSLSNLEEDAYWVQLDLHFPPGLSFRKVEMLKPHSQIPVSCEELPEESRLLSRALSCNVSSPIFKAGHSVALQMMFNTLVNSSWGDSVELHANVTCNNEDSDLLEDNSATTIIPILYPINILIQDQEDSTLYVSFTPKGPKIHQVKHMYQVRIQPSIHDHNIPTLEAVVGVPQPPSEGPITHQWSVQMEPPVPCHYEDLERLPDAAEPCLPGALFRCPVVFRQEILVQVIGTLELVGEIEASSMFSLCSSLSISFNSSKHFHLYGSNASLAQVVMKVDVVYEKQMLYLYVLSGIGGLLLLLLIFIVLYKVGFFKRNLKEKMEAGRGVPNGIPAEDSEQLASGQEAGDPGCLKPLHEKDSESGGGKD

SEQ ID NO: 10921 - protein, 1170 aa, Homo sapiens
MKDSCITVMAMALLSGFFFFAPASSYNLDVRGARSFSPPRAGRHFGYRVLQVGNGVIVGAPGEGNSTGSLYQCQSGTGHCLPVTLRGSNYTSKYLGMTLATDPTDGSILACDPGLSRTCDQNTYLSGLCYLFRQNLQGPMLQGRPGFQECIKGNVDLVFLFDGSMSLQPDEFQKILDFMKDVMKKLSNTSYQFAAVQFSTSYKTEFDFSDYVKRKDPDALLKHVKHMLLLTNTFGAINYVATEVFREELGARPDATKVLIIITDGEATDSGNIDAAKDIIRYIIGIGKHFQTKESQETLHKFASKPASEFVKILDTFEKLKDLFTELQKKIYVIEGTSKQDLTSFNMELSSSGISADLSRGHAVVGAVGAKDWAGGFLDLKADLQDDTFIGNEPLTPEVRAGYLGYTVTWLPSRQKTSLLASGAPRYQHMGRVLLFQEPQGGGHWSQVQTIHGTQIGSYFGGELCGVDVDQDGETELLLIGAPLFYGEQRGGRVFIYQRRQLGFEEVSELQGDPGYPLGRFGEAITALTDINGDGLVDVAVGAPLEEQGAVYIFNGRHGGLSPQPSQRIEGTQVLSGIQWFGRSIHGVKDLEGDGLADVAVGAESQMIVLSSRPVVDMVTLMSFSPAEIPVHEVECSYSTSNKMKEGVNITICFQIKSLYPQFQGRLVANLTYTLQLDGHRTRRRGLFPGGRHELRRNIAVTTSMSCTDFSFHFPVCVQDLISPINVSLNFSLWEEEGTPRDQRAQGKDIPPILRPSLHSETWEIPFEKNCGEDKKCEANLRVSFSPARSRALRLTAFASLSVELSLSNLEEDAYWVQLDLHFPPGLSFRKVEMLKPHSQIPVSCEELPEESRLLSRALSCNVSSPIFKAGHSVALQMMFNTLVNSSWGDSVELHANVTCNNEDSDLLEDNSATTIIPILYPINILIQDQEDSTLYVSFTPKGPKIHQVKHMYQVRIQPSIHDHNIPTLEAVVGVPQPPSEGPITHQWSVQMEPPVPCHYEDLERLPDAAEPCLPGALFRCPVVFRQEILVQVIGTLELVGEIEASSMFSLCSSLSISFNSSKHFHLYGSNASLAQVVMKVDVVYEKQMLYLYVLSGIGGLLLLLLIFIVLYKVGFFKRNLKEKMEAGRGVPNGIPAEDSEQLASGQEAGDPGCLKPLHEKDSESGGGKD

SEQ ID NO: 10922 - protein, 1223 aa, Homo sapiens
MKDSCITVMAMALLSGFFFFAPASSYNLDVRGARSFSPPRAGRHFGYRVLQVGNGVIVGAPGEGNSTGSLYQCQSGTGHCLPVTLRGSNYTSKYLGMTLATDPTDGSILACDPGLSRTCDQNTYLSGLCYLFRQNLQGPMLQGRPGFQECIKGNVDLVFLFDGSMSLQPDEFQKILDFMKDVMKKLSNTSYQFAAVQFSTSYKTEFDFSDYVKRKDPDALLKHVKHMLLLTNTFGAINYVATEVFREELGARPDATKVLIIITDGEATDSGNIDAAKDIIRYIIGIGKHFQTKESQETLHKFASKPASEFVKILDTFEKLKDLFTELQKKIYVIEGTSKQDLTSFNMELSSSGISADLSRGHAVVGAVGAKDWAGGFLDLKADLQDDTFIGNEPLTPEVRAGYLGYTVTWLPSRQKTSLLASGAPRYQHMGRVLLFQEPQGGGHWSQVQTIHGTQIGSYFGGELCGVDVDQDGETELLLIGAPLFYGEQRGGRVFIYQRRQLGFEEVSELQGDPGYPLGRFGEAITALTDINGDGLVDVAVGAPLEEQGAVYIFNGRHGGLSPQPSQRIEGTQVLSGIQWFGRSIHGVKDLEGDGLADVAVGAESQMIVLSSRPVVDMVTLMSFSPAEIPVHEVECSYSTSNKMKEGVNITICFQIKSLYPQFQGRLVANLTYTLQLDGHRTRRRGLFPGGRHELRRNIAVTTSMSCTDFSFHFPVCVQDLISPINVSLNFSLWEEEGTPRDQRAQGKDIPPILRPSLHSETWEIPFEKNCGEDKKCEANLRVSFSPARSRALRLTAFASLSVELSLSNLEEDAYWVQLDLHFPPGLSFRKVEMLKPHSQIPVSCEELPEESRLLSRALSCNVSSPIFKAGHSVALQMMFNTLVNSSWGDSVELHANVTCNNEDSDLLEDNSATTIIPILYPINILIQDQEDSTLYVSFTPKGPKIHQVKHMYQGVHGLVEMQTSKQILCRPAGDAEHTVGAQEGELPCPWGVSEAFRDNIRAGPCRVRIQPSIHDHNIPTLEAVVGVPQPPSEGPITHQWSVQMEPPVPCHYEDLERLPDAAEPCLPGALFRCPVVFRQEILVQVIGTLELVGEIEASSMFSLCSSLSISFNSSKHFHLYGSNASLAQVVMKVDVVYEKQMLYLYVLSGIGGLLLLLLIFIVLYKVGFFKRNLKEKMEAGRGVPNGIPAEDSEQLASGQEAGDPGCLKPLHEKDSESGGGKD

SEQ ID NO: 10923 - protein, 359 aa, Homo sapiens
MQVPNSTGPDNATLQMLRNPAIAVALPVVYSLVAAVSIPGNLFSLWVLCRRMGPRSPSVIFMINLSVTDLMLASVLPFQIYYHCNRHHWVFGVLLCNVVTVAFYANMYSSILTMTCISVERFLGVLYPLSSKRWRRRRYAVAACAGTWLLLLTALSPLARTDLTYPVHALGIITCFDVLKWTMLPSVAMWAVFLFTIFILLFLIPFVITVACYTATILKLLRTEEAHGREQRRRAVGLAAVVLLAFVTCFAPNNFVLLAHIVSRLFYGKSYYHVYKLTLCLSCLNNCLDPFVYYFASREFQLRLREYLGCRRVPRDTLDTRRESLFSARTTSVRSEAGAHPEGMEGATRPGLQRQESVF

SEQ ID NO: 10924 - protein, 803 aa, Homo sapiens
MITLTELKCLADAQSSYHILKPWWDVFWYYITLIMLLVAVLAGALQLTQSRVLCCLPCKVEFDNHCAVPWDILKASMNTSSNPGTPLPLPLRIQNDLHRQQYSYIDAVCYEKQLHWFAKFFPYLVLLHTLIFAACSNFWLHYPSTSSRLEHFVAILHKCFDSPWTTRALSETVAEQSVRPLKLSKSKILLSSSGCSADIDSGKQSLPYPQPGLESAGIESPTSSVLDKKEGEQAKAIFEKVKRFRMHVEQKDIIYRVYLKQIIVKVILFVLIITYVPYFLTHITLEIDCSVDVQAFTGYKRYQCVYSLAEIFKVLASFYVILVILYGLTSSYSLWWMLRSSLKQYSFEALREKSNYSDIPDVKNDFAFILHLADQYDPLYSKRFSIFLSEVSENKLKQINLNNEWTVEKLKSKLVKNAQDKIELHLFMLNGLPDNVFELTEMEVLSLELIPEVKLPSAVSQLVNLKELRVYHSSLVVDHPALAFLEENLKILRLKFTEMGKIPRWVFHLKNLKELYLSGCVLPEQLSTMQLEGFQDLKNLRTLYLKSSLSRIPQVVTDLLPSLQKLSLDNEGSKLVVLNNLKKMVNLKSLELISCDLERIPHSIFSLNNLHELDLRENNLKTVEEIISFQHLQNLSCLKLWHNNIAYIPAQIGALSNLEQLSLDHNNIENLPLQLFLCTKLHYLDLSYNHLTFIPEEIQYLSNLQYFAVTNNNIEMLPDGLFQCKKLQCLLLGKNSLMNLSPHVGELSNLTHLELIGNYLETLPPELEGCQSLKRNCLIVEENLLNTLPLPVTERLQTCLDKC

SEQ ID NO: 10925 - protein, 158 aa, Homo sapiens
MDNLSSEEIQQRAHQITDESLESTRRILGLAIESQDAGIKTITMLDEQKEQLNRIEEGLDQINKDMRETEKTLTELNKCCGLCVCPCNSITNDAREDEMEENLTQVGSILGNLKDMALNIGNEIDAQNPQIKRITDKADTNRDRIDIANARAKKLIDS

SEQ ID NO: 10926 - protein, 211 aa, Homo sapiens
MDNLSSEEIQQRAHQITDESLESTRRILGLAIESQDAGIKTITMLDEQKEQLNRIEEGLDQINKDMRETEKTLTELNKCCGLCVCPCNRTKNFESGKAYKTTWGDGGENSPCNVVSKQPGPVTNGQLQQPTTGAASGGYIKRITNDAREDEMEENLTQVGSILGNLKDMALNIGNEIDAQNPQIKRITDKADTNRDRIDIANARAKKLIDS

SEQ ID NO: 10927 - protein, 80 aa, Homo sapiens
MLRLLLALNLFPSIQVTGNKILVKQSPMLVAYDNAVNLSYNEKSNGTIIHVKGKHLCPSPLFPGPSKPYAPPRDFAAYRS

SEQ ID NO: 10928 - protein, 55 aa, Homo sapiens
MLRLLLALNLFPSIQVTGNKILVKQSPMLVAYDNAVNLSYNEKSNGTIIHVKGEE

SEQ ID NO: 10929 - protein, 198 aa, Homo sapiens
MALRHLALLAGLLVGVASKSMENTAQLPECCVDVVGVNASCPGASLCGPGCYRRWNADGSASCVRCGNGTLPAYNGSECRSFAGPGAPFPMNRSSGTPGRPHPGAPRVAASLFLGTFFISSGLILSVAGFFYLKRSSKLPRACYRRNKAPALQPGEAAAMIPPPQSSVRKPRYVRRERPLDRATDPAAFPGEARISNV

SEQ ID NO: 10930 - protein, 185 aa, Homo sapiens
MALRHLALLAGLLVGVASKSMENTAQLPECCVDVVGVNASCPGASLCGPGCYRRWNADGSASCVRCGNGTLPAYNGSECRSFAGPGAPFPMNRSSGTPGRPHPGAPRVAASLFLGTFFISSGLILSVAGFFYLKRSSKLPRACYRRNKGPAPAGSLPGRWSSQQFGPQAPALQPGEAVSNPHHPG

SEQ ID NO: 10931 - protein, 333 aa, Homo sapiens
MLLLPFQLLAVLFPGGNSEHAFQGPTSFHVIQTSSFTNSTWAQTQGSGWLDDLQIHGWDSDSGTAIFLKPWSKGNFSDKEVAELEEIFRVYIFGFAREVQDFAGDFQMKYPFEIQGIAGCELHSGGAIVSFLRGALGGLDFLSVKNASCVPSPEGGSRAQKFCALIIQYQGIMETVRILLYETCPRYLLGVLNAGKADLQRQVKPEAWLSSGPSPGPGRLQLVCHVSGFYPKPVWVMWMRGEQEQQGTQLGDILPNANWTWYLRATLDVADGEAAGLSCRVKHSSLEGQDIILYWRNPTSIGSIVLAIIVPSLLLLLCLALWYMRRRSYQNIP

SEQ ID NO: 10932 - protein, 557 aa, Homo sapiens
MMVVLLGATTLVLVAVGPWVLSAAAGGKNLKSPQKVEVDIIDDNFILRWNRSDESVGNVTFSFDYQKTGMDNWIKLSGCQNITSTKCNFSSLKLNVYEEIKLRIRAEKENTSSWYEVDSFTPFRKAQIGPPEVHLEAEDKAIVIHISPGTKDSVMWALDGLSFTYSLLIWKNSSGVEERIENIYSRHKIYKLSPETTYCLKVKAALLTSWKIGVYSPVHCIKTTVENELPPPENIEVSVQNQNYVLKWDYTYANMTFQVQWLHAFLKRNPGNHLYKWKQIPDCENVKTTQCVFPQNVFQKGIYLLRVQASDGNNTSFWSEEIKFDTEIQAFLLPPVFNIRSLSDSFHIYIGAPKQSGNTPVIQDYPLIYEIIFWENTSNAERKIIEKKTDVTVPNLKPLTVYCVKARAHTMDEKLNKSSVFSDAVCEKTKPGNTSKIWLIVGICIALFALPFVIYAAKVFLRCINYVFFPSLKPSSSIDEYFSEQPLKNLLLSTSEEQIEKCFIIENISTIATVEETNQTDEDHKKYSSQTSQDSGNYSNEDESESKTSEELQQDFV

SEQ ID NO: 10933 - protein, 359 aa, Homo sapiens
MAEAITYADLRFVKAPLKKSISSRLGQDPGADDDGEITYENVQVPAVLGVPSSLASSVLGDKAAVKSEQPTASWRAVTSPAVGRILPCRTTCLRYLLLGLLLTCLLLGVTAICLGVRYLQVSQQLQQTNRVLEVTNSSLRQQLRLKITQLGQSAEDLQGSRRELAQSQEALQVEQRAHQAAEGQLQACQADRQKTKETLQSEEQQRRALEQKLSNMENRLKPFFTCGSADTCCPSGWIMHQKSCFYISLTSKNWQESQKQCETLSSKLATFSEIYPQSHSYYFLNSLLPNGGSGNSYWTGLSSNKDWKLTDDTQRTRTYAQSSKCNKVHKTWSWWTLESESCRSSLPYICEMTAFRFPD

SEQ ID NO: 10934 - protein, 742 aa, Homo sapiens
MEEGFRDRAAFIRGAKDIAKEVKKHAAKKVVKGLDRVQDEYSRRSYSRFEEEDDDDDFPAPSDGYYRGEGTQDEEEGGASSDATEGHDEDDEIYEGEYQGIPRAESGGKGERMADGAPLAGVRGGLSDGEGPPGGRGEAQRRKEREELAQQYEAILRECGHGRFQWTLYFVLGLALMADGVEVFVVGFVLPSAEKDMCLSDSNKGMLGLIVYLGMMVGAFLWGGLADRLGRRQCLLISLSVNSVFAFFSSFVQGYGTFLFCRLLSGVGIGGSIPIVFSYFSEFLAQEKRGEHLSWLCMFWMIGGVYAAAMAWAIIPHYGWSFQMGSAYQFHSWRVFVLVCAFPSVFAIGALTTQPESPRFFLENGKHDEAWMVLKQVHDTNMRAKGHPERVFSVTHIKTIHQEDELIEIQSDTGTWYQRWGVRALSLGGQVWGNFLSCFGPEYRRITLMMMGVWFTMSFSYYGLTVWFPDMIRHLQAVDYASRTKVFPGERVEHVTFNFTLENQIHRGGQYFNDKFIGLRLKSVSFEDSLFEECYFEDVTSSNTFFRNCTFINTVFYNTDLFEYKFVNSRLINSTFLHNKEGCPLDVTGTGEGAYMVYFVSFLGTLAVLPGNIVSALLMDKIGRLRMLAGSSVMSCVSCFFLSFGNSESAMIALLCLFGGVSIASWNALDVLTVELYPSDKRTTAFGFLNALCKLAAVLGISIFTSFVGITKAAPILFASAALALGSSLALKLPETRGQVLQ

SEQ ID NO: 10935 - protein, 389 aa, Homo sapiens
MPTSSSSNAAERQRRFMKICPFSSKSSIVLALKFRSLIHFEKYPQPKGQKKKKIVKYGMGGLIILFLIAIIWFPLLFMSLVRSVVGVVNQPIDVTVTLKLGGYEPLFTMSAQQPSIIPFTAQAYEELSRQFDPQPLAMQFISQYSPEDIVTAQIEGSSGALWRISPPSRAQMKRELYNGTADITLRFTWNFQRDLAKGGTVEYANEKHMLALAPNSTARRQLASLLEGTSDQSVVIPNLFPKYIRAPNGPEANPVKQLQPNEEADYLGVRIQLRREQGAGATGFLEWWVIELQECRTDCNLLPMVIFSDKHHGAVRVHRAGHRQVRARILQRDLALHYVRGAAVRGPHPQALPGHLPGAGDSGAGAGGGVVRQAHLPLPLTGDHDQVDS

SEQ ID NO: 10936 - protein, 722 aa, Homo sapiens
MPLHQLGDKPLTFPSPNSAMENGLDHTPPSRRASPGTPLSPGSLRSAAHSPLDTSKQPLCQLWAEKHGARGTHEVRYVSAGQSVACGWWAFAPPCLQVLNTPKGILFFLCAAAFLQGMTVNGFINTVITSLERRYDLHSYQSGLIASSYDIAACLCLTFVSYFGGSGHKPRWLGWGVLLMGTGSLVFALPHFTAGRYEVELDAGVRTCPANPGAVCADSTSGLSRYQLVFMLGQFLHGVGATPLYTLGVTYLDENVKSSCSPVYIAIFYTAAILGPAAGYLIGGALLNIYTEMGRRTELTTESPLWVGAWWVGFLGSGAAAFFTAVPILGYPRQLPGSQRYAVMRAAEMHQLKDSSRGEASNPDFGKTIRDLPLSIWLLLKNPTFILLCLAGATEATLITGMSTFSPKFLESQFSLSASEAATLFGYLVVPAGGGGTFLGGFFVNKLRLRGSAVIKFCLFCTVVSLLGILVFSLHCPSVPMAGVTASYGGSLLPEGHLNLTAPCNAACSCQPEHYSPVCGSDGLMYFSLCHAGCPAATETNVDGQKVYRDCSCIPQNLSSGFGHATAGKCTTTALCAARTASCTSHCATQGALQPRRRMWTARRCVRDPQRSFALGIQWIVVRILGGIPGPIAFGWVIDKACLLWQDQCGQQGSCLVYQNSAMSRYILIMGLLYKVLGVLFFAIACFLYKPLSESSDGLETCLPSQSSAPDSATDSQLQSSV

SEQ ID NO: 10937 - protein, 583 aa, Homo sapiens
MPLHQLGDKPLTFPSPNSAMENGLDHTPPSRRASPGTPLSPGSLRSAAHSPLDTSKQPLCQLWAEKHGARGTHEVRYVSAGQSVACGWWAFAPPCLQVLNTPKGILFFLCAAAFLQGMTVNGFINTVITSLERRYDLHSYQSGLIASSYDIAACLCLTFVSYFGGSGHKPRWLGWGVLLMGTGSLVFALPHFTAGRYEVELDAGVRTCPANPGAVCADSTSGLSRYQLVFMLGQFLHGVGATPLYTLGVLFFAIACFLYKPLSESQFSLSASEAATLFGYLVVPAGGGGTFLGGFFVNKLRLRGSAVIKFCLFCTVVSLLGILVFSLHCPSVPMAGVTASYGGSLLPEGHLNLTAPCNAACSCQPEHYSPVCGSDGLMYFSLCHAGCPAATETNVDGQKVYRDCSCIPQNLSSGFGHATAGKCTSTCQRKPLLLVFIFVVIFFTFLSSIPALTATLRCVRDPQRSFALGIQWIVVRILGGIPGPIAFGWVIDKACLLWQDQCGQQGSCLVYQNSAMSRYILIMGLLYKVLGVLFFAIASSRAASDHRPRPPGHGGHSAFPDDRTVPLGDAITRELLFDLQPST

SEQ ID NO: 10938 - protein, 722 aa, Homo sapiens
MPLHQLGDKPLTFPSPNSAMENGLDHTPPSRRASPGTPLSPGSLRSAAHSPLDTSKQPLCQLWAEKHGARGTHEVRYVSAGQSVACGWWAFAPPCLQVLNTPKGILFFLCAAAFLQGMTVNGFINTVITSLERRYDLHSYQSGLIASSYDIAACLCLTFVSYFGGSGHKPRWLGWGVLLMGTGSLVFALPHFTAGRYEVELDAGVRTCPANPGAVCADSTSGLSRYQLVFMLGQFLHGVGATPLYTLGVTYLDENVKSSCSPVYIAIFYTAAILGPAAGYLIGGALLNIYTEMGRRTELTTESPLWVGAWWVGFLGSGAAAFFTAVPILGYPRQLPGSQRYAVMRAAEMHQLKDSSRGEASNPDFGKTIRDLPLSIWLLLKNPTFILLCLAGATEATLITGMSTFSPKFLESQFSLSASEAATLFGYLVVPAGGGGTFLGGFFVNKLRLRGSAVIKFCLFCTVVSLLGILVFSLHCPSVPMAGVTASYGGSLLPEGHLNLTAPCNAACSCQPEHYSPVCGSDGLMYFSLCHAGCPAATETNVDGQKVYRDCSCIPQNLSSGFGHATAGKCTSTCQRKPLLLVFIFVVIFFTFLSSIPALTATLRCVRDPQRSFALGIQWIVVRILGGIPGPIAFGWVIDKACLLWQDQCGQQGSCLVYQNSAMSRYILIMGLLYKVLGVLFFAIACFLYKPLSESSDGLETCLPSQSSAPDSATDSQLQSSV

SEQ ID NO: 10939 - protein, 122 aa, Homo sapiens
MANCEFSPVSGDKPCCRLSRRAQLCLGVSILVLILVVVLAVVVPRWRQTWSGPGTTKRFPETVLARCVKYTEIHPEMRHVDCQSVWDAFKGAFISKHPCNITEEDYQPLMKLGTQTVPCNKK

SEQ ID NO: 10940 - protein, 199 aa, Homo sapiens
MSSENCFVAENSSLHPESGQENDATSPHFSTRHEGSFQVPVLCAVMNVVFITILIIALIALSVGQYNCPGQYTFSMPSDSHVSSCSEDWVGYQRKCYFISTVKRSWTSAQNACSEHGATLAVIDSEKDMNFLKRYAGREEHWVGLKKEPGHPWKWSNGKEFNNWFNVTGSDKCVFLKNTEVSSMECEKNLYWICNKPYK

SEQ ID NO: 10941 - protein, 253 aa, Homo sapiens [sequence omitted]

SEQ ID NO: 10942 - protein, 253 aa, Homo sapiens
MGEFNEKKTTCGTVCLKYLLFTYNCCFWLAGLAVMAVGIWTLALKSDYISLLASGTYLATAYILVVAGTVVMVTGVLGCCATFKERRNLLRLYFILLLIIFLLEIIAGILAYAYYQQLNTELKENLKDTMTKRYHQPGHEAVTSAVDQLQQEFHCCGSNNSQDWRDSEWIRSQEAGGRVVPDSCCKTVVALCGQRDHASNIYKVEGGCITKLETFIQEHLRVIGAVGIGIACVQVFGMIFTCCLYRSLKLEHY

SEQ ID NO: 10943 - protein, 552 aa, Homo sapiens
MAALAPVGSPASRGPRLAAGLRLLPMLGLLQLLAEPGLGRVHHLALKDDVRHKVHLNTFGFFKDGYMVVNVSSLSLNEPEDKDVTIGFSLDRTKNDGFSSYLDEDVNYCILKKQSVSVTLLILDISRSEVRVKSPPEAGTQLPKIIFSRDEKVLGQSQEPNVNPASAGNQTQKTQDGGKSKRSTVDSKAMGEKSFSVHNNGGAVSFQFFFNISTDDQEGLYSLYFHKCLGKELPSDKFTFSLDIEITEKNPDSYLSAGEIPLPKLYISMAFFFFLSGTIWIHILRKRRNDVFKIHWLMAALPFTKSLSLVFHAIDYHYISSQGFPIEGWAVVYYITHLLKGALLFITIALIGTGWAFIKHILSDKDKKIFMIVIPLQVLANVAYIIIESTEEGTTEYGLWKDSLFLVDLLCCGAILFPVVWSIRHLQEASATDGKAAINLAKLKLFRHYYVLIVCYIYFTRIIAFLLKLAVPFQWKWLYQLLDETATLVFFVLTGYKFRPASDNPYLQLSQEEEDLEMESVVTTSGVMESMKKVKKVTNGSVEPQGEWEGAV

SEQ ID NO: 10944 - protein, 300 aa, Homo sapiens
MAALAPVGSPASRGPRLAAGLRLLPMLGLLQLLAEPGLGRVHHLALKDDVRHKVHLNTFGFFKDGYMVVNVSSLSLNEPEDKDVTIGFSLDRTKNDGFSSYLDEDVNYCILKKQSVSVTLLILDISRSEVRVKSPPEAGTQLPKIIFSRDEKVLGQSQEPNVNPASAGNQTQKTQDGGKSKRSTVDSKAMGEKSFSVHNNGGAVSFQFFFNISTDDQEGLYSLYFHKCLGKELPSDKFTFSLDIEITEKDPDSYLSAGEIPLPKLYISMAFFFFLSGTIWIHILRKRRNDVFKIHWLGFH

SEQ ID NO: 10945 - protein, 1446 aa, Homo sapiens
MARAQALVLALTFQLCAPETETPAAGCTFEEASDPAVPCEYSQAQYDDFQWEQVRIHPGTRAPADLPHGSYLMVNTSQHAPGQRAHVIFQSLSENDTHCVQFSYFLYSRDGHRPGTLGVYVRVNGGPLGSAVWNMTGSHGRQWHQAELAVSTFWPNEYQVLFEALISPDRRGYMGLDDILLLSYPCAKAPHFSRLGDVEVNAGQNASFQCMAAGRAAMRQRFLLQRQSGALVPAAGVRHISHRRFLATFPLAAVSRAEQDLYRCVSQAPRGAGVSNFAELIVKEPPTPIAPPQLLRAGPTYLIIQLNTNSIIGDGPIVRKEIEYRMARGPWAEVHAVSLQTYKLWHLDPDTEYEISVLLTRPGDGGTGRPGPPLISRTKCAEPMRAPKGLAFAEIQARQLTLQWEPLGYNVTRCHTYTVSLCYHYTLGSSHNQTIRECVKTEQGVSRYTIKNLLPYRNVHVRLVLTNPEGRKEGKEVTFQTDEDVPSGIAAESLTFTPLEDMIFLKWEEPQEPNGLITQYEISYQSIESSDPAVNVPGPRRTISKLRNETYHVFSNLHPGTTYLFSVRARTGKGFGQAALTEITTNISAPSFDYADMPSPLGESENTITVLLRPAQGRGAPISVYQVIVEEERARRLRRERGGQDCFPVPLTFEAALARGLVHYFGAELAASSLPEAMPFTVGDNQTYRGFWNPPLEPRKAYLIYFQAASHLKGETRLNCIRIARKAACKESKRPLEVSQRSEEMGLILGICAGGLAVLILLLGAIIVIIRKGRDHYAYSYYPKPVNMTKATVNYRQEKTHMMSAVDRSFTDQSTLQEDERLGLSFMDTHGYSTRGDQRSGGVTEASSLLGGSPRRPCGRKGSPYHTGQLHPAVRVADLLQHINQMKTAEGYGFKQEYESFFEGWDATKKKDKVKGSRQEPMPAYDRHRVKLHPMLGDPNADYINANYIDGYHRSNHFIATQGPKPEMVYDFWRMVWQEHCSSIVMITKLVEVGRVKCSRYWPEDSDTYGDIKIMLVKTETLAEYVVRTFALERRGYSARHEVRQFHFTAWPEHGVPYHATGLLAFIRRVKASTPPDAGPIVIHCSAGTGRTGCYIVLDVMLDMAECEGVVDIYNCVKTLCSRRVNMIQTEEQYIFIHDAILEACLCGETTIPVSEFKATYKEMIRIDPQSNSSQLREEFQTLNSVTPPLDVEECSIALLPRNRDKNRSMDVLPPDRCLPFLISTDGDSNNYINAALTDSYTRSAAFIVTLHPLQSTTPDFWRLVYDYGCTSIVMLNQLNQSNSAWPCLQYWPEPGRQQYGLMEVEFMSGTADEDLVARVFRVQNISRLQEGHLLVRHFQFLRWSAYRDTPDSKKAFLHLLAEVDKWQAESGDGRTIVHCLNGGGRSGTFCACATVLEMIRCHNLVDVFFAAKTLRNYKPNMVETMDQYHFCYDVALEYLEGLESR

SEQ ID NO: 10946 - protein, 621 aa, Homo sapiens
  VARIANT 529: Xaa = Any Amino Acid
MLKGTAVDIDIGTTYSCVGVFQHGKVEIIANDQGNRTTPSYVAFTDTERLIGDATKNQPDMKYWPFMVVNDAGRPKVQVEYKGETKSFYPEEVPSMVLTKMKEIAEAYLGNMVTNAVVTVPAYFNDPQHQATKYARTIAGLNVLRSISEPTVAATAYSLDKKVGAERNVLTFDLRGGTFDVSILTIEDGIFEVRSTAGDTHLGGEDFDNRIVNHFIAEFKSKHKKDISENKRAVRCLHTAYEHAKCTLSSSIQASIGIDSLYEGINFYMSIACARFEELNADLFHSTLDPIEKALQDAKLDKSKIHDIVLFGGSTHIPKIQKLLQDFINGKEPNKSINPDEALAYGAAVQAAILSGDKSENVQELLLLDVSPLSLGIETAGGVTTVFIKRNTTIPTKQTQTFTTYSGNQPGVLIQQVYEGERATTKDNNLRGKCELTGIPPAPRGVPQIEVTFDIDANGILNVSSVDKSTGKENKITITNDKGHLSKEDIECMVQEAEKYKAEDEKQRDEVSSKNSLESYAFNKKATVXDEKLQGKINDEDKQKILDKCNKTISWLDKNQTVEKEEFEHQQEELEKVCNSIITQVYQTAGGVPGRMPGGFPDGGAPPSDGASSGPTIEEVD

SEQ ID NO: 10947 - protein, 641 aa, Homo sapiens
MATAKGIAIGIDLGTTYSCVGVFQHGKVEIIANDQGNRTTPSYVAFTDTERLIGDAAKNQVAMNPQNTVFDAKRLIGRKFNDPVVQADMKLWPFQVINEGGKPKVLVSYKGENKAFYPEEISSMVLTKLKETAEAFLGHPVTNAVITVPAYFNDSQRQATKDAGVIAGLNVLRIINEPTAAAIAYGLDKGGQGERHVLIFDLGGGTFDVSILTIDDGIFEVKATAGDTHLGGEDFDNRLVSHFVEEFKRKHKKDISQNKRAVRRLRTACERAKRTLSSSTQANLEIDSLYEGIDFYTSITRARFEELCADLFRGTLEPVEKALRDAKMDKAKIHDIVLVGGSTRIPKVQRLLQDYFNGRDLNKSINPDEAVAYGAAVQAAILMGDKSEKVQDLLLLDVAPLSLGLETAGGVMTALIKRNSTIPTKQTQIFTTYSDNQPGVLIQVYEGERAMTKDNNLLGRFDLTGIPPAPRGVPQIEVTFDIDANGILNVTATDKSTGKVNKITITNDKGRLSKEEIERMVLDAEKYKAEDEVQREKIAAKNALESYAFNMKSVVSDEGLKGKISESDKNKILDKCNELLSWLEVNQLAEKDEFDHKRKELEQMCNPIITKLYQGGCTGPACGTGYVPGRPATGPTIEEVD

SEQ ID NO: 10948 - protein, 646 aa, Homo sapiens
MSKGPAVGIDLGTTYSCVGVFQHGKVEIIANDQGNRTTPSYVAFTDTERLIGDAAKNQVAMNPTNTVFDAKRLIGRRFDDAVVQSDMKHWPFMVVNDAGRPKVQVEYKGETKSFYPEEVSSMVLTKMKEIAEAYLGKTVTNAVVTVPAYFNDSQRQATKDAGTIAGLNVLRIINEPTAAAIAYGLDKKVGAERNVLIFDLGGGTFDVSILTIEDGIFEVKSTAGDTHLGGEDFDNRMVNHFIAEFKRKHKKDISENKRAVRRLRTACERAKRTLSSSTQASIEIDSLYEGIDFYTSITRARFEELNADLFRGTLDPVEKALRDAKLDKSQIHDIVLVGGSTRIPKIQKLLQDFFNGKELNKSINPDEAVAYGAAVQAAILSGDKSENVQDLLLLDVTPLSLGIETAGGVMTVLIKRNTTIPTKQTQTFTTYSDNQPGVLIQVYEGERAMTKDNNLLGKFELTGIPPAPRGVPQIEVTFDIDANGILNVSAVDKSTGKENKITITNDKGRLSKEDIERMVQEAEKYKAEDEKQRDKVSSKNSLESYAFNMKATVEDEKLQGKINDEDKQKILDKCNEIINWLDKNQTAEKEEFEHQQKELEKVCNPIITKLYQSAGGMPGGMPGGFPGGGAPPSGGASSGPTIEEVD

SEQ ID NO: 10949 - protein, 497 aa, Homo sapiens
MSKGPAVGIDLGTTYSCVGVFQHGKVEIIANDQGNRTTPSYVAFTDTERLIGDAAKNQVAMNPTNTVFDAKRLIGRRFDDAVVQSDMKHWPFMVVNDAGRPKVQVEYKGETKSFYPEEVSSMVLTKMKEIAEAYLGKTVTNAVVTVPAYFNDSQRQATKDAGTIAGLNVLRIINEPTAAAIAYGLDKKVGAERNVLIFDLGGGTFDVSILTIEDGIFEVKSTAGDTHLGGEDFDNRMVNHFIAEFKRKHKKDISENKRAVRRLRTACERAKRTLSSSTQASIEIDSLYEGIDFYTSITRARFEELNADLFRGTLDPVEKALRDAKLDKSQIHDIVLVGGSTRIPKIQKLLQDFFNGKELNKSINPDEAVAYGAAVQAAILSGDKSENVQDLLLLDVTPLSLGIETAGGVMTVLIKRNTTIPTKQTQTFTTYSDNQPGVLIQVYEGERAMTKDNNLLGKFELTGIPPAPRGGMPGGFPGGGAPPSGGASSGPTIEEVD

SEQ ID NO: 10950 - protein, 639 aa, Homo sapiens
MSARGPAIGIDLGTTYSCVGVFQHGKVEIIANDQGNRTTPSYVAFTDTERLIGDAAKNQVAMNPTNTIFDAKRLIGRKFEDATVQSDMKHWPFRVVSEGGKPKVQVEYKGETKTFFPEEISSMVLTKMKEIAEAYLGGKVHSAVITVPAYFNDSQRQATKDAGTITGLNVLRIINEPTAAAIAYGLDKKGCAGGEKNVLIFDLGGGTFDVSILTIEDGIFEVKSTAGDTHLGGEDFDNRMVSHLAEEFKRKHKKDIGPNKRAVRRLRTACERAKRTLSSSTQASIEIDSLYEGVDFYTSITRARFEELNADLFRGTLEPVEKALRDAKLDKGQIQEIVLVGGSTRIPKIQKLLQDFFNGKELNKSINPDEAVAYGAAVQAAILIGDKSENVQDLLLLDVTPLSLGIETAGGVMTPLIKRNTTIPTKQTQTFTTYSDNQSSVLVQVYEGERAMTKDNNLLGKFDLTGIPPAPRGVPQIEVTFDIDANGILNVTAADKSTGKENKITITNDKGRLSKDDIDRMVQEAERYKSEDEANRDRVAAKNALESYTYNIKQTVEDEKLRGKISEQDKNKILDKCQEVINWLDRNQMAEKDEYEHKQKELERVCNPIISKLYQGGPGGGSGGGGSGASGGPTIEEVD

SEQ ID NO: 10951 - protein, 1952 aa, Homo sapiens
MPALGPALLQALWAGWVLTLQPLPPTAFTPNGTYLQHLARDPTSGTLYLGATNFLFQLSPGLQLEATVSTGPVLDSRDCLPPVMPDECPQAQPTNNPNQLLLVSPGALVVCGSVHQGVCEQRRLGQLEQLLLRPERPGDTQYVAANDPAVSTVGLVAQGLAGEPLLFVGRGYTSRGVGGGIPPITTRALWPPDPQAAFSYEETAKLAVGRLSEYSHHFVSAFARGASAYFLFLRRDLQAQSRAFRAYVSRVCLRDQHYYSYVELPLACEGGRYGLIQAAAVATSREVAHGEVLFAAFSSAAPPTVGRPPSAAAGASGASALCAFPLDEVDRLANRTRDACYTREGRAEDGTEVAYIEYDVNSDCAQLPVDTLDAYPCGSDHTPSPMASRVPLEATPILEWPGIQLTAVAVTMEDGHTIAFLGDSQGQLHRVYLGPGSDGHPYSTQSIQQGSAVSRDLTFDGTFEHLYVMTQSTLLKVPVASCAQHLDCASCLAHRDPYCGWCVLLGRCSRRSECSRGQGPEQWLWSFQPELGCLQVAAMSPANISREETREVFLSVPDLPPLWPGESYSCHFGEHQSPALLTGSGVMCPSPDPSEAPVLPRGADYVSVSVELRFGAVVIAKTSLSFYDCVAVTELRPSAQCQACVSSRWGCNWCVWQHLCTHKASCDAGPMVASHQSPLVSPDPPARGDGDSAELEGPPAPLILPSSLDYQYDTPGLWELEEATLGASSCPCVESVQGSTLMPVHVEREIRLLGRNLHLFQDGPGDNECVMELEGLEVVVEARVECEPPPDTQCHVTCQQHQLSYEALQPELRVGLFLRRAGRLRVDSAEGLHVVLYDCSVGHGDCSRCQTAMPQYGCVWCEGERPRCVTREACGEAEAVATQCPAPLIHSVEPLTGPVDGGTRVTIRGSNLGQHVQDVLGMVTVAGVPCAVDAQEYEVSSSLVCITGASGEEVAGATAVEVPGRGRGVSEHDFAYQDPKVHSIFPARGPRAGGTRLTLNGSKLLTGRLEDIRVVVGDQPCHLLPEQQSEQLRCETSPRPTPATLPVAVWFGATERRLQRGQFKYTLDPNITSAGPTKSFLSGGREICVRGQNLDVVQTPRIRVTVVSRMLQPSQGLGRRRRVVPETACSLGPSCSSQQFEEPCHVNSSQLITCRTPALPGLPEDPWVRVEFILDNLVFDFATLNPTPFSYEADPTLQPLNPEDPTMPFRHKPGSVFSVEGENLDLAMSKEEVVAMIGDGPCVVKTLTRHHLYCEPPVEQPLPRHHALREAPDSLPEFTVQMGNLRFSLGHVQYDGESPGAFPVAAQVGLGVGTSLLALGVIIIVLMYRRKSKQALRDYKKVQIQLENLESSVRDRCKKEFTDLMTEMTDLTSDLLGSGIPFLDYKVYAERIFFPGHRESPLHRDLGVPESRRPTVEQGLGQLSNLLNSKLFLTKFIHTLESQRTFSARDRAYVASLLTVALHGKLEYFTDILRTLLSDLVAQYVAKNPKLMLRRTETVVEKLLTNWMSICLYTFVRDSVGEPLYMLFRGIKHQVDKGPVDSVTGKAKYTLNDNRLLREDVEYRPLTLNALLAVGPGAGEAQGVPVKVLDCDTISQAKEKMLDQLYKGVPLTQRPDPRTLDVEWRSGVAGHLILSDEDVTSEVQGLWRRLNTLQHYKVPDGATVALVPCLTKHVLRENQDYVPGERTPMLEDVDEGGIRPWHLVKPSDEPEPPRPRRGSLRGGERERAKAIPEIYLTRLLSMKGTLQKFVDDLFQVILSTSRPVPLAVKYFFDLLDEQAQQHGISDQDTIHIWKTNSLPLRFWINIIKNPQFVFDVQTSDNMDAVLLVIAQTFMDACTLADHKLGRDSPINKLLYARDIPRYKRMVERYYADIRQTVPASDQEMNSVLAELSWNYSGDLGARVALHELYKYINKYYDQIITALEEDGTAQKMQLGYRLQQIAAAVENKVTDL

SEQ ID NO: 10952 - protein, 2135 aa, Homo sapiens
MPALGPALLQALWAGWVLTLQPLPPTAFTPNGTYLQHLARDPTSGTLYLGATNFLFQLSPGLQLEATVSTGPVLDSRDCLPPVMPDECPQAQPTNNPNQLLLVSPGALVVCGSVHQGVCEQRRLGQLEQLLLRPERPGDTQYVAANDPAVSTVGLVAQGLAGEPLLFVGRGYTSRGVGGGIPPITTRALWPPDPQAAFSYEETAKLAVGRLSEYSHHFVSAFARGASAYFLFLRRDLQAQSRAFRAYVSRVCLRDQHYYSYVELPLACEGGRYGLIQAAAVATSREVAHGEVLFAAFSSAAPPTVGRPPSAAAGASGASALCAFPLDEVDRLANRTRDACYTREGRAEDGTEVAYIEYDVNSDCAQLPVDTLDAYPCGSDHTPSPMASRVPLEATPILEWPGIQLTAVAVTMEDGHTIAFLGDSQGQLHRVYLGPGSDGHPYSTQSIQQGSAVSRDLTFDGTFEHLYVMTQSTLLKVPVASCAQHLDCASCLAHRDPYCGWCVLLGRCSRRSECSRGQGPEQWLWSFQPELGCLQVAAMSPANISREETREVFLSVPDLPPLWPGESYSCHFGEHQSPALLTGSGVMCPSPDPSEAPVLPRGADYVSVSVELRFGAVVIAKTSLSFYDCVAVTELRPSAQCQACVSSRWGCNWCVWQHLCTHKASCDAGPMVASHQSPLVSPDPPARGGPSPSPPTAPKALATPAPDTLPVEPGAPSTATASDISPGASPSLLSPWGPWAGSGSISSPGSTGSPLHEEPSPPSPQNGPGTAVPAPTDFRPSATPEDLLASPLSPSEVAAVPPADPGPEALHPTVPLDLPPATVPATTFPGAMGSVKPALDWLTREGGELPEADEWTGGDAPAFSTSTLLSGDGDSAELEGPPAPLILPSSLDYQYDTPGLWELEEATLGASSCPCVESVQGSTLMPVHVEREIRLLGRNLHLFQDGPGDNECVMELEGLEVVVEARVECEPPPDTQCHVTCQQHQLSYEALQPELRVGLFLRRAGRLRVDSAEGLHVVLYDCSVGHGDCSRCQTAMPQYGCVWCEGERPRCVTREACGEAEAVATQCPAPLIHSVEPLTGPVDGGTRVTIRGSNLGQHVQDVLGMVTVAGVPCAVDAQEYEVSSSLVCITGASGEEVAGATAVEVPGRGRGVSEHDFAYQDPKVHSIFPARGPRAGGTRLTLNGSKLLTGRLEDIRVVVGDQPCHLLPEQQSEQLRCETSPRPTPATLPVAVWFGATERRLQRGQFKYTLDPNITSAGPTKSFLSGGREICVRGQNLDVVQTPRIRVTVVSRMLQPSQGLGRRRRVVPETACSLGPSCSSQQFEEPCHVNSSQLITCRTPALPGLPEDPWVRVEFILDNLVFDFATLNPTPFSYEADPTLQPLNPEDPTMPFRHKPGSVFSVEGENLDLAMSKEEVVAMIGDGPCVVKTLTRHHLYCEPPVEQPLPRHHALREAPDSLPEFTVQMGNLRFSLGHVQYDGESPGAFPVAAQVGLGVGTSLLALGVIIIVLMYRRKSKQALRDYKKVQIQLENLESSVRDRCKKEFTDLMTEMTDLTSDLLGSGIPFLDYKVYAERIFFPGHRESPLHRDLGVPESRRPTVEQGLGQLSNLLNSKLFLTKFIHTLESQRTFSARDRAYVASLLTVALHGKLEYFTDILRTLLSDLVAQYVAKNPKLMLRRTETVVEKLLTNWMSICLYTFVRDSVGEPLYMLFRGIKHQVDKGPVDSVTGKAKYTLNDNRLLREDVEYRPLTLNALLAVGPGAGEAQGVPVKVLDCDTISQAKEKMLDQLYKGVPLTQRPDPRTLDVEWRSGVAGHLILSDEDVTSEVQGLWRRLNTLQHYKVPDGATVALVPCLTKHVLRENQDYVPGERTPMLEDVDEGGIRPWHLVKPSDEPEPPRPRRGSLRGGERERAKAIPEIYLTRLLSMKGTLQKFVDDLFQVILSTSRPVPLAVKYFFDLLDEQAQQHGISDQDTIHIWKTNSLPLRFWINIIKNPQFVFDVQTSDNMDAVLLVIAQTFMDACTLADHKLGRDSPINKLLYARDIPRYKRMVERYYADIRQTVPASDQEMNSVLAELSWNYSGDLGARVALHELYKYINKYYDQIITALEEDGTAQKMQLGYRLQQIAAAVENKVTDL

SEQ ID NO: 10953 - protein, 193 aa, Homo sapiens
MLQKLILYLGDPVHGVRGHSTVFLCQQQLGHHELQEQETQYFGPGTRLLVLEDLKNVFPPEVAVFEPSEAEISHTQKATLVCLATGFYPDHVELSWWVNGKEVHSGVSTDPQPLKEQPALNDSRYCLSSRLRVSATFWQNPRNHFRCQVQFYGLSENDEWTQDRAKPVTQIVSAEAWGRAGEWGLGRCLEEIR

SEQ ID NO: 10954 - protein, 225 aa, Homo sapiens [sequence omitted]

SEQ ID NO: 10955 - protein, 598 aa, Homo sapiens
MSALLSLCFVLPLAAPGHGTQGWEPCTDLRPLDILAEVVPSDGATSGIRIVQVHGARGLQLSVAAPRTMSFPASRIFSQCDLFPEEFSIVVTLRVPNLPPKRNEYLLTVVAEESDLLLLGLRLSPAQLHFLFLREDTAGAWQTRVSFRSPALVDGRWHTLVLAVSAGVFSLTTDCGLPVDIMADVPFPATLSVKGARFFVGSRRRAKGLFMGLVRQLVLLPGSDATPRLCPSRNAPLAVLSIPRVLQALTGKPEDNEVLKYPYETNIRVTLGPQPPCTEVEDAQFWFDASRKGLYLCVGNEWVSVLAAKERLDYVEEHQNLSTNSETLGIEVFRIPQVGLFVATANRKATSAVYKWTEEKFVSYQNIPTHQAQAWRHFTIGKKIFLAVANFEPDEKGQEFSVIYKWSHRKLKFTPYQSIATHSARDWEAFEVDGEHFLAVANHREGDNHNIDSVIYKWNPATRLFEANQTIATSGAYDWEFFSVGPYSFLVVANTFNGTSTKVHSHLYIRLLGSFQLFQSFPTFGAADWEVFQIGERIFLAVANSHSYDVEMQVQNDSYVINSVIYELNVTAQAFVKFQDILTCSGGRRGLHARRAEG

SEQ ID NO: 10956 - protein, 669 aa, Homo sapiens
MSALLSLCFVLPLAAPGHGTQGWEPCTDLRPLDILAEVVPSDGATSGIRIVQVHGARGLQLSVAAPRTMSFPASRIFSQCDLFPEEFSIVVTLRVPNLPPKRNEYLLTVVAEESDLLLLGLRLSPAQLHFLFLREDTAGAWQTRVSFRSPALVDGRWHTLVLAVSAGVFSLTTDCGLPVDIMADVPFPATLSVKGARFFVGSRRRAKGLFMGLVRQLVLLPGSDATPRLCPSRNAPLAVLSIPRVLQALTGKPEDNEVLKYPYETNIRVTLGPQPPCTEVEDAQFWFDASRKGLYLCVGNEWVSVLAAKERLDYVEEHQNLSTNSETLGIEVFRIPQVGLFVATANRKATSAVYKWTEEKFVSYQNIPTHQAQAWRHFTIGKKIFLAVANFEPDEKGQEFSVIYKWSHRKLKFTPYQSIATHSARDWEAFEVDGEHFLAVANHREGDNHNIDSVIYKWNPATRLFEANQTIATSGAYDWEFFSVGPYSFLVVANTFNGTSTKVHSHLYIRLLGSFQLFQSFPTFGAADWEVFQIGERIFLAVANSHSYDVEMQVQNDSYVINSVIYELNVTAQAFVKFQDILTCSALDWEFFSVGEDYFLVVANSFDGRTFSVNSIIYRWQGYEGFVAVHSLPTVGCRDWEAFSTTAGAYLIYSSAKEPLSRVLRLRTR

SEQ ID NO: 10957 - protein, 539 aa, Homo sapiens
MDCQLSILLLLSCSVLDSFGELIPQPSNEVNLLDSKTIQGELGWISYPSHGWEEISGVDEHYTPIRTYQVCNVMDHSQNNWLRTNWVPRNSAQKIYVELKFTLRDCNSIPLVLGTCKETFNLYYMESDDDHGVKFREHQFTKIDTIAADESFTQMDLGDRILKLNTEIREVGPVNKKGFYLAFQDVGACVALVSVRVYFKKCPFTVKNLAMFPDTVPMDSQSLVEVRGSCVNNSKEEDPPRMYCSTEGEWLVPIGKCSCNAGYEERGFMCQACRPGFYKALDGNMKCAKCPPHSSTQEDGSMNCRCENNYFRADKDPPSMACTRPPSSPRNVISNINETSVILDWSWPLDTGGRKDVTFNIICKKCGWNIKQCEPCSPNVRFLPRQFGLTNTTVTVTDLLAHTNYTFEIDAVNGVSELSSPPRQFAAVSITTNQAAPSPVLTIKKDRTSRNSISLSWQEPEHPNGIILDYEVKYYEKQEQETSYTILRARGTNVTISSLKPDTIYVFQIRARTAAGYGTNSRKFEFETSPDCMYYFNAV

SEQ ID NO: 10958 - protein, 983 aa, Homo sapiens
MDCQLSILLLLSCSVLDSFGELIPQPSNEVNLLDSKTIQGELGWISYPSHGWEEISGVDEHYTPIRTYQVCNVMDHSQNNWLRTNWVPRNSAQKIYVELKFTLRDCNSIPLVLGTCKETFNLYYMESDDDHGVKFREHQFTKIDTIAADESFTQMDLGDRILKLNTEIREVGPVNKKGFYLAFQDVGACVALVSVRVYFKKCPFTVKNLAMFPDTVPMDSQSLVEVRGSCVNNSKEEDPPRMYCSTEGEWLVPIGKCSCNAGYEERGFMCQACRPGFYKALDGNMKCAKCPPHSSTQEDGSMNCRCENNYFRADKDPPSMACTRPPSSPRNVISNINETSVILDWSWPLDTGGRKDVTFNIICKKCGWNIKQCEPCSPNVRFLPRQFGLTNTTVTVTDLLAHTNYTFEIDAVNGVSELSSPPRQFAAVSITTNQAAPSPVLTIKKDRTSRNSISLSWQEPEHPNGIILDYEVKYYEKQEQETSYTILRARGTNVTISSLKPDTIYVFQIRARTAAGYGTNSRKFEFETSPDSFSISGESSQVVMIAISAAVAIILLTVVIYVLIGRFCGYKSKHGADEKRLHFGNGHLKLPGLRTYVDPHTYEDPTQAVHEFAKELDATNISIDKVVGAGEFGEVCSGRLKLPSKKEISVAIKTLKVGYTEKQRRDFLGEASIMGQFDHPNIIRLEGVVTKSKPVMIVTEYMENGSLDSFLRKHDAQFTVIQLVGMLRGIASGMKYLSDMGYVHRDLAARNILINSNLVCKVSDFGLSRVLEDDPEAAYTTRGGKIPIRWTSPEAIAYRKFTSASDVWSYGIVLWEVMSYGERPYWEMSNQDVIKAVDEGYRLPPPMDCPAALYQLMLDCWQKDRNNRPKFEQIVSILDKLIRNPGSLKIITSAAARPSNLLLDQSNVDISTFRTTGDWLNGVRTAHCKEIFTGVEYSSCDTIAKISTDDMKKVGVTVVGPQKKIISSIKALETQSKNGPVPV

SEQ ID NO: 10959 - protein, 1177 aa, Homo sapiens
MSASDFLALSKGKENRRVRAVNEPKSRPPGKTLPGTVPACKELFLPGTACLPTELAKSGTADGGARVWKPVSQYTGGPGIRPQQGSPAQAARIRRRPGPAMAGVSYAAPWWVSLLHRLPHFDLSWEATSSQFRPEDTDYQQGHGPHPRGPKDPSSPPPGSRPPPPRRPFLEGEGQPGGSPGGRGAMCSLATWTSDLRSWGQGHKVGPDPGSHVAAAGCTSSRHGQELTVMECVKPKPSLVENLFLILGQCRWEPGPSVLWPPSSRGQHCGHRGAPDLARPSCLSKPGPQHPAQAAAKMPWKLMLPISPEPSQDHSRQCGDSVPIQEAGGQTRSSVQPRSEQPWLEWQGGGIVATACGWGWRLHRAKLLIRVPVSTPQWARASSAQPRATVAHRRKIPFGQSPAADQTVPILSLNGPGRGGGAASPVERGGWATVGMPLARCPAGDRLLGIWLREVGAEARLATARSPQTAGLRPGALGAGALTWDEAAARFAEHPDTQALHARSASLTIQQASQFTYDDAECLCSLTTLQAAPRARALLLLGAAALACLALDLLFLLFYSFWLCCRRRKSEEHLDADCCCTAWCVIIATLVCSAGIAVGFYGNGETSDGIHRATYSLRHANRTVAGVQDRVWDTAVGLNHTAEPSLQTLERQLAGRPEPLRAVQRLQGLLETLLGYTAAIPFWRNTAVSLEVLAEQVDLYDWYRFACRWLGYLGLLLLDVIICLLVLVGLIRSSKGILVGVCLLGVLALVISWGALGLELAVSVGSSDFCVDPDAYVTKMVEEYSVLSGGESVSTAVSQRVPTVAGGLWGDLIKYEQRPLHVYMYTHILQYYLACSPRAANPFQQPAGLGNWGRELDKGCVDVTNSPWGYHAGDLVTWLRAFRGDLLNAPASLGLLLLLGLALKLSGSHKALVEMQDVVAELLRTVPWEQPATKEVLNGTEVNLQHLTALVDCRSLHLDYVQALTGFCYDGVEGLIYLALFSFVTALMFSSIVCSVPHTWQQKRGPDEDGEEEAAPGPRQAHDSLYRVHMPSLYSCGSSYGSETSIPAAAHTVSNAPVTEYMSQNANFQNPRCENTPLIGRESPPPSRYLAALDSGSHAGWQFKPMDSARTLWLLETFLVSQEGPRGPGELCASESGDYGDGPGALGSWVRKVQYTSSMRAKYLATSQPRPDSSGSH

SEQ ID NO: 10960 - protein, 558 aa, Homo sapiens
CGRPGGGRRVPEARAPGQQGSPAQAARIRRRPGPAMAGVSYAAPWWVSLLHRLPHFDLSWEATSSQFRPEDTDYQQALLLLGAAALACLALDLLFLLFYSFWLCCRRRKSEEHLDADCCCTAWCVIIATLVCSAGIAVGFYGNGETSDGIHRATYSLRHANRTVAGVQDRVWDTAVGLNHTAEPSLQTLERQLAGRPEPLRAVQRLQGLLETLLGYTAAIPFWRNTAVSLEVLAEQVDLYDWYRWLGYLGLLLLDVIICLLVLVGLIRSSKGILVGVCLLGVLALVISWGALGLELAVSVGSSDFCVDPDAYVTKMVEEYSVLSGDILQYYLACSPRAANPFQQKLSGSHKALVEMQDVVAELLRTVPWEQPATKDPLLRVQEVLNGTEVNLQHLTALVDCRSLHLDYVQALTGFCYDGVEGLIYLALFSFVTALMFSSIVCSVPHTWQQKRGPDEDGEEEAAPGPRQAHDSLYRVHMPSLYSCGSSYGSETSIPAAAHTVSNAPVTEYMSQNANFQNPRCENTPLIGRESPPPSYTSSMRAKYLATSQPRPDSSGSH

SEQ ID NO: 10961 - protein, 866 aa, Homo sapiens
MGAARSPPSAVPGPLLGLLLLLLGVLAPGGASLRLLDHRALVCSQPGLNCTVKNSTCLDDSWIHPRNLTPSSPKDLQIQLHFAHTQQGDLFPVAHIEWTLQTDASILYLEGAELSVLQLNTNERLCVRFEFLSKLRHHHRRWRFTFSHFVVDPDQEYEVTVHHLPKPIPDGDPNHQSKNFLVPDCEHARMKVTTPCMSSGSLWDPNITVETLEAHQLRVSFTLWNESTHYQILLTSFPHMENHSCFEHMHHIPAPRPEEFHQRSNVTLTLRNLKGCCRHQVQIQPFFSSCLNDCLRHSATVSCPEMPDTPEPIPDYMPLWVYWFITGISILLVGSVILLIVCMTWRLAGPGSEKYSDDTKYTDGLPVADLIPPPLKPRKVWIIYSADHPLYVDVVLKFAQFLLTACGTEVALDLLEEQAISEAGVMTWVGRQKQEMVESNSKIIVLCSRGTRAKWQALLGRGAPVRLRCDHGKPVGDLFTAAMNMILPDFKRPACFGTYVVCYFSEVSCDGDVPDLFGAAPRYPLMDRFEEVYFRIQDLEMFQPGRMHRVGELSGDNYLRSPGGRQLRAALDRFRDWQVHCPDWFECENLYSADDQDAPSLDEEVFEEPLLPPGTGIVKRAPLVREPGSQACLAIDPLVGEEGGAAVAKLEPHLQPRGQPAPQPLHTLVLAAEEGALVAAVEPGPLADGAAVRLALAGEGEACPLLGSPGAGRNSVLFLPVDPEDSPLGSSTPMASPDLLPEDVREHLEGLMLSLFEQSLSCQAQGGCSRPAMVLTDPHTPYEEEQRQSVQSDQGYISRSSPQPPEGLTEMEEEEEEEQDPGKPALPLSPEDLESLRSLQRQLLFRQLQKNSGWDTMGSESEGPSA

SEQ ID NO: 10962 - protein, 641 aa, Homo sapiens [sequence omitted]

SEQ ID NO: 10963 - protein, 521 aa, Homo sapiens
MVAPKSHTDDWAPGPFSSKPQRSQLQIFSSVLQTSLLFLLMGLRASGKDSAPTVVSGILGGSVTLPLNISVDTEIENVIWIGPKNALAFARPKENVTIMVKSYLGRLDITKWSYSLCISNLTLNDAGSYKAQINQRNFEVTTEEEFTLFVYEQLQEPQVTMKSVKVSENFSCNITLMCSVKGAEKSVLYSWTPREPHASESNGGSILTVSRTPCDPDLPYICTAQNPVSQRSSLPVHVGQFCTDPGASRGGTTGETVVGVLGEPVTLPLALPACRDTEKVVWLFNTSIISKEREEAATADPLIKSRDPYKNRVWVSSQDCSLKISQLKIEDAGPYHAYVCSEASSVTSMTHVTLLIYRPERNTKLWIGLFLMVCLLCVGIFSWCIWKRKGRCSVPAFCSSQAEAPADTPGYEKLDTPLRQPISGRYEVFDQVTQEGAGHDPAPEGQADYDPVTPYVTEVESVVGENTVYAQVFNLQGKTPVSQKEESSATIYCSIRKPQVVPPPQQNDLEIPESPTYENFT

SEQ ID NO: 10964 - protein, 656 aa, Homo sapiens
MVAPKSHTDDWAPGPFSSKPQRSQLQIFSSVLQTSLLFLLMGLRASGKDSAPTVVSGILGGSVTLPLNISVDTEIENVIWIGPKNALAFARPKENVTIMVKSYLGRLDITKWSYSLCISNLTLNDAGSYKAQINQRNFEVTTEEEFTLFVYEQLQEPQVTMKSVKVSENFSCNITLMCSVKGAEKSVLYSWTPREPHASESNGGSILTVSRTPCDPDLPYICTAQNPVSQRSSLPVHVGQFCTDPGASRGGTTGETVVGVLGEPVTLPLALPACRDTEKVVWLFNTSIISKEREEAATADPLIKSRDPYKNRVWVSSQDCSLKISQLKIEDAGPYHAYVCSEASSVTSMTHVTLLIYRRLRKPKITWSLRHSEDGICRISLTCSVEDGGNTVMYTWTPLQKEAVVSQGESHLNVSWRSSENHPNLTCTASNPVSRSSHQFLSENICSGPERNTKLWIGLFLMVCLLCVGIFSWCIWKRKGRCSVPAFCSSQAEAPADTPEPTAGHTLYSVLSQGYEKLDTPLRPARQQPTPTSDSSSDSNLTTEEDEDRPEVHKPISGRYEVFDQVTQEGAGHDPAPEGQADYDPVTPYVTEVESVVGENTMYAQVFNLQGKTPVSQKEESSATIYCSIRKPQVVVPPPQQNDLEIPESPTYENFT

SEQ ID NO: 10965 - protein, 571 aa, Homo sapiens
MNEAIPSGKETSIELDVHHPPTVTLSIEPQTVQEGERVVFTCQATANPEILGYRWAKGGFLIEDAHESRYETNVDYSFFTEPVSCEVHNKVGSTNVSTLVNVHFAPRIVVDPKPTTTDIGSDVTLTCVWVGNPPLTLTWTKKDSNMGPRPPGSPPEAALSAQVLSNSNQLLLKSVTQADAGTYTCRAIVPRIGVAEREVPLYVNGPPIISSEAVQYAVRGDGGKVECFIGSTPPPDRIAWAWKENFLEVGTLERYTVERTNSGSGVLSTLTINNVMEADFQTHYNCTAWNSFGPGTAIIQLEEREVLPVGIIAGATIGASILLIFFFIALVFFLYRRRKGSRKDVTLRKLDIKVETVNREPLTMHSDREDDTASVSTATRVMKAIYSSFKDDVDLKQDLRCDTIDTREEYEMKDPTNGYYNVRAHEDRPSSRAVLYADYRAPGPARFDGRPSSRLSHSSGYAQLNTYSRGPASDYGPEPTPPGPAAPAGTDTTSQLSYENYEKFNSHPFPGAAGYPTYRLGYPQAPPSGLERTPYEAYDPIGKYATATRFSYTSQHSDYGQRFQQRMQTHV

SEQ ID NO: 10966 - protein, 593 aa, Homo sapiens
MGQGLKAWPRYRVVGSADAGQYNLEITDAELSDDASYECQATEAALRSRRAKLTVLNPPTVTLSIEPQTVQEGERVVFTCQATANPEILGYRWAKGGFLIEDAHESRYETNVDYSFFTEPVSCEVHNKVGSTNVSTLVNVHFAPRIVVDPKPTTTDIGSDVTLTCVWVGNPPLTLTWTKKDSNMVLSNSNQLLLKSVTQADAGTYTCRAIVPRIGVAEREVPLYVNGPPIISSEAVQYAVRGDGGKVECFIGSTPPPDRIAWAWKENFLEVGTLERYTVERTNSGSGVLSTLTINNVMEADFQTHYNCTAWNSFGPGTAIIQLEEREVLPVGIIAGATIGASILLIFFFIALVFFLYRRRKGSRKDVTLRKLDIKVETVNREPLTMHSDREDDTASVSTATRVMKAIYSSFKDDVDLKQDLRCDTIDTREEYEMKDPTNGYYNVRAHEDRPSSRAVLYADYRAPGPARFDGRPSSRLSHSSGYAQLNTYSRGPASDYGPEPTPPGPAAPAGTDTTSQLSYENYEKFNSHPFPGAAGYPTYRLGYPQAPPSGLERTPYEAYDPIGKYATATRFSYTSQHSDYGQRFQQRMQTHV

SEQ ID NO: 10967 - protein, 605 aa, Homo sapiens
MLSLLVWILTLSDTFSQGTQTRFSQEPADQTVVAGQRAVLPCVLLNYSGIVQWTKDGLALGMGQGLKAWPRYRVVGSADAGQYNLEITDAELSDDASYECQATEAALRSRRAKLTVLIPPEDTRIDGGPVILLQAGTPHNLTCRAFNAKPAATIIWFRDGTQQEGAVASTELLKDGKRETTVSQLLINPTDLDIGRVFTCRSMNEAIPSGKETSIELDVHHPPTVTLSIEPQTVQEGERVVFTCQATANPEILGYRWAKGGFLIEDAHESRYETNVDYSFFTEPVSCEVHNKVGSTNVSTLVNVHFAPRIVVDPKPTTTDIGSDVTLTCVWVGNPPLTLTWTKKDSNMVLSNSNQLLLKSVTQADAGTYTCRAIVPRIGVAEREVPLYVNGPPIISSEAVQYAVRGDGGKVECFIGSTPPPDRIAWAWKENFLEVGTLERYTVERTNSGSGVLSTLTINNVMEADFQTHYNCTAWNSFGPGTAIIQLEEREVLPVGIIAGATIGASILLIFFFIALVFFLYRRRKGSRKDVTLRKLDIKVETVNREPLTMHSDREDDTASVSTATRVMKAIYSSFKDDVDLKQDLRCDTIERPRIRGRLNTSYSD

SEQ ID NO: 10968 - protein, 134 aa, Homo sapiens
FSQQIYGVVYGNVTFHVPSNVPLKEVLWKKQKDKVAELENSEFRAFSSFKNRVYLDTVSGSLTIYNLTSSDEDEYEMESPNITDTMKFFLYVLGHSRHRYALIPIPLAVITTCIVLYMNGILKCDRKPDRTNSN

SEQ ID NO: 10969 - protein, 463 aa, Homo sapiens
METEQPEETFPNTETNGEFGKRPAEDMEEEQAFKRSRNTDEMVELRILLQSKNAGAVIGKGGKNIKALRTDYNASVSVPDSSGPERILSISADIETIGEILKKIIPTLEEGLQLPSPTATSQLPLESDAVECLNYQHYKGSDFDCELRLLIHQSLAGGIIGVKGAKIKELRENTQTTIKLFQECCPHSTDRVVLIGGKPDRVVECIKIILDLISESPIKGRAQPYDPNFYDETYDYGGFTMMFDDRRGRPVGFPMRGRGGFDRMPPGRGGRPMPPSRRDYDDMSPRRGPPPPPPGRGGRGGSRARNLPLPPPPPPRGGDLMAYDRRGRPGDRYDGMVGFSADETWDSAIDTWSPSEWQMAYEPQGGSGYDYSYAGGRGSYGDLGGPIITTQVTIPKDLAGSIIGKGGQRIKQIRHESGASIKIDEPLEGSEDRIITITGTQDQIQNAQYLLQNSVKQYSGKFF

SEQ ID NO: 10970 - protein, 464 aa, Homo sapiens
METEQPEETFPNTETNGEFGKRPAEDMEEEQAFKRSRNTDEMVELRILLQSKNAGAVIGKGGKNIKALRTDYNASVSVPDSSGPERILSISADIETIGEILKKIIPTLEEGLQLPSPTATSQLPLESDAVECLNYQHYKGSDFDCELRLLIHQSLAGGIIGVKGAKIKELRENTQTTIKLFQECCPHSTDRVVLIGGKPDRVVECIKIILDLISESPIKGRAQPYDPNFYDETYDYGGFTMMFDDRRGRPVGFPMRGRGGFDRMPPGRGGRPMPPSRRDYDDMSPRRGPPPPPPGRGGRGGSRARNLPLPPPPPPRGGDLMAYDRRGRPGDRYDGMVGFSADETWDSAIDTWSPSEWQMAYEPQGGSGYDYSYAGGRGSYGDLGGPIITTQVTIPKDLAGSIIGKGGQRIKQIRHESGASIKIDEPLEGSEDRIITITGTQDQIQNAQYLLQNSVKQYADVEGF

SEQ ID NO: 10971 - protein, 999 aa, Homo sapiens
MGPAPLPLLLGLFLPALWRRAITEAREEAKPYPLFPGPFPGSLQTDHTPLLSLPHASGYQPALMFSPTQPGRPHTGNVAIPQVTSVESKPLPPLAFKHTVGHIILSEHKGVKFNCSINVPNIYQDTTISWWKDGKELLGGHHRITQFYPDDEVTAIIASFSITSVQRSDNGSYICKMKINNEEIVSDPIYIEVQGLPHFTKQPESMNVTRNTAFNLTCQAVGPPEPVNIFWVQNSSRVNEQPEKSPGVLTVPGLTEMAVFSCEAHNDKGLTVSQGVQINIKAIPSPPTEVSIRNSTAHSILISWVPGFDGYSPFRNCSIQVKEADPLGNGSVMIFNTSALPHLYQIKQLQALANYSIGVSCMNEIGWSAVSPWILASTTEGAPSVAPLNVTVFLNESSDNVDIRWMKPPTKQQDGELVGYRISHVWQSAGISKELLEEVGQNGSRARISVQVHNATCTVRIAAVTRGGVGPFSDPVKIFIPAHGWVDYAPSSTPAPGNADPVLIIFGCFCGFILIGLILYISLAIRKRVQETKFGNAFTEEDSELVVNYIAKKSFCRRAIELTLHSLGVSEELQNKLEDVVIDRNLLILGKILGEGEFGSVMEGNLKQEDGTSLKVAVKTMKLDNSSHREIEEFLSEAACMKDFSHPNVIRLLGVCIEMSSQGIPKPMVILPFMKYGDLHTYLLYSRLETGPKHIPLQTLLKFMVDIALGMEYLSNRNFLHRDLAARNCMLRDDMTVCVADFGLSKKIYSGDYYRQGRIAKMPVKWIAIESLADRVYTSKSDVWAFGVTMWEIRTRGMTPYPGVQNHEMYDYLLHGHRLKQPEDCLDELYEIMYSCWRTDPLDRPTFSVLRLQLEKLLESLPDVRNQADVIYVNTQLLESSEGLAQGPTLAPLDLNIDPDSIIASCTPRAAISVVTAEVHDSKPHEGRYILNGGSEEWEDLTSAPSAAVTAEKNSVLPGERLVRNGVSWSHSSMLPLGSSLPDELLFADDSSEGSEVLM

SEQ ID NO: 10972 - protein, 503 aa, Homo sapiens
LQKELLEEVGQNGSRARISVQVHNATCTVRIAAVTRGGVGPFSDPVKIFIPAHVLKALTICSSLLQASVSHIFQTHDWSIGLTRLGRLCPLFNSGAWQRRSCAHHLWLLLWILIGLILYISLAIRKRVQETKFGNAFTEEDSELVVNYIAKKSFCRRAIELTLHSLGVSEELQNKLEDVVIDRNLLILGKILGEGEFGSVMEGNLKQEDGTSLKVAVKTMKLDNSSQREIEEFLSEAACMKDFSHPNVIRLLETACKFSFLKDSLSSCFLYHLAPLQTLLKFMVDIALGMEYLSNRNFLHRDLAARNCMLRDDMTVCVADFGLSKKIYSGDYYRQGRIAKMPVKWIAIESLADRVYTSKSDVWAFGVTMWEIATRGMTPYPGVQNHEMYDYLLHGHRLKQPEDCLDELFCKNKGMDCTKRWVPCWETIHFFLTFRYEIMYSCWRTDPLDRPTFSVLRLQLEKLLESLPDVRNQADVIYVNTQLLESSEGLAQHPCSTGLEHRP

SEQ ID NO: 10973 - protein, 190 aa, Homo sapiens
MKASQCCCCLSHLLASVLLLLLLPELSGPLAVLLQAAEAAPGLGPPDPRPRTLPPLPPGPTPAQQPGRGLAEAAGPRGSEGGNGSNPVAGLETDDHGGKAGEGSVGGGLAVSPNPGDKPMTQRALTVLMVVSGAVLVYFVVRTVRMRRRNRKTRRYGVLDTNIENMELTPLEQDDEDDDNTLFDANHPRR

SEQ ID NO: 10974 - protein, 518 aa, Homo sapiens
MAFWAGGSPSVVDYFPSEDFYRCGYCKNESGSRSNGMWAHSMTVQDYQDLIDRGWRRSGKYVYKPVMNQTCCPQYTIRCRPLQFQPSKSHKKVLKKMLKFLAKGEVPKGSCEDEPMDSTMDDAVAGDFALINKLDIQCDLKTLSDDIKESLESEGKNSKKEEPQELLQSQDFVGEKLGSGEPSHSVKVHTVPKPGKGADLSKPPCRKAKEIRKERKRLKLMQQNPAGELEGFQAQGHPPSLFPPKAKSNQPKSLEDLIFESLPENASHKLEVRVVRSSPPSSQFKATLLESYQVYKRYQMVIHKNPPDTPTESQFTRFLCSSPLEAETPPNGPDCGYGSFHQQYWLDGKIIAVGVIDILPNCVSSVYLYYDPDYSFLSLGVYSALREIAFTRQLHEKTSQLSYYYMGFYIHSCPKMKYKGQYRPSDLLCPETYVWVPIEQCLPSLENSKYCRFNQDPEAVDEDRSTEPDRLQVFHKRAIMPYGVYKKQQKDPSEEAAVLQYASLVGQKCSERMLLFRN

SEQ ID NO: 10975 - protein, 518 aa, Homo sapiens
MAFWAGGSPSVVDYFPSEDFYRCGYCKNESGSRSNGMWAHSMTVQDYQDLIDRGWRRSGKYVYKPVMNQTCCPQYTIRCRPLQFQPSKSHKKVLKKMLKFLAKGEVPKGSCEDEPMDSTMDDAVAGDFALINKLDIQCDLKTLSDDIKESLESEGKNSKKEEPQELLQSQDFVGEKLGSGEPSHSVKVHTVPKPGKGADLSKPPCRKAKEIRKERKRLKLMQQNPAGELEGFQAQGHPPSLFPPKAKSNQPKSLEDLIFESLPENASHKLEVRLVPVSFEDPEFKSSFSQSFSLYVKYQVAIHQDPPDECGKTEFTRFLCSSPLEAETPPNGPDCGYGSFHQQYWLDGKIIAVGVIDILPNCVSSVYLYYDPDYSFLSLGVYSALREIAFTRQLHEKTSQLSYYYMGFYIHSCPKMKYKGQYRPSDLLCPETYVWVPIEQCLPSLENSKYCRFNQDPEAVDEDRSTEPDRLQVFHKRAIMPYGVYKKQQKDPSEEAAVLQYASLVGQKCSERMLLFRN

SEQ ID NO: 10976 - protein, 465 aa, Homo sapiens
MTTGSDIGFSVIQAHDVQNPLHFGEMKVYVIEPHSMEFAPCQVEARVGQALELPLRISGLMPGGASEVVTLSDCSHFDSAVEVENQGVFQPLPGRLPPGSEHCSGVRVKAEAQGSTTLLVSYRHGHVHLSAKITIAAYLPLKAVDPSSVALVTLGSSKEMLFEGGPRPWILEPSKFFQNVTAEDTDSIGLALFAPHSSRNYQQHWILVTCQALGEQVIALSVGNKPSLTNPFPAVEPAVVKFVCAPPSRLTLAPVYTSPQLDMSCPLLQQNKQVVPVSSHRNPLLDLAAYDQEGRRFDNFSSLSIQWESTRPVLASIEPELPMQLVSQDDESGQKKLHGLQAILVHEASGTTAITATATGYQESHLSSARTKQPHDPLVPLSASIELILVEDVRVSPEEVTIYNHPGIQAELRIREGSGYFFLNTSTADVVKVAYQEARGVAMVSLGHRSPLLVFIPYLGCCVVN

SEQ ID NO: 10977 - protein, 1893 aa, Homo sapiens
MAARGRGLLLLTLSVLLAAGPSAAAAKLNIPKVLLPFTRATRVNFTLEASEGCYRWLSTRPEVASIEPLGLDEQQCSQKAVVQARLTQPARLTSIIFAEDITTGQVLRCDAIVDLIHDIQIVSTTRELYLEDSPLELKIQALDSEGNTFSTLAGLVFEWTIVKDSEADRFSDSHNALRILTFLESTYIPPSYISEMEKAAKQGDTILVSGMKTGSSKLKARIQEAVYKNVRPAEVRLLILENILLNPAYDVYLMVGTSIHYKVQKIRQGKITELSMPSDQYELQLQNSIPGPEGDPARPVAVLAQDTSMVTALQLGQSSLVLGHRNILFLGLCIRMQGASRLPNSTIYVVEPGYLGFTVHPGDRWVLETGRLYEITIEVFDKFSNKVYVSDNIRIETVLPAEFFEVLSSSQNGSYHRIRALKRGQTAIDAALTSVVDQARVHILQVPVWNQQEVEIHIPITLYPSILTFPWQPKTGAYQYTIRAHGGSGNFSWSSSSHLVATVTVKGVMTTGSDIGFSVIQAHDVQNPLHFGEMKVYVIEPHSMEFAPCQVEARVGQALELPLRISGLMPGGASEVVTLSDCSHFDLAVEVENQGVFQPLPGRLPPGSEHCSGIRVKAEAQGSTTLLVSYRHGHVHLSAKITIAAYLPLKAVDPSSVALVTLGSSKEMLFEGGPRPWILEPSKFFQNVTAEDTDSIGLALFAPHSSRNYQQHWILVTCQALGEQVIALSVGNKPSLTNPFPAVEPAVVKFVCAPPSRLTLAPVYTSPQLDMSCPLLQQNKQVVPVSSHRNPRLDLAAYDQEGRRFDNFSSLSIQWESTRPVLASIEPELPMQLVSQDDESGQKKLHGLQAILVHEASGTTAITATATGYQESHLSSARTKQPHDPLVPLSASIELILVEDVRVSPEEVTIYNHPGIQAELRIREGSGYFFLNTSTADVVKVAYQEARGVAMVHPLLPGSSTIMIHDLCLVFPAPAKAVVYVSDIQELYIRVVDKVEIGKTVKAYVRVLDLHKKPFLAKYFPFMDLKLRAASPIITLVALDEALDNYTITFLIRGVAIGQTSLTASVTNKAGQRINSAPQQIEVFPPFRLMPRKVTLLIGATMQVTSEGGPQPQSNILFSISNESVALVSAAGLVQGLAIGNGTVSGLVQAVDAETGKVVIISQDLVQVEVLLLRAVRIRAPIMRMRTGTQMPIYVTGITNHQNPFSFGNAVPGLTFHWSVTKRDVLDLRGRHHEASIRLPSQYNFAMNVLGRVKGRTGLRVVVKAVDPTSGQLYGLARELSDEIQVQVFEKLQLLNPEIEAEQILMSPNSYIKLQTNRDGAASLSYRVLDGPEKVPVVHVDEKGFLASGSMIGTSTIEVIAQEPFGANQTIIVAVKVSPVSYLRVSMSPVLHTQNKEALVAVPLGMTVTFTVHFHDNSGDVFHAHSSVLNFATNRDDFVQIGKGPTNNTCVVRTVSVGLTLLRVWDAEHPGLSDFMPLPVLQAISPELSGAMVVGDVLCLATVLTSLEGLSGTWSSSANSILHIDPKTGVAVARAVGSVTVYYEVAGHLRTYKEVVVSVPQRIMARHLHPIQTSFQEATASKVIVAVGDRSSNLRGECTPTQREVIQALHPETLISCQSQFKPAVFDFPSQDVFTVEPQFDTALGQYFCSITMHRLTDKQRKHLSMKKTALVVSASLSSSHFSTEQVGAEVPFSPGLFADQAEILLSNHYTSSEIRVFGAPEVLENLEVKSGSPAVLAFAKEKSFGWPSFITYTVGVLDPAAGSQGPLSTTLTFSSPVTNQAIAIPVTVAFVVDRRGPGPYGASLFQHFLDSYQVMFFTLFALLAGTAVMIIAYHTVCTPRDLAVPAALTPRASPGHSPHYFAASSPTSPNALPPARKASPPSGLWSPAYASH

SEQ ID NO: 10978 - protein, 1096 aa, Homo sapiens
MGVQGFQEFLEKRCPGAVVPVDLLKLARTVSRQQQQQHLHRQLPPTAALAPGAPRAARGSVPLQPPLPPAALGAYSGGAGPTRHHHPAHHFHHHGQAQPGLHPPLPPPPPPQLPGARVLVDAGSALPRLYGGYQTDWVCGGQWNAMLGYLSALCQACAYPGGDGLELVVMFPGGLGKDRLAEWGRRCQAERQTAQLIVGHVGNKGTPPPRAWFLPPACLSHCVRLALIRFRVKVFQSLEDHHLEVVAFFRENGFHGLLAHDSEYALYNIPSYYSSHALKLSWNGKNLTTNQFLMQEVAKQLGLKRMNFPIFAALLGNHILPDEDLAAFHWSLLGPEHPLASLKVRAHQLVLPPCDVVIKAVSEYVSSIKDPSNLDVVGKDVFKQSQSRTEDKIERFKKAVEYYSVTTKLSSLPVGPSFLGFRNNRLGNPPLPRNQVGTISAGKPMFSHQVPQKVKYPPPFPVGPNSSLLFSSHALGESHAFSEDPMLQNSPFANWAVSYDSSASQFPNYLPSKASPPLGPDSSHSSSSDGDEPNGASSDHITEAFHHQPEWGNPNRDRGSWAQPVDTGVSEASLGDGEPHIPSLLSMSTRNHMDITIPPLPPVAPEVLRVAEHRHRRGLMYPYIYHVLTKGEIKIPVCIEDECNMELPPAALLFRSARQYVYGVLFSLAETQRKMERLAMRRRLPVEVPSVILKEWSAYKGKSPQTPELVSALTFREWTCPNLKKLWLGKAVEDKNRRMRAFLACMKSDTPSMLNPANVPTHLLLMCCVLRYMVQWPGGRILHRHELDTFLAQAVSTQLYEPDRLQELKIEKLDARGIQLAALFMSGVDTALFANDACGQPVPWEHCCPWIYFDGKLFQSKLIKAGRERVSLVELCDGQADLATKVEKMRQSILEGVNMNHPPPSALLPSPTFVPPMVPSLYPVSLYSRAMGSMPLPPQGRSRGFAGLHPIPPQGGKLEIAGMVVGQWAGSRSSRGRGSFGMQVVSVGGPGKGHGKEQTGRGSKGHKKGNKQGSSDGVSKSLELHQGRSRSQVNGNSGALIKEEKSDHRLPAPSQCALSRDSNECNNGNRYLPMNNREKNHLQEQKLETVAQRKED

SEQ ID NO: 10979 - protein, 437 aa, Homo sapiens
MAAGTLYTYPENWRAFKALIAAQYSGAQVRVLSAPPHFHFGQTNRTPEFLRKFPAGKVPAFEGDDGFCVFESNAIAYYVSNEELRGSTPEAAAQVVQWVSFADSDIVPPASTWVFPTLGIMHHNKQATENAKEEVRRILGLLDAYLKTRTFLVGERVTLADITVVCTLLWLYKQVLEPSFRQAFPNTNRWFLTCINQPQFRAVLGEVKLCEKMAQFDAKKFAETQPKKDTPRKEKGSREEKQKPQAERKEEKKAAAPAPEEEMDECEQALAAEPKAKDPFAHLPKSTFVLDEFKRKYSNEDTLSVALPYFWEHFDKDGWSLWYSEYRFPEELTQTFMSCNLITGMFQRLDKLRKNAFASVILFGTNNSSSISGVWVFRGQELAFPLSPDWQVDYESYTWRKLDPGSEETQTLVREYFSWEGAFQHVGKAFNQGKIFK

SEQ ID NO: 10980 - protein, 260 aa, Homo sapiens
MASLEVSRSPRRSRRELEVRSPRQNKYSVLLPTYNERENLPLIVWLLVKSFSESGINYEIIIIDDGSPDGTRDVAEQLEKIYGSDRILLRPREKKLGLGTAYIHGMKHATGNYIIIMDADLSHHPKFIPEFIRKQKEGNFDIVSGTRYKGNGGVYGWDLKRKIISRGANFLTQILLRPGASDLTGSFRLYRKEVLEKLIEKCVSKGYVFQMEMIVRARQLNYTIGEVPISFVDRVYGESKLGGNEIVSFLKGLLTLFATT

SEQ ID NO: 10981 - protein, 129 aa, Homo sapiens [sequence omitted]

SEQ ID NO: 10982 - protein, 155 aa, Homo sapiens
LLSFAQARGADRMGKCRGLRTARKLRSHRRDQKWHDKQYKKAHLGTALKANPFGGASHAKGIVLEKVGVEAKQPNSAIRKCVRVQLIKNGKKITAFVPNDGCLNFIEENDEVLVAGFGRKGHAVGDIPGVRFKVVKVANVSLLALYKGKKERPRS

SEQ ID NO: 10983 - protein, 355 aa, Homo sapiens
MQRNAMYLKNVAETACNFQLTQYQISHANQKPYECQICGKPFRKRAHLTQHNRIHTGGKPYECKECGKVFICCSTLIQHKRTHTSEKPYECLECRKTFRRSAHLIRHQRIHTGEKPYKCKQCWKAFASVSDLIDIGKFTLMRDFTNVQNVGRHLTIAQLLFSIREFTLVRSPLNVRNVAKHSIIAQHLLNTRELILMRNLMNVRNVKRLLGKVHILLNIKEFILVRNHMSVSNVGRLSLVFLILIDIREFTLVKNPMNVKNVVELLTIVQLLFNTREFTLVRRLMNISSVGRFLSPVQHLFNIREHILMKNLMNVSNARRPSSIMHILFDIKEFILVRNLINVSNVGRPLLLFLI

SEQ ID NO: 10984 - protein, 444 aa, Homo sapiens
MREIVHLQAGQCGNQIGAKFWEVISDEHGIDPTGTYHGDSDLQLERINVYYNEATGGNYVPRAVLVDLEPGTMDSVRSGPFGQIFRPDNFVFGQSGAGNNWAKGHYTEGAELVDAVLDVVRKEAESCDCLQGFQLTHSLGGGTGSGMGTLLISKMREEFPDRIMNTFSVVPSPKVSDTVVEPYNATLSVHQLVENTDETYCIDNEALYDICFRTLKLTTPTYGDLNHLVSATMSGVTTCLRFPGQLNADLRKLAVNMVPFPRLHFFMPAFAPLTSRGSQQYRGLTVPELTQQMFDAKNMMAACDPRHGRYLTVAAVFRGRMSMKEVDEQMLSVQSKNSSYFVEWIPNNVKTAVCDIPPRGLKMAVTFIGNSTAIQELFKRISEQFTAMFRRKAFLHWYTGEGMDEMEFTEAESNMNDLVSEYQQYQDATAEQGEFEEEAEEEVA

SEQ ID NO: 10985 - protein, 444 aa, Homo sapiens
MREIVHIQAGQCGNQIGAKFWEVISDEHGIDPTGTYHGDSDLQLDRISVYYNEATGGKYVPRAILVDLEPGTMDSVRSGPFGQIFRPDNFVFGQSGAGNNWAKGHYTEGAELVDSVLDVVRKEAESCDCLQGFQLTHSLGGGTGSGMGTLLISKIREEYPDRIMNTFSVVPSPKVSDTVVEPYNATLSVHQLVENTDETYCIDNEALYDICFRTLKLTTPTYGDLNHLVSATMSGVTTCLRFPGQLNADLRKLAVNMVPFPRLHFFMPGFAPLTSRGSQQYRALTVPELTQQVFDAKNMMAACDPRHGRYLTVAAVFRGRMSMKEVDEQMLNVQNKNSSYFVEWIPNNVKTAVCDIPPRGLKMAVTFIGNSTAIQELFKRISEQFTAMFRRKAFLHWYTGEGMDEMEFTEAESNMNDLVSEYQQYQDATAEEEEDFGEEAEEEA

SEQ ID NO: 10986 - protein, 444 aa, Homo sapiens [sequence omitted]

SEQ ID NO: 10987 - protein, 1032 aa, Homo sapiens
  VARIANT 272, 346, 502, 785: Xaa = Any Amino Acid
MQLLNGHQRDRDTERKRLFELSNPVGSDRVHTWGLQASSACLGPSAAGSGLRWGAESILTTQPPPQQQHHERPGAIASARGQSTGKGPPQSPVFEGVYNNSRMLHFLTAVVGSTCDVKVKNGTTYEGIFKTLSSHFELAEDIVHQKASEPAAGPRREDTVDTMVFKPSDVMLVHFRNADFNYATKDKFTDSAIAMNSKGMGNTKEKVLQRWERGDSNSDNYDLESNMSNGWDPNEMFKFNEENYGVKTTYDSSLSPYTVPLEKDNSKEFQLXELRAAQLAPEIESSPQYHLRIAMESDDGRTEEEKHRAVQRQGSGRESPSLASRKGKYIIPLPQRVQEGPRGGVXRSSPLGSQPGLSNLSPRGPRHLDNSNPGPGSEARGINGGPSHMSPKAQRPLRGAKTLSSPTNRPSGETSVPPPAVGRMYPPSSPRSAAPAPISPSCPELPIGLAVPTSSASIPVTSSVSDPGMGYISSASPKISLAPTDVKELSTTEPGRTLDPQXLAQIAEKVPGLQNEQKLFHLEELRKCGAQFNLQPSSSPENSLDPFPPWTLKEEAKGKEKEDDGLLTSEPMGSPVSSKTESVSDKEDKPPLAPAGGTEGPEPPPPPCPSQTGSLPFGLIKGEDKDEGPIAEQKSTLNPNTKEFNPTKPLLSVNKSTSIPTSPGPQTHSTPSIPVLTAGQSGLYSTQYISYTPQIQMGPAVQAPQMYPYPVSNSVSGQQGKYWGAKGSLLPQLWDQHQPASAPPTVAAGSPLVAATPYSSYIPYNPQQLPGPPAMMQPMAHYPSXPVFAPMLQSNPRMLMLGSHPQVIVSSSTPQYPSVEQPTPQALYVTAHQAYPNYATQLHAHQLQPAITPTGNQPAAPSPVQHQAGVAPHLGSGQPQQNLYHPGALTGMLPSLPPGPSAQSPQSGFPQPATVYAIHHKQLPHGFTNMAHVPQAHVQTGITAAPLAPGDGCCTHPRVMGTPPQSAVPQSGVPAFSASTPLPYPYIGHPQALSDPDCLLTYWWSSILSLPAAPLPLHRGTEDFPGRDLRPP

SEQ ID NO: 10988 - protein, 404 aa, Homo sapiens
MLKPQPLQQPSQPQQPPPTQQAVARRPPGGTSPPNGGLPGPLATSAAPPGPPAAASPCLGPVAAAGSGLRRGAEGILAPQPPPPQQHQERPGAAAIGSARGQSTGKGPPQSPVFEGVYNNSRMLHFLTAVVGSTCDVKVKNGTTYEGIFKTLSSKFELAVDAVHRKASEPAGGPRREDIVDTMVFKPSDVMLVHFRNVDFNYATKDKFTDSAIAMNSKVNGEHKEKVLQRWEGGDSNSDDYDLESDMSNGWDPNEMFKFNEENYGVKTTYDSSLSSYTVPLEKDNSEEFRQRELRAAQLAREIESSPQYRLRIAMENDDGRTEEEKHSAVQRQGSGRESPSLASSWGIPAKHLEWEGPHRGQGQGPAGVGGSCSAPARPHPVLPSHPLIYSPAGDGRSFIFYYL

SEQ ID NO: 10989 - protein, 298 aa, Homo sapiens
KPGTTGSGAGSGGPGGLTSAAPAGGHKKVIATKVLGTVKWFNVRNGYGFIHRNDTKEDVFVHHTAMKKNNPRKYLRSVGDGETVEFDVVEGEKGAKAANVTGPGGVPVQGSKYAADRNHYRRYPRPRGPPRNYQQNYQNSESGEKNEGSESAPEGQAQQRRPYRRRRFPPYYMRRPYGRRPQYSNPPVQGEVMEGADNQGAGEQGRPVRQNMYRGYRPRFRRGPPLQRQPREDGNEEDKENQGDETQGQQPPQRRYRRNFNYRRRRPENPKPQDGKETKAANPPAENSSAPEAEQGGA

SEQ ID NO: 10990 - protein, 699 aa, Homo sapiens
MPQCPTLESQEGENSEEKGDSSKEDPKETVALAFVRENPGAQNGLQNAQQQGKKKRKKKRLVINLSSCRYESVRRAAQQYGFREGGEDDDWTLYWTDYSVSLERVMEMKSYQKINHFPGMSEICRKDLLARNMSRMLKMFPKDFRFFPRTWCLPADWGDLQTYSRSRKNKTYICKPDSGCQGKGIFITRTVKEIKPGEDMICQLYISKPFIIDGFKFDLRIYVLVTSCDPLRIFVYNEGLARFATTSYSRPCTDNLDDICMHLTNYSINKHSSNFSRDAHSGSKRKLSTFSAYLEDHSYNVEQIWRDIEDVIIKTLISAHPIIRHNYHTCFPNHTLNSACFEILGFDILLDHKLKPWLLEVNHSPSFSTDSRLDKEVKDGLLYDTLVLINLESCDKKKVLEEERQRGQFLQQCCSREMRIEEAKGFRTVQLKKTETYEKENCGGFRLIYPSLNSEKYEKFFQDNNSLFQNTVASRAREEYARQLIQELRLKREKKPFQMKKKVEMQGESAGEQVRKKGMRGWQQKQQQKDKAATQASKQYIQPLTLVSYTPDLLLSVRGERKNETDSSLNQEAPTEEASSVFPKLTSAKPFSSLPDLRNINLSSSKLEPSKPNFSIKEAKSASAVNVFTGTVHLTSVETTPESTTQLSISPKSPPTLAVTASSDYSGPETDRVVSFKCKKQQTPPHLTQKKMLKSFLPT

SEQ ID NO: 10991 - protein, 622 aa, Homo sapiens
MPPASGPSVLARLLPLLGLLLGSASRAPGKSPPEPPSPQEILIKVQVYVSGELVPLARASVDVFGNRTLLAAGTTDSEGVATLPLSYRLGTWVLVTAARPGFLTNSVPWRVDKLPLYASVSLYLLPERPATLILYEDLVHILLGSPGARSQPLVQFQRRAARLPVSSTYSQLWASLTPASTQQEMRAFPAFLGTEASSSGNGSWLELMPLTAVSVHLLTGNGTEVPLSGPIHLSLPVPSETRALTVGTSIPAWRFDPKSGLWVRNGTGVIRKEGRQLYWTFVSPQLGYWVAAMASPTAGLVTITSGIQDIGTYHTIFLLTILAALALLVLILLCLLIYYCRRRCLKPRQQHRKLQLSGPSDGNKRDQATSMSQLHLICGGPLEPAPSGDPEAPPPGPLHSAFSSSRDLASSRDDFFRTKPRSASRPAAEPSGARGGESAGLKGARSAEGPGGLEPGLEEHRRGPSGAAAFLHEPPSPPPPFDHYLGHKGAAEGKTPDFLLSQSVDQLARPPSLGQAGQLIFCGSIDHLKDNVYRNVMPTLVIPAHYSTMAQLNGELQALTEKKLLELGVKPHPRACSASELRRDSLTSPEDELGAEVGDEAGDKKSPWQRREERPLMVFNVK

SEQ ID NO: 10992 - protein, 416 aa, Homo sapiens
MPRQLSAAAALFASLAVILHDGSQMRAKAFPETRDYSQPTAAATVQDIKKPVQQPAKQAPHQTLAARFMDGHITFQTAATVKIPTTTPATTKNTATTSPITYTLVTTQATPNNSHTAPPVTEVTVGPSLAPYSLPPTITPPAHTTGTSSSTVSHTTGNTTQPSNQTTLPATLSIALHKSTTGQKPVQPTHAPGTTAAAHNTTRTAAPASTVPGPTLAPQPSSVKTGIYQVLNGSRLCIKAEMGIQLIVQDKESVFSPRRYFNIDPNATQASGNCGTRKSNLLLNFQGGFVNLTFTKDEESYYISEVGAYLTVSDPETIYQGIKHAVVMFQTAVGHSFKCVSEQSLQLSAHLQVKTTDVQLQAFDFEDDHFGNVDECSSDYTIVLPVIGAIVVGLCLMGMGVYKIRLRCQSSGYQRI

SEQ ID NO: 10993 - protein, 416 aa, Homo sapiens
MPRQLSAAAALFASLAVILHDGSQMRAKAFPETRDYSQPTAAATVQDIKKPVQQPAKQAPHQTLAARFMDGHITFQTAATVKIPTTTPATTKNTATTSPITYTLVTTQATPNNSHTAPPVTEVTVGPSLAPYSLPPTITPPAHTAGTSSSTVSHTTGNTTQPSNQTTLPATLSIALHKSTTGQKPDQPTHAPGTTAAAHNTTRTAAPASTVPGPTLAPQPSSVKTGIYQVLNGSRLCIKAEMGIQLIVQDKESVFSPRRYFNIDPNATQASGNCGTRKSNLLLNFQGGFVNLTFTKDEESYYISEVGAYLTVSDPETVYQGIKHAVVMFQTAVGHSFKCVSEQSLQLSAHLQVKTTDVQLQAFDFEDDHFGNVDECSSDYTIVLPVIGAIVVGLCLMGMGVYKIRLRCQSSGYQRI

SEQ ID NO: 10994 - protein, 906 aa, Homo sapiens
MCRIAGALRTLLPLLLALLQASVEASGEIALCKTGFPEDVYSAVLSKDVHEGQPLLNVKFSNCNGKRKVQYESSEPADFKVDEDGMVYAVRSFPLSSEHAKFLIYAQDKETQEKWQVAVKLSLKPTLTEESVKESAEVEEIVFPRQFSKHSGHLQRQKRDWVIPPINLPENSRGPFPQELVRIRSDRDKNLSLRYSVTGPGADQPPTGIFIINPISGQLSVTKPLDREQIARFHLRAHAVDINGNQVENPIDIVINVIDMNDNRPEFLHQVWNGTVPEGSKPGTYVMTVTAIDADDPNALNGMLRYRIVSQAPSTPSPNMFTINNETGDIITVAAGLDREKVQQYTLIIQATDMEGNPTYGLSNTATAVITVTDVNDNPPEFTAMTFYGEVPENRVDIIVANLTVTDKDQPHTPAWNAVYRISGGDPTGRFAIQTDPNSNDGLVTVVKPIDFETNRMFVLTVAAENQVPLAKGIQHPPQSTATVSVTVIDVNENPYFAPNPKIIRQEEGLHAGTMLTTFTAQDPDRYMQQNIRYTKLSDPANWLKIDPVNGQITTIAVLDRESPNVKNNIYNATFLASDNGIPPMSGTGTLQIYLLDINDNAPQVLPQEAETCETPDPNSINITALDYDIDPNAGPFAFDLPLSPVTIKRNWTITRLNGDFAQLNLKIKFLEAGIYEVPIIITDSGNPPKSNISILRVKVCQCDSNGDCTDVDRIVGAGLGTGAIIAILLCIIILLILVLMFVVWMKRRDKERQAKQLLIDPEDDVRDNILKYDEEGGGEEDQDYDLSQLQQPDTVEPDAIKPVGIRRMDERPIHAEPQYPVRSAAPHPGDIGDFINEGLKAADNDPTAPPYDSLLVFDYEGSGSTAGSLSSLNSSSSGGEQDYDYLNDWGPRFKKLADMYGGGDD

SEQ ID NO: 10995 - protein, 1118 aa, Homo sapiens
MAGAGGGLGVWGNLVLLGLCSWTGARAPAPNPGRNLTVETQTTSSISLSWEVPDGLDSQNSNYWVQCTGDGGTTETRNTTATNVTVDGLGPGSLYTCSVWVEKDGVNSSVGTVTTATAPNPVRNLRVEAQTNSSIALTWEVPDGPDPQNSTYGVEYTGDGGRAGTRSTAHTNITVDGLEPGCLYAFSMWVGKNGINSSRETRNATTAHNPVRKPESGGSDHQLHLPELGGPRWHRPTELDLLRTSALEMVAEQRLETQQTPESPVDGLGPGSLYTCSVWVEKDGVNSSSWRLVTSTTAPNPVRNLTVEAQTNSSIALTWEVPDGPDPQNSTYGVEYTGDGGRAGTRSTAHTNITVDRLEPGCLYVFSVWVGKNGINSSRETRNATTAPNPVRNLHMETQTNSSIALCWEVPDGPYPQDYTYWVGYTGDGGGTETRNTTNTSVTAERLEPGTLYTFSVWAEKNGARGSRQNVSISTVPNAVTSLSKQDWTNSTIALRWTAPQGPGQSSYSYWVSWVREGMTDPRTQSTSGTDITLKELEAGSLYHLTVWAERNEVRGYNSTLTAATAPNEVTDLQNETQTKNSVMLWWKAPGDPHSQLYVYWVQWASKGHPRRGQDPQANWVNQTSRTNETWYKVEALEPGTLYNFTVWAERNDVASSTQSLCASTYPDTVTITSCVSTSAGYGVNLIWSCPQGGYEAFELEVGGQRGSQDRSSCGEAVSVLGLGPARSYPATITTIWDGMKVVSHSVVCHTESAGVIAGAFVGILLFLILVGLLIFFLKRRNKKKQQKPELRDLVFSSPGDIPAEDFADHVRKNERDSNCGFADEYQQLSLVGHSQSQMVASASENNAKNRYRNVLPYDWSRVPLKPIHEEPGSDYINASFMPGLWSPQEFIATQGPLPQTVGDFWRLVWEQQSHTLVMLTNCMEAGRVKCEHYWPLDSQPCTHGHLRVTLVGEEVMENWTVRELLLLQVEEQKTLSVRQFHYQAWPDHGVPSSPDTLLAFWRMLRQWLDQTMEGGPPIVHCSAGVGRTGTLIALDVLLRQLQSEGLLGPFSFVRKMRESRPLMVQTEAQYVFLHQCICGSSNSQPRPQPRRKSRMRMSKTSSTRTWPPSRPTSWRSK

SEQ ID NO: 10996 - protein, 174 aa, Homo sapiens
  VARIANT 6: Xaa = Any Amino Acid
MFVFLXLAYFTYNIFEVRWAQWLTPGFPALWEAEAEPHSLRYNLTVLSWDGSVQSGFLAEVHLDGQPFLRYDRQKCRAKPQGQWAEDVLGNKTWDRETRDLTGNGKDLRMTLAHIKDQKEGLHSLQEIRVCEIHEDNSTRSSQHFYYDGELFLSQNLETEEWTVPQSSRAQTLA

SEQ ID NO: 10997 - protein, 325 aa, Homo sapiens
MAWSLGSWLGGCLLVSALGMVPPPENVRMNSVNFKNILQWESPAFAKGNLTFTAQYLSYRIFQDKCMNTTLTECDFSSLSKYGDHTLRVRAEFADEHSDWVNITFCPVDDTIIGPPGMQVEVLADSLHMRFLAPKIENEYETWTMKNVYNSWTYNVQYWKNGTDEKFQITPQYDFEVLRNLEPWTTYCVQVRGFLPDRNKAGEWSEPVCEQTTHDETVPSWMVAVILMASVFMVCLALLGCFALLWCVYKKTKYAFSPRNSLPQHLKEFLGHPHHNTLLFFSFPLSDENDVFDKLSVIAEDSESGKQNPGDSCSLGTPPGQGPQS

SEQ ID NO: 10998 - protein, 325 aa, Homo sapiens [sequence omitted]

SEQ ID NO: 10999 - protein, 116 aa, Homo sapiens
QVQLQQWGAGLLKPSETLSLSCAVYGGSFSGYYWNWIRQPPGKGLEWIGEINHSGSTNYNPSLKSRVTISVDTSKNQLSLKLSSVTAADTAVYYCARGEIVVVPAASYYYYYMDVW

SEQ ID NO: 11000 - protein, 524 aa, Homo sapiens [sequence omitted]

SEQ ID NO: 11001 - protein, 715 aa, Homo sapiens
MVPGARGGGALARAAGRGLLALLLAVSAPLRLQAEELGDGCGHLVTYQDSGTMTSKNYPGTYPNHTVCEKTITVPKGKRLILRLGDLDIESQTCASDYLLFTSSSDQYGPYCGSMTVPKELLLNTSEVTVRFESGSHISGRGFLLTYASSDHPDLITCLERASHYLKTEYSKFCPAGCRDVAGDISGNMVDGYRDTSLLCKAAIHAGIIADELGGQISVLQRKGISRYEGILANGVLSRDGSLSDKRFLFTSNGCSRSLSFEPDGQIRASSSWQSVNESGDQVHWSPGQARLQDQGPSWASGDSSNNHKPREWLEIDLGEKKKITGIRTTGSTQSNFNFYVKSFVMNFKNNNSKWKTYKGIVNNEEKVFQGNSNFRDPVQNNFIPPIVARYVRVVPQTWHQRIALKVELIGCQITQGNDSLVWRKTSQSTSVSTKKEDETITRPIPSEETSTGINITTVAIPLVLLVVLVFAGMGIFAAFRKKKKKGSPYGSAEAQKTDCWKQIKYPFARHQSAEFTISYDNEKEMTQKLDLITSDMADYQQPLMIGTGTVTRKGSTFRPMDTDAEEAGVSTDAGGHYDCPQRAGRHEYALPLAPPEPEYATPIVERHVLRAHTFSAQSGYRVPGPQPGHKHSLSSGGFSPVAGVGAQDGDYQRPHSAQPADRGYDRPKAVSALATESGHPDSQKPPTHPGTSDSYSAPRDCLTPLNQTAMTALL

SEQ ID NO: 11002 - protein, 1407 aa, Homo sapiens
MALRGFCSADGSDPLWDWNVTWNTSNPDFTKCFQNTVLVWVPCFYLWACFPFYFLYLSRHDRGYIQMTPLNKTKTALGFLLWIVCWADLFYSFWERSRGIFLAPVFLVSPTLLGITTLLATFLIQLERRKGVQSSGIMLTFWLVALVCALAILRSKIMTALKEDAQVDLFRDITFYVYFSLLLIQLVLSCFSDRSPLFSETIHDPNPCPESSASFLSRITFWWITGLIVRGYRQPLEGSDLWSLNKEDTSEQVVPVLVKNWKKECAKTRKQPVKVVYSSKDPAQPKESSKVDANEEVEALIVKSPQKEWNPSLFKVLYKTFGPYFLMSFFFKAIHDLMMFSGPQILKLLIKFVNDTKAPDWQGYFYTVLLFVTACLQTLVLHQYFHICFVSGMRIKTAVIGAVYRKALVITNSARKSSTVGEIVNLMSVDAQRFMDLATYINMIWSAPLQVILALYLLWLNLGPSVLAGVAVMVLMVPVNAVMAMKTKTYQVAHMKSKDNRIKLMNEILNGIKVLKLYAWELAFKDKVLAIRQEELKVLKKSAYLSAVGTFTWVCTPFLVALCTFAVYVTIDENNILDAQTAFVSLALFNILRFPLNILPMVISSIVQASVSLKRLRIFLSHEELEPDSIERRPVKDGGGTNSITVRNATFTWARSDPPTLNGITFSIPEGALVAVVGQVGCGKSSLLSALLAEMDKVEGHVAIKGVNLSGGQKQRVSLARAVYSNADIYLFDDPLSAVDAHVGKHIFENVIGPKGMLKNKTRILVTHSMSYLPQVDVIIVMSGGKISEMGSYQELLARDGAFAEFLRTYASTEQEQDAEENGVTGVSGPGKEAKQMENGMLVTDSAGKQLQRQLSSSSSYSGDISRHHNSTAELQKAEAKKEETWKLMEADKAQTGQVKLSVYWDYMKAIGLFISFLSIFLFMCNHVSALASNYWLSLWTDDPIVNGTQEHTKVRLSVYGALGISQGIAVFGYSMAVSIGGILASRCLHVDLLHSILRSPMSFFERTPSGNLVNRFSKELDTVDSMIPEVIKMFMGSLFNVIGACIVILLATPIAAIIIPPLGLIYFFVQRFYVASSRQLKRLESVSRSPVYSHFNETLLGVSVIRAFEEQERFIHQSDLKVDENQKAYYPSIVANRWLAVRLECVGNCIVLFAALFAVISRHSLSAGLVGLSVSYSLQVTTYLNWLVRMSSEMETNIVAVERLKEYSETEKEAPWQIQETAPPSSWPQVGRVEFRNYCLRYREDLDFVLRHINVTINGGEKVGIVGRTGAGKSSLTLGLFRINESAEGEIIIDGINIAKIGLHDLRFKITIIPQDPVLFSGSLRMNLDPFSQYSDEEVWTSLELAHLKDFVSALPDKLDHECAEGGENLRVIVLDKGEIQEYGAPSDLLQQRGLFYSMAKDAGLV

SEQ ID NO: 11003 - protein, 1416 aa, Homo sapiens
MALRGFCSADGSDPLWDWNVTWNTSNPDFTKCFQNTVLVWVPCFYLWACFPFYFLYLSRHDRGYIQMTPLNKTKTALGFLLWIVCWADLFYSFWERSRGIFLAPVFLVSPTLLGITTLLATFLIQLERRKGVQSSGIMLTFWLVALVCALAILRSKIMTALKEDAQVDLFRDITFYVYFSLLLIQLVLSCFSDRSPLFSETIHDPNPCPESSASFLSRITFWWITGLIVRGYRQPLEGSDLWSLNKEDTSEQVVPVLVKNWKKECAKTRKQPVKVVYSSKDPAQPKESSKVDANEEVEALIVKSPQKEWNPSLFKVLYKTFGPYFLMSFFFKAIHDLMMFSGPQILKLLIKFVNDTKAPDWQGYFYTVLLFVTACLQTLVLHQYFHICFVSGMRIKTAVIGAVYRKALVITNSARKSSTVGEIVNLMSVDAQRFMDLATYINMIWSAPLQVILALYLLWLNLGPSVLAGVAVMVLMVPVNAVMAMKTKTYQVAHMKSKDNRIKLMNEILNGIKVLKLYAWELAFKDKVLAIRQEELKVLKKSAYLSAVGTFTWVCTPFLVALCTFAVYVTIDENNILDAQTAFVSLALFNILRFPLNILPMVISSIVQASVSLKRLRIFLSHEELEPDSIERRPVKDGGGTNSITVRNATFTWARSDPPTLNGITFSIPEGALVAVVGQVGCGKSSLLSALLAEMDKVEGHVAIKTRILVTHSMSYLPQVDVIIVMSGGKISEMGSYQELLARDGAFAEFLRTYASTEQEQDAEENGVTGVSGPGKEAKQMENGMLVTDSAGKQLQRQLSSSSSYSGDISRHHNSTAELQKAEAKKEETWKLMEADKAQTGQVKLSVYWDYMKAIGLFISFLSIFLFMCNHVSALASNYWLSLWTDDPIVNGTQEHTKVRLSVYGALGISQGIAVFGYSMAVSIGGILASRCLHVDLLHSILRSPMSFFERTPSGNLVNRFSKELDTVDSMIPEVIKMFMGSLFNVIGACIVILLATPIAAIIIPPLGLIYFFVQRFYVASSRQLKRLESVSRSPVYSHFNETLLGVSVIRAFEEQERFIHQSDLKVDENQKAYYPSIVANRWLAVRLECVGNCIVLFAALFAVISRHSLSAGLVGLSVSYSLQVTTYLNWLVRMSSEMETNIVAVERLKEYSETEKEAPWQIQETAPPSSWPQVGRVEFRNYCLRYREDLDFVLRHINVTINGGEKVGIVGRTGAGKSSLTLGLFRINESAEGEIIIDGINIAKIGLHDLRFKITIIPQDPVLFSGSLRMNLDPFSQYSDEEVWTSLELAHLKDFVSALPDKLDHECAEGGENLSVGQRQLVCLARALLRKTKILVLDEATAAVDLETDDLIQSTIRTQFEDCTVLTIAHRLNTIMDYTRVIVLDKGEIQEYGAPSDLLQQRGLFYSMAKDAGLV

SEQ ID NO: 11004 - protein, 1351 aa, Homo sapiens
MALRGFCSADGSDPLWDWNVTWNTSNPDFTKCFQNTVLVWVPCFYLWACFPFYFLYLSRHDRGYIQMTPLNKTKTALGFLLWIVCWADLFYSFWERSRGIFLAPVFLVSPTLLGITTLLATFLIQLERRKGVQSSGIMLTFWLVALVCALAILRSKIMTALKEDAQVDLFRDITFYVYFSLLLIQLVLSCFSDRSPLFSETIHDPNPCPESSASFLSRITFWWITGLIVRGYRQPLEGSDLWSLNKEDTSEQVVPVLVKNWKKECAKTRKQPVKVVYSSKDPAQPKESSKVDANEEVEALIVKSPQKEWNPSLFKVLYKTFGPYFLMSFFFKAIHDLMMFSGPQILKLLIKFVNDTKAPDWQGYFYTVLLFVTACLQTLVLHQYFHICFVSGMRIKTAVIGAVYRKALVITNSARKSSTVGEIVNLMSVDAQRFMDLATYINMIWSAPLQVILALYLLWLNLGPSVLAGVAVMVLMVPVNAVMAMKTKTYQVAHMKSKDNRIKLMNEILNGIKVLKLYAWELAFKDKVLAIRQEELKVLKKSAYLSAVGTFTWVCTPFLVALCTFAVYVTIDENNILDAQTAFVSLALFNILRFPLNILPMVISSIVQASVSLKRLRIFLSHEELEPDSIERRPVKDGGGTNSITVRNATFTWARSDPPTLNGITFSIPEGALVAVVGQVGCGKSSLLSALLAEMDKVEGHVAIKTRILVTHSMSYLPQVDVIIVMSGGKISEMGSYQELLARDGAFAEFLRTYASTEQEQDAEENGVTGVSGPGKEAKQMENGMLVTDSAGKQLQRQLSSSSSYSGDISRHHNSTAELQKAEAKKEETWKLMEADKAQTGQVKLSVYWDYMKAIGLFISFLSIFLFMCNHVSALASNYWLSLWTDDPIVNGTQEHTKVRLSVYGALGISQGIAVFGYSMAVSIGGILASRCLHVDLLHSILRSPMSFFERTPSGNLVNRFSKELDTVDSMIPEVIKMFMGSLFNVIGACIVILLATPIAAIIIPPLGLIYFFVQRFYVASSRQLKRLESVSRSPVYSHFNETLLGVSVIRAFEEQERFIHQSDLKVDENQKAYYPSIVANRWLAVRLECVGNCIVLFAALFAVISRHSLSAGLVGLSVSYSLQVTTYLNWLVRMSSEMETNIVAVERLKEYSETEKEAPWQIQETAPPSSWPQVGRVEFRNYCLRYREDLDFVLRHINVTINGGEKVGIVGRTGAGKSSLTLGLFRINESAEGEIIIDGINIAKIGLHDLRFKITIIPQDPVLFSGSLRMNLDPFSQYSDEEVWTSLELAHLKDFVSALPDKLDHECAEGGENLRVIVLDKGEIQEYGAPSDLLQQRGLFYSMAKDAGLV

SEQ ID NO: 11005 - protein, 1531 aa, Homo sapiens
MALRGFCSADGSDPLWDWNVTWNTSNPDFTKCFQNTVLVWVPCFYLWACFPFYFLYLSRHDRGYIQMTPLNKTKTALGFLLWIVCWADLFYSFWERSRGIFLAPVFLVSPTLLGITTLLATFLIQLERRKGVQSSGIMLTFWLVALVCALAILRSKIMTALKEDAQVDLFRDITFYVYFSLLLIQLVLSCFSDRSPLFSETIHDPNPCPESSASFLSRITFWWITGLIVRGYRQPLEGSDLWSLNKEDTSEQVVPVLVKNWKKECAKTRKQPVKVVYSSKDPAQPKESSKVDANEEVEALIVKSPQKEWNPSLFKVLYKTFGPYFLMSFFFKAIHDLMMFSGPQILKLLIKFVNDTKAPDWQGYFYTVLLFVTACLQTLVLHQYFHICFVSGMRIKTAVIGAVYRKALVITNSARKSSTVGEIVNLMSVDAQRFMDLATYINMIWSAPLQVILALYLLWLNLGPSVLAGVAVMVLMVPVNAVMAMKTKTYQVAHMKSKDNRIKLMNEILNGIKVLKLYAWELAFKDKVLAIRQEELKVLKKSAYLSAVGTFTWVCTPFLVALCTFAVYVTIDENNILDAQTAFVSLALFNILRFPLNILPMVISSIVQASVSLKRLRIFLSHEELEPDSIERRPVKDGGGTNSITVRNATFTWARSDPPTLNGITFSIPEGALVAVVGQVGCGKSSLLSALLAEMDKVEGHVAIKGSVAYVPQQAWIQNDSLRENILFGCQLEEPYYRSVIQACALLPDLEILPSGDRTEIGEKGVNLSGGQKQRVSLARAVYSNADIYLFDDPLSAVDAHVGKHIFENVIGPKGMLKNKTRILVTHSMSYLPQVDVIIVMSGGKISEMGSYQELLARDGAFAEFLRTYASTEQEQDAEENGVTGVSGPGKEAKQMENGMLVTDSAGKQLQRQLSSSSSYSGDISRHHNSTAELQKAEAKKEETWKLMEADKAQTGQVKLSVYWDYMKAIGLFISFLSIFLFMCNHVSALASNYWLSLWTDDPIVNGTQEHTKVRLSVYGALGISQGIAVFGYSMAVSIGGILASRCLHVDLLHSILRSPMSFFERTPSGNLVNRFSKELDTVDSMIPEVIKMFMGSLFNVIGACIVILLATPIAAIIIPPLGLIYFFVQRFYVASSRQLKRLESVSRSPVYSHFNETLLGVSVIRAFEEQERFIHQSDLKVDENQKAYYPSIVANRWLAVRLECVGNCIVLFAALFAVISRHSLSAGLVGLSVSYSLQVTTYLNWLVRMSSEMETNIVAVERLKEYSETEKEAPWQIQETAPPSSWPQVGRVEFRNYCLRYREDLDFVLRHINVTINGGEKVGIVGRTGAGKSSLTLGLFRINESAEGEIIIDGINIAKIGLHDLRFKITIIPQDPVLFSGSLRMNLDPFSQYSDEEVWTSLELAHLKDFVSALPDKLDHECAEGGENLSVGQRQLVCLARALLRKTKILVLDEATAAVDLETDDLIQSTIRTQFEDCTVLTIAHRLNTIMDYTRVIVLDKGEIQEYGAPSDLLQQRGLFYSMAKDAGLV

SEQ ID NO: 11006 - protein, 1472 aa, Homo sapiens
MALRGFCSADGSDPLWDWNVTWNTSNPDFTKCFQNTVLVWVPCFYLWACFPFYFLYLSRHDRGYIQMTPLNKTKTALGFLLWIVCWADLFYSFWERSRGIFLAPVFLVSPTLLGITTLLATFLIQLERRKGVQSSGIMLTFWLVALVCALAILRSKIMTALKEDAQVDLFRDITFYVYFSLLLIQLVLSCFSDRSPLFSETIHDPNPCPESSASFLSRITFWWITGLIVRGYRQPLEGSDLWSLNKEDTSEQVVPVLVKNWKKECAKTRKQPVKVVYSSKDPAQPKESSKVDANEEVEALIVKSPQKEWNPSLFKVLYKTFGPYFLMSFFFKAIHDLMMFSGPQILKLLIKFVNDTKAPDWQGYFYTVLLFVTACLQTLVLHQYFHICFVSGMRIKTAVIGAVYRKALVITNSARKSSTVGEIVNLMSVDAQRFMDLATYINMIWSAPLQVILALYLLWLNLGPSVLAGVAVMVLMVPVNAVMAMKTKTYQVAHMKSKDNRIKLMNEILNGIKVLKLYAWELAFKDKVLAIRQEELKVLKKSAYLSAVGTFTWVCTPFLVALCTFAVYVTIDENNILDAQTAFVSLALFNILRFPLNILPMVISSIVQASVSLKRLRIFLSHEELEPDSIERRPVKDGGGTNSITVRNATFTWARSDPPTLNGITFSIPEGALVAVVGQVGCGKSSLLSALLAEMDKVEGHVAIKGVNLSGGQKQRVSLARAVYSNADIYLFDDPLSAVDAHVGKHIFENVIGPKGMLKNKTRILVTHSMSYLPQVDVIIVMSGGKISEMGSYQELLARDGAFAEFLRTYASTEQEQDAEENGVTGVSGPGKEAKQMENGMLVTDSAGKQLQRQLSSSSSYSGDISRHHNSTAELQKAEAKKEETWKLMEADKAQTGQVKLSVYWDYMKAIGLFISFLSIFLFMCNHVSALASNYWLSLWTDDPIVNGTQEHTKVRLSVYGALGISQGIAVFGYSMAVSIGGILASRCLHVDLLHSILRSPMSFFERTPSGNLVNRFSKELDTVDSMIPEVIKMFMGSLFNVIGACIVILLATPIAAIIIPPLGLIYFFVQRFYVASSRQLKRLESVSRSPVYSHFNETLLGVSVIRAFEEQERFIHQSDLKVDENQKAYYPSIVANRWLAVRLECVGNCIVLFAALFAVISRHSLSAGLVGLSVSYSLQVTTYLNWLVRMSSEMETNIVAVERLKEYSETEKEAPWQIQETAPPSSWPQVGRVEFRNYCLRYREDLDFVLRHINVTINGGEKVGIVGRTGAGKSSLTLGLFRINESAEGEIIIDGINIAKIGLHDLRFKITIIPQDPVLFSGSLRMNLDPFSQYSDEEVWTSLELAHLKDFVSALPDKLDHECAEGGENLSVGQRQLVCLARALLRKTKILVLDEATAAVDLETDDLIQSTIRTQFEDCTVLTIAHRLNTIMDYTRVIVLDKGEIQEYGAPSDLLQQRGLFYSMAKDAGLV

SEQ ID NO: 11007 - protein, 1475 aa, Homo sapiens
MALRGFCSADGSDPLWDWNVTWNTSNPDFTKCFQNTVLVWVPCFYLWACFPFYFLYLSRHDRGYIQMTPLNKTKTALGFLLWIVCWADLFYSFWERSRGIFLAPVFLVSPTLLGITTLLATFLIQLERRKGVQSSGIMLTFWLVALVCALAILRSKIMTALKEDAQVDLFRDITFYVYFSLLLIQLVLSCFSDRSPLFSETIHDPNPCPESSASFLSRITFWWITGLIVRGYRQPLEGSDLWSLNKEDTSEQVVPVLVKNWKKECAKTRKQPVKVVYSSKDPAQPKESSKVDANEEVEALIVKSPQKEWNPSLFKVLYKTFGPYFLMSFFFKAIHDLMMFSGPQILKLLIKFVNDTKAPDWQGYFYTVLLFVTACLQTLVLHQYFHICFVSGMRIKTAVIGAVYRKALVITNSARKSSTVGEIVNLMSVDAQRFMDLATYINMIWSAPLQVILALYLLWLNLGPSVLAGVAVMVLMVPVNAVMAMKTKTYQVAHMKSKDNRIKLMNEILNGIKVLKLYAWELAFKDKVLAIRQEELKVLKKSAYLSAVGTFTWVCTPFLVALCTFAVYVTIDENNILDAQTAFVSLALFNILRFPLNILPMVISSIVQASVSLKRLRIFLSHEELEPDSIERRPVKDGGGTNSITVRNATFTWARSDPPTLNGITFSIPEGALVAVVGQVGCGKSSLLSALLAEMDKVEGHVAIKGSVAYVPQQAWIQNDSLRENILFGCQLEEPYYRSVIQACALLPDLEILPSGDRTEIGEKTRILVTHSMSYLPQVDVIIVMSGGKISEMGSYQELLARDGAFAEFLRTYASTEQEQDAEENGVTGVSGPGKEAKQMENGMLVTDSAGKQLQRQLSSSSSYSGDISRHHNSTAELQKAEAKKEETWKLMEADKAQTGQVKLSVYWDYMKAIGLFISFLSIFLFMCNHVSALASNYWLSLWTDDPIVNGTQEHTKVRLSVYGALGISQGIAVFGYSMAVSIGGILASRCLHVDLLHSILRSPMSFFERTPSGNLVNRFSKELDTVDSMIPEVIKMFMGSLFNVIGACIVILLATPIAAIIIPPLGLIYFFVQRFYVASSRQLKRLESVSRSPVYSHFNETLLGVSVIRAFEEQERFIHQSDLKVDENQKAYYPSIVANRWLAVRLECVGNCIVLFAALFAVISRHSLSAGLVGLSVSYSLQVTTYLNWLVRMSSEMETNIVAVERLKEYSETEKEAPWQIQETAPPSSWPQVGRVEFRNYCLRYREDLDFVLRHINVTINGGEKVGIVGRTGAGKSSLTLGLFRINESAEGEIIIDGINIAKIGLHDLRFKITIIPQDPVLFSGSLRMNLDPFSQYSDEEVWTSLELAHLKDFVSALPDKLDHECAEGGENLSVGQRQLVCLARALLRKTKILVLDEATAAVDLETDDLIQSTIRTQFEDCTVLTIAHRLNTIMDYTRVIVLDKGEIQEYGAPSDLLQQRGLFYSMAKDAGLV

SEQ ID NO: 11008 - protein, 1482 aa, Homo sapiens
MALRGFCSADGSDPLWDWNVTWNTSNPDFTKCFQNTVLVWVPCFYLWACFPFYFLYLSRHDRGYIQMTPLNKTKTALGFLLWIVCWADLFYSFWERSRGIFLAPVFLVSPTLLGITTLLATFLIQLERRKGVQSSGIMLTFWLVALVCALAILRSKIMTALKEDAQVDLFRDITFYVYFSLLLIQLVLSCFSDRSPLFSETIHDPNPCPESSASFLSRITFWWITGLIVRGYRQPLEGSDLWSLNKEDTSEQVVPVLVKNWKKECAKTRKQPVKVVYSSKDPAQPKESSKVDANEEVEALIVKSPQKEWNPSLFKVLYKTFGPYFLMSFFFKAIHDLMMFSGPQILKLLIKFVNDTKAPDWQGYFYTVLLFVTACLQTLVLHQYFHICFVSGMRIKTAVIGAVYRKALVITNSARKSSTVGEIVNLMSVDAQRFMDLATYINMIWSAPLQVILALYLLWLNLGPSVLAGVAVMVLMVPVNAVMAMKTKTYQVAHMKSKDNRIKLMNEILNGIKVLKLYAWELAFKDKVLAIRQEELKVLKKSAYLSAVGTFTWVCTPFLASVSLKRLRIFLSHEELEPDSIERRPVKDGGGTNSITVRNATFTWARSDPPTLNGITFSIPEGALVAVVGQVGCGKSSLLSALLAEMDKVEGHVAIKGSVAYVPQQAWIQNDSLRENILFGCQLEEPYYRSVIQACALLPDLEILPSGDRTEIGEKGVNLSGGQKQRVSLARAVYSNADIYLFDDPLSAVDAHVGKHIFENVIGPKGMLKNKTRILVTHSMSYLPQVDVIIVMSGGKISEMGSYQELLARDGAFAEFLRTYASTEQEQDAEENGVTGVSGPGKEAKQMENGMLVTDSAGKQLQRQLSSSSSYSGDISRHHNSTAELQKAEAKKEETWKLMEADKAQTGQVKLSVYWDYMKAIGLFISFLSIFLFMCNHVSALASNYWLSLWTDDPIVNGTQEHTKVRLSVYGALGISQGIAVFGYSMAVSIGGILASRCLHVDLLHSILRSPMSFFERTPSGNLVNRFSKELDTVDSMIPEVIKMFMGSLFNVIGACIVILLATPIAAIIIPPLGLIYFFVQRFYVASSRQLKRLESVSRSPVYSHFNETLLGVSVIRAFEEQERFIHQSDLKVDENQKAYYPSIVANRWLAVRLECVGNCIVLFAALFAVISRHSLSAGLVGLSVSYSLQVTTYLNWLVRMSSEMETNIVAVERLKEYSETEKEAPWQIQETAPPSSWPQVGRVEFRNYCLRYREDLDFVLRHINVTINGGEKVGIVGRTGAGKSSLTLGLFRINESAEGEIIIDGINIAKIGLHDLRFKITIIPQDPVLFSGSLRMNLDPFSQYSDEEVWTSLELAHLKDFVSALPDKLDHECAEGGENLSVGQRQLVCLARALLRKTKILVLDEATAAVDLETDDLIQSTIRTQFEDCTVLTIAHRLNTIMDYTRVIVLDKGEIQEYGAPSDLLQQRGLFYSMAKDAGLV

SEQ ID NO: 11009 - protein, 1466 aa, Homo sapiens
MALRGFCSADGSDPLWDWNVTWNTSNPDFTKCFQNTVLVWVPCFYLWACFPFYFLYLSRHDRGYIQMTPLNKTKTALGFLLWIVCWADLFYSFWERSRGIFLAPVFLVSPTLLGITTLLATFLIQLERRKGVQSSGIMLTFWLVALVCALAILRSKIMTALKEDAQVDLFRDITFYVYFSLLLIQLVLSCFSDRSPLFSETIHDPNPCPESSASFLSRITFWWITGLIVRGYRQPLEGSDLWSLNKEDTSEQVVPVLVKNWKKECAKTRKQPVKVVYSSKDPAQPKESSKVDANEEVEALIVKSPQKEWNPSLFKVLYKTFGPYFLMSFFFKAIHDLMMFSGPQILKLLIKFVNDTKAPDWQGYFYTVLLFVTACLQTLVLHQYFHICFVSGMRIKTAVIGAVYRKALVITNSARKSSTVGEIVNLMSVDAQRFMDLATYINMIWSAPLQVILALYLLWLNLGPSVLAGVAVMVLMVPVNAVMAMKTKTYQVAHMKSKDNRIKLMNEILNGIKVLKLYAWELAFKDKVLAIRQEELKVLKKSAYLSAVGTFTWVCTPFLVALCTFAVYVTIDENNILDAQTAFVSLALFNILRFPLNILPMVISSIVQASVSLKRLRIFLSHEELEPDSIERRPVKDGGGTNSITVRNATFTWARSDPPTLNGITFSIPEGALVAVVGQVGCGKSSLLSALLAEMDKVEGHVAIKGSVAYVPQQAWIQNDSLRENILFGCQLEEPYYRSVIQACALLPDLEILPSGDRTEIGEKGVNLSGGQKQRVSLARAVYSNADIYLFDDPLSAVDAHVGKHIFENVIGPKGMLKNKTRILVTHSMSYLPQVDVIIVMSGGKISEMGSYQELLARDGAFAEFLRTYASTEQEQDAEENGVTGVSGPGKEAKQMENGMLVTDSAGKQLQRQLSSSSSYSGDISRHHNSTAELQKAEAKKEETWKLMEADKAQTGQVKLSVYWDYMKAIGLFISFLSIFLFMCNHVSALASNYWLSLWTDDPIVNGTQEHTKVRLSVYGALGISQGIAVFGYSMAVSIGGILASRCLHVDLLHSILRSPMSFFERTPSGNLVNRFSKELDTVDSMIPEVIKMFMGSLFNVIGACIVILLATPIAAIIIPPLGLIYFFVQRFYVASSRQLKRLESVSRSPVYSHFNETLLGVSVIRAFEEQERFIHQSDLKVDENQKAYYPSIVANRWLAVRLECVGNCIVLFAALFAVISRHSLSAGLVGLSVSYSLQVTTYLNWLVRMSSEMETNIVAVERLKEYSETEKEAPWQIQETAPPSSWPQVGRVEFRNYCLRYREDLDFVLRHINVTINGGEKVGIVGRTGAGKSSLTLGLFRINESAEGEIIIDGINIAKIGLHDLRFKITIIPQDPVLFSGSLRMNLDPFSQYSDEEVWTSLELAHLKDFVSALPDKLDHECAEGGENLRVIVLDKGEIQEYGAPSDLLQQRGLFYSMAKDAGLV

SEQ ID NO: 11010 - protein, 1410 aa, Homo sapiens
MALRGFCSADGSDPLWDWNVTWNTSNPDFTKCFQNTVLVWVPCFYLWACFPFYFLYLSRHDRGYIQMTPLNKTKTALGFLLWIVCWADLFYSFWERSRGIFLAPVFLVSPTLLGITTLLATFLIQLERRKGVQSSGIMLTFWLVALVCALAILRSKIMTALKEDAQVDLFRDITFYVYFSLLLIQLVLSCFSDRSPLFSETIHDPNPCPESSASFLSRITFWWITGLIVRGYRQPLEGSDLWSLNKEDTSEQVVPVLVKNWKKECAKTRKQPVKVVYSSKDPAQPKESSKVDANEEVEALIVKSPQKEWNPSLFKVLYKTFGPYFLMSFFFKAIHDLMMFSGPQILKLLIKFVNDTKAPDWQGYFYTVLLFVTACLQTLVLHQYFHICFVSGMRIKTAVIGAVYRKALVITNSARKSSTVGEIVNLMSVDAQRFMDLATYINMIWSAPLQVILALYLLWLNLGPSVLAGVAVMVLMVPVNAVMAMKTKTYQVAHMKSKDNRIKLMNEILNGIKVLKLYAWELAFKDKVLAIRQEELKVLKKSAYLSAVGTFTWVCTPFLVALCTFAVYVTIDENNILDAQTAFVSLALFNILRFPLNILPMVISSIVQASVSLKRLRIFLSHEELEPDSIERRPVKDGGGTNSITVRNATFTWARSDPPTLNGITFSIPEGALVAVVGQVGCGKSSLLSALLAEMDKVEGHVAIKGSVAYVPQQAWIQNDSLRENILFGCQLEEPYYRSVIQACALLPDLEILPSGDRTEIGEKTRILVTHSMSYLPQVDVIIVMSGGKISEMGSYQELLARDGAFAEFLRTYASTEQEQDAEENGVTGVSGPGKEAKQMENGMLVTDSAGKQLQRQLSSSSSYSGDISRHHNSTAELQKAEAKKEETWKLMEADKAQTGQVKLSVYWDYMKAIGLFISFLSIFLFMCNHVSALASNYWLSLWTDDPIVNGTQEHTKVRLSVYGALGISQGIAVFGYSMAVSIGGILASRCLHVDLLHSILRSPMSFFERTPSGNLVNRFSKELDTVDSMIPEVIKMFMGSLFNVIGACIVILLATPIAAIIIPPLGLIYFFVQRFYVASSRQLKRLESVSRSPVYSHFNETLLGVSVIRAFEEQERFIHQSDLKVDENQKAYYPSIVANRWLAVRLECVGNCIVLFAALFAVISRHSLSAGLVGLSVSYSLQVTTYLNWLVRMSSEMETNIVAVERLKEYSETEKEAPWQIQETAPPSSWPQVGRVEFRNYCLRYREDLDFVLRHINVTINGGEKVGIVGRTGAGKSSLTLGLFRINESAEGEIIIDGINIAKIGLHDLRFKITIIPQDPVLFSGSLRMNLDPFSQYSDEEVWTSLELAHLKDFVSALPDKLDHECAEGGENLRVIVLDKGEIQEYGAPSDLLQQRGLFYSMAKDAGLV

SEQ ID NO: 11011 - protein, 1489 aa, Homo sapiens
MALRGFCSADGSDPLWDWNVTWNTSNPDFTKCFQNTVLVWVPCFYLWACFPFYFLYLSRHDRGYIQMTPLNKTKTALGFLLWIVCWADLFYSFWERSRGIFLAPVFLVSPTLLGITTLLATFLIQLERRKGVQSSGIMLTFWLVALVCALAILRSKIMTALKENPCPESSASFLSRITFWWITGLIVRGYRQPLEGSDLWSLNKEDTSEQVVPVLVKNWKKECAKTRKQPVKVVYSSKDPAQPKESSKVDANEEVEALIVKSPQKEWNPSLFKVLYKTFGPYFLMSFFFKAIHDLMMFSGPQILKLLIKFVNDTKAPDWQGYFYTVLLFVTACLQTLVLHQYFHICFVSGMRIKTAVIGAVYRKALVITNSARKSSTVGEIVNLMSVDAQRFMDLATYINMIWSAPLQVILALYLLWLNLGPSVLAGVAVMVLMVPVNAVMAMKTKTYQVAHMKSKDNRIKLMNEILNGIKVLKLYAWELAFKDKVLAIRQEELKVLKKSAYLSAVGTFTWVCTPFLVALCTFAVYVTIDENNILDAQTAFVSLALFNILRFPLNILPMVISSIVQASVSLKRLRIFLSHEELEPDSIERRPVKDGGGTNSITVRNATFTWARSDPPTLNGITFSIPEGALVAVVGQVGCGKSSLLSALLAEMDKVEGHVAIKGSVAYVPQQAWIQNDSLRENILFGCQLEEPYYRSVIQACALLPDLEILPSGDRTEIGEKGVNLSGGQKQRVSLARAVYSNADIYLFDDPLSAVDAHVGKHIFENVIGPKGMLKNKTRILVTHSMSYLPQVDVIIVMSGGKISEMGSYQELLARDGAFAEFLRTYASTEQEQDAEENGVTGVSGPGKEAKQMENGMLVTDSAGKQLQRQLSSSSSYSGDISRHHNSTAELQKAEAKKEETWKLMEADKAQTGQVKLSVYWDYMKAIGLFISFLSIFLFMCNHVSALASNYWLSLWTDDPIVNGTQEHTKVRLSVYGALGISQGIAVFGYSMAVSIGGILASRCLHVDLLHSILRSPMSFFERTPSGNLVNRFSKELDTVDSMIPEVIKMFMGSLFNVIGACIVILLATPIAAIIIPPLGLIYFFVQRFYVASSRQLKRLESVSRSPVYSHFNETLLGVSVIRAFEEQERFIHQSDLKVDENQKAYYPSIVANRWLAVRLECVGNCIVLFAALFAVISRHSLSAGLVGLSVSYSLQVTTYLNWLVRMSSEMETNIVAVERLKEYSETEKEAPWQIQETAPPSSWPQVGRVEFRNYCLRYREDLDFVLRHINVTINGGEKVGIVGRTGAGKSSLTLGLFRINESAEGEIIIDGINIAKIGLHDLRFKITIIPQDPVLFSGSLRMNLDPFSQYSDEEVWTSLELAHLKDFVSALPDKLDHECAEGGENLSVGQRQLVCLARALLRKTKILVLDEATAAVDLETDDLIQSTIRTQFEDCTVLTIAHRLNTIMDYTRVIVLDKGEIQEYGAPSDLLQQRGLFYSMAKDAGLV

SEQ ID NO: 11012 - protein, 520 aa, Homo sapiens [sequence omitted]

SEQ ID NO: 11013 - protein, 430 aa, Homo sapiens
PRVRSASLCSSTAPHSRVTLTPPSQLSGAAMAWRRREAGVGARGVLALALLALALCVPGARGRALEWFSAVVNIEYVDPQTNLTVWSVSESGRFGDSSPKEGAHGLVGVPWAPGGDLEGCAPDTRFFVPEPGGRGAAPWVALVARGGCTFKDKVLVAARRNASAVVLYNEERYGNITLPMSHAGTGNIVVIMISYPKGREILELVQKGIPVTMTIGVGTRHVQEFISGQSVVFVAIAFITMMIISLAWLIFYYIQRFLYTGSQIGSQSHRKETKKVIGQLLLHTVKHGEKGIDVDAENCAVCIENFKVKDIIRILPCKHIFHRICIDPWLLDHRTCPMCKLDVIKALGYWGEPGDVQEMPAPESPPGRDPAANFSLALPDDDGSDESSPPSASPAESEPQCDPSFKGDAGENTALLEAGRSDSRHGGPIS

SEQ ID NO: 11014 - protein, 384 aa, Homo sapiens
MNATGTPVAPESCQQLAAGGHSRLIVLHYNHSGRLAGRGGPEDGGLGALRGLSVAASCLVVLENLLVLAAITSHMRSRRWVYYCLVNITLSDLLTGAAYLANVLLSGARTFRLAPAQWFLREGLLFTALAASTFSLLFTAGERFATMVRPVAESGATKTSRVYGFIGLCWLLAALLGMLPLLGWNCLCAFDRCSSLLPLYSKRYILFCLVIFAGVLATIMGLYGAIFRLVQASGQKAPRPAARRKARRLLKTVLMILLAFLVCWGPLFGLLLADVFGSNLWAQEYLRGMDWILALAVLNSAVNPIIYSFRSREVCRAVLSFLCCGCLRLGMRGPGDCLARAVEAHSGASTTDSSLRPRDSFRGSRSLSFRMREPLSSISSVRSI

SEQ ID NO: 11015 - protein, 354 aa, Homo sapiens
MIQPEKLLLVTVGKTATLHCTVTSLLPVGPVLWFRGVGPGRELIYNQKEGHFPRVTTVSDLTKRNNMDFSIRISSITPADVGTYYCVKFRKGSPENVEFKSGPGTEMALGAKPSAPVVLGPAARTTPEHTVSFTCESHGFSPRDITLKWFKNGNELSDFQTNVDPTGQSVAYSIRSTARVVLDPWDVRSQVICEVAHVTLQGDPLRGTANLSEAIRVPPTLEVTQQPMRAGNQVNVTCQVRKFYPQSLQLTWLENGNVCQRETASTLTENKDGTYNWTSWFLVNISDQRDDVVLTCQVKHDGQLAVSKRLALEVTVHQKDQSSDATPGPASSLTALLLIAVLLGPIYVPWKQKT

SEQ ID NO: 11016 - protein, 387 aa, Homo sapiens [sequence omitted]

SEQ ID NO: 11017 - protein, 398 aa, Homo sapiens
MPVPASWPHLPSPFLLMTLLLGRLTGVAGEDELQVIQPEKSVSVAAGESATLRCAMTSLIPVGPIMWFRGAGAGRELIYNQKEGHFPRVTTVSELTKRNNLDFSISISNITPADAGTYYCVKFRKGSPDDVEFKSGAGTELSVRAKPSAPVVSGPAVRATPEHTVSFTCESHGFSPRDITLKWFKNGNELSDFQTNVDPAGDSVSYSIHSTARVVLTRGDVHSQVICEMAHITLQGDPLRGTANLSEAIRVPPTLEVTQQPMRAENQANVTCQVSNFYPRGLQLTWLENGNVSRTETASTLIENKDGTYNWMSWLLVNTCAHRDDVVLTCQVEHDGQQAVSKSYALEISAHQKEHGSDITHEPALAPTAPLLVALLLGPKLLLVVGVSAIYICWKQKA

SEQ ID NO: 11018 - protein, 921 aa, Homo sapiens
MTANRDAALSSHRHPGCAQRPRTPTFASSSQRRSAFGFDDGNFPGLGERSHAPGSRLGARRRAKTARGLRGHRQRGAGAGLSRPGSARAPSPPRPGGPENPGGVLSVELPGLLAQLARSFALLLPVYALGYLGLSFSWVLLALALLAWCRRSRGLKALRLCRALALLEDEERVVRLGVRACDLPAWVHFPDTERAEWLNKTVKHMWPFICQFIEKLFRETIEPAVRGANTHLSTFSFTKVDVGQQPLRINGVKVYTENVDKRQIILDLQISFVGNCEIDLEIKRYFCRAGVKSIQIHGTMRVILEPLIGDMPLVGALSIFFLRKPLLEINWTGLTNLLDVPGLNGLSDTIILDIISNYLVLPNRITVPLVSEVQIAQLRFPVPKGVLRIHFIEAQDLQGKDTYLKGLVKGKSDPYGIIRVGNQIFQSRVIKENLSPKWNEVYEALVYEHPGQELEIELFDEDPDKDDFLGSLMIDLIEVEKERLLDEWFTLDEVPKGKLHLRLEWLTLMPNASNLDKVLTDIKADKDQANDGLSSALLILYLDSARNLPSGKKISSNPNPVVQMSVGHKAQESKIRYKTNEPVWEENFTFFIHNPKRQDLEVEVRDEQHQCSLGNLKVPLSQLLTSEDMTVSQRFQLSNSGPNSTIKMKIALRVLHLEKRERPPDHQHSAQVKRPSVSKEGRKTSIKSHMSGSPGPGGSNTAPSTPVIGGSDKPGMEEKAQPPEAGPQGLHDLGRSSSSLLASPGHISVKEPTPSIASDISLPIATQELRQRLRQLENGTTLGQSPLGQIQLTIRHSSQRNKLIVVVHACRNLIAFSEDGSDPYVRMYLLPDKRRSGRRKTHVSKKTLNPVFDQSFDFSVSLPEVQRRTLDVAVKNSGGFLSKDKGLLGKVLVALASEELAKGWTQWYDLTEDGTRPQAMT

SEQ ID NO: 11019 - protein, 261 aa, Homo sapiens
MIETYNQTSPRSAATGLPISMKIFMYLLTVFLITQMIGSALFAVYLHRRLDKIEDERNLHEDFVFMKTIQRCNTGERSLSLLNCEEIKSQFEGFVKDIMLNKEETKKENSFEMQKGDQNPQIAAHVISEASSKTTSVLQWAEKGYYTMSNNLVTLENGKQLTVKRQGLYYIYAQVTFCSNREASSQAPFIASLCLKSPGRFERILLRAANTHSSAKPCGQQSIHLGGVFELQPGASVFVNVTDPSQVSHGTGFTSFGLLKL

SEQ ID NO: 11020 - protein, 380 aa, Homo sapiens
MNPCGWLGAVGPTLPNFPKWAASLLEPRVLPWQAQVAHPVSGGPSPWISRPDTAQLDGTMAPAFLLLLLLWPQGCVSGPSADSVYTKVRLLEGETLSVQCSYKGYKNRVEGKVWCKIKKKKCEPGFARVWVKGPRYLLQDDAQAKVVNITMVALKLQDSGRYWCMRNTSGILYPLMGFQLDVSPAPQTERNIPFTHLDNILKGGTVTTGQAPTSGPDAPFTTGVMVFTPGLITLPRLLASTRPASKTGYSFTATSTTSQGPRRTMGSQTVTASPSNARDSSAGPESISTKSGDLSTRSPTTGLCLTSRSLLNRLPSMPSIRHQDVYSTVLGVVLTLLVLMLIMVYGFWKKRHMASYSMCSDPSTRDPPGRPEPYVEVYLI

SEQ ID NO: 11021 - protein, 353 aa, Homo sapiens
MGSLYSEYLNPNKVQEHYNYTKETLETQETTSRQVASAFIVILCCAIVVENLLVLIAVARNSKFHSAMYLFLGNLAASDLLAGVAFVANTLLSGSVTLRLTPVQWFAREGSAFITLSASVFSLLAIAIERHVAIAKVKLYGSDKSCRMLLLIGASWLISLVLGGLPILGWNCLGHLEACSTVLPLYAKHYVLCVVTIFSIILLAIVALYVRIYCVVRSSHADMAAPQTLALLKTVTIVLGVFIVCWLPAFSILLLDYACPVHSCPILYKAHYFFAVSTLNSLLNPVIYTWRSRDLRREVLRPLQCWRPGVGVQGRRRGGTPGHHLLPLRSSSSLERGMHMPTSPTFLEGNTVV

SEQ ID NO: 11022 - protein, 252 aa, Homo sapiens
MRPADLLQLVLLLDLPRDLGGMGCSSPPCECHQEEDFRVTCKDIQRIPSLPPSTQTLKLIETHLRTIPSHAFSNLPNISRIYVSIDVTLQQLESHSFYNLSKVTHIEIRNTRNLTYIDPDALKELPLLKFLGIFNTGLKMFPDLTKVYSTDIFFILEITDNPYMTSIPVNAFQGLCNETLTLKLYNNGFTSVQGYAFNGTKLDAVYLNKNKYLTVIDKDAFGGVYSGPSLLLPLGRKSLSFETQKAPSSSTP

SEQ ID NO: 11023 - protein, 456 aa, Homo sapiens
TGQERRGGGKMAAPEERDLTQEQTEKLLQFQDLTGIESMDQCRHTLEQHNWNIEAAVQDRLNEQEGVPSVFNPPPSRPLQVNTADHRIYSYVVSRPQPRARLLGWGYYLIMLPFRFTYYTILDIFRFALRFIRPDPRSRVTDPVGDIVSFMHSFEEKYGRAHPVFYQGTYSQALNDAKRELRFLLVYLHGDDHQDSDEFCRNTLCAPEVISLINTRMLFWACSTNKPEGYRVSQALRENTYPFLAMIMLKDRRMTVVGRLEGLIQPDDLINQLTFIMDANQTYLVSERLEREERNQTQVLRQQQDEAYLASLRADQEKERKKREERERKRRKEEEVQQQKLAEERRRQNLQEEKERKLECLPPEPSPDDPESVKIIFKLPNDSRVERRFHFSQSLTVIHDFLFSLKESPEKFQIEANFPRRVLPCIPSEEWPNPPTLQEAGLSHTEVLFVQDLTDE

SEQ ID NO: 11024 - protein, 1300 aa, Homo sapiens
MEFYESAYFIVLIPSIVITVIFLFFWLFMKETLYDEVLAKQKREQKLIPTKTDKKKAEKKKNKKKEIQNGNLHESDSESVPRDFKLSDALAVEDDQVAPVPLNVVETSSSVRERKKKEKKQKPVLEEQVIKESDASKIPGKKVEPVPVTKQPTPPSEAAASKKKPGQKKSKNGSDDQDKKVETLMVPSKRQEALPLHQETKQESGSGKKKASSKKQKTENVFVDEPLIHATTYIPLMDNADSSPVVDKREVIDLLKPDQVEGIQKSGTKKLKTETDKENAEVKFKDFLLSLKTMMFSEDEALCVVDLLKEKSGVIQDALKKSSKGELTTLIHQLQEKDKLLAAVKEDAAATKDRCKQLTQEMMTEKERSNVVITRMKDRIGTLEKEHNVFQNKIHVSYQETQQMQMKFQQVREQMEAEIAHLKQENGILRDAVSNTTNQLESKQSAELNKLRQDYARLVNELTEKTGKLQQEEVQKKNAEQAATQLKVQLQEAERRWEEVQSYIRKRTAEHEAAQQDLQSKFVAKENEVQSLHSKLTDTLVSKQQLEQRLMQLMESEQKRVNKEESLQMQVQDILEQNEALKAQIQQFHSQIAAQTSASVLAEELHKVIAEKDKQIKQTEDSLASERDRLTSKEEELKDIQNMNFLLKAEVQKLQALANEQAAAAHELEKMQQSVYVKDDKIRLLEEQLQHEISNKMEEFKILNDQNKALKSEVQKLQTLVSEQPNKDVVEQMEKCIQEKDEKLKTVEELLETGLIQVATKEEELNAIRTENSSLTKEVQDLKAKQNDQVSFASLVEELKKVIHEKDGKIKSVEELLEAELLKVANKEKTVQDLKQEIKALKEEIGNVQLEKAQQLSITSKVQELQNLLKGKEEQMNTMKAVLEEKEKDLANTGKWLQDLQEENESLKAHVQEVAQHNLKEASSASQFEELEIVLKEKENELKRLEAMLKERESDLSSKTQLLQDVQDENKLFKSQIEQLKQQNYQQASSFPPHEELLKVISEREKEISGLWNELDSLKDAVEHQRKKNNERQQQVEAVELEAKEVLKKLFPKVSVPSNLSYGEWLHGFEKKAKECMAGTSGSEEVKVLEHKLKEADEMHTLLQLECEKYKSVLAETEGILQKLQRSVEQEENKWKVKVDESHKTIKQMQSSFTSSEQELERLRSENKDIENLRREREHLEMELEKAEMERSTYVTEVRELKAQLNETLTKLRTEQNERQKVAGDLHKAQQSLELIQSKIVKAAGDTTVIENSDVSPETESSEKETMSVSLNQTVTQLQQLLQAVNQQLTKEKEHYQVLE

SEQ ID NO: 11025 - protein, 1357 aa, Homo sapiens
MEFYESAYFIVLIPSIVITVIFLFFWLFMKETLYDEVLAKQKREQKLIPTKTDKKKAEKKKNKKKEIQNGNLHESDSESVPRDFKLSDALAVEDDQVAPVPLNVVETSSSVRERKKKEKKQKPVLEEQVIKESDASKIPGKKVEPVPVTKQPTPPSEAAASKKKPGQKKSKNGSDDQDKKVETLMVPSKRQEALPLHQETKQESGSGKKKASSKKQKTENVFVDEPLIHATTYIPLMDNADSSPVVDKREVIDLLKPDQVEGIQKSGTKKLKTETDKENAEVKFKDFLLSLKTMMFSEDEALCVVDLLKEKSGVIQDALKKSSKGELTTLIHQLQEKDKLLAAVKEDAAATKDRCKQLTQEMMTEKERSNVVITRMKDRIGTLEKEHNVFQNKIHVSYQETQQMQMKFQQVREQMEAEIAHLKQENGILRDAVSNTTNQLESKQSAELNKLRQDYARLVNELTEKTGKLQQEEVQKKNAEQAATQLKVQLQEAERRWEEVQSYIRKRTAEHEAAQQDLQSKFVAKENEVQSLHSKLTDTLVSKQQLEQRLMQLMESEQKRVNKEESLQMQVQDILEQNEALKAQIQQFHSQIAAQTSASVLAEELHKVIAEKDKQIKQTEDSLASERDRLTSKEEELKDIQNMNFLLKAEVQKLQALANEQAAAAHELEKMQQSVYVKDDKIRLLEEQLQHEISNKMEEFKILNDQNKALKSEVQKLQTLVSEQPNKDVVEQMEKCIQEKDEKLKTVEELLETGLIQVATKEEELNAIRTENSSLTKEVQDLKAKQNDQVSFASLVEELKKVIHEKDGKIKSVEELLEAELLKVANKEKTVQDLKQEIKALKEEIGNVQLEKAQQLSITSKVQELQNLLKGKEEQMNTMKAVLEEKEKDLANTGKWLQDLQEENESLKAHVQEVAQHNLKEASSASQFEELEIVLKEKENELKRLEAMLKERESDLSSKTQLLQDVQDENKLFKSQIEQLKQQNYQQASSFPPHEELLKVISEREKEISGLWNELDSLKDAVEHQRKKNNDLREKNWEAMEALASTEKMLQDKVNKTSKERQQQVEAVELEAKEVLKKLFPKVSVPSNLSYGEWLHGFEKKAKECMAGTSGSEEVKVLEHKLKEADEMHTLLQLECEKYKSVLAETEGILQKLQRSVEQEENKWKVKVDESHKTIKQMQSSFTSSEQELERLRSENKDIENLRREREHLEMELEKAEMERSTYVTEVRELKDLLTELQKKLDDSYSEAVRQNEELNLLKAQLNETLTKLRTEQNERQKVAGDLHKAQQSLELIQSKIVKAAGDTTVIENSDVSPETESSEKETMSVSLNQTVTQLQQLLQAVNQQLTKEKEHYQVLE

SEQ ID NO: 11026 - protein, 460 aa, Homo sapiens
MAPGRAVAGLLLLAAAGLGGVAEGPGLAFSEDVLSVFGANLSLSAAQLQHLLEQMGAASRVGVPEPGQLHFNQCLTAEEIFSLHGFSNATQITSSKFSVICPAVLQQLNFHPCEDRPKHKTRPSHSEVWGYGFLSVTIINLASLLGLILTPLIKKSYFPKILTFFVGLAIGTLFSNAIFQLIPEAFGFDPKVDSYVEKAVAVFGGFYLLFFFERMLKMLLKTYGQNGHTHFGNDNFGPQEKTHQPKALPAINGVTCYANPAVTEANGHIHFDNVSVVSLQDGKKEPSSCTCLKGPKLSEIGTIAWMITLCDALHNFIDGLAIGASCTLSLLQGLSTSIAILCEEFPHELGDFVILLNAGMSTRQALLFNFLSACSCYVGLAFGILVGNNFAPNIIFALAGGMFLYISLADMFPEMNDMLREKVTGRKTDFTFFMIQNAGMLTGFTAILLITLYAGEIELE

SEQ ID NO: 11027 - protein, 1073 aa, Homo sapiens
MKTLLLDLALWSLLFQPGWLSFSSQVSQNCHNGSYEISVLMMGNSAFAEPLKNLEDAVNEGLEIVRGRLQNAGLNVTVNATFMYSDGLIHNSGDCRSSTCEGLDLLRKISNAQRMGCVLIGPSCTYSTFQMYLDTELSYPMISAGSFGLSCDYKETLTRLMSPARKLMYFLVNFWKTNDLPFKTYSWSTSYVYKNGTETEDCFWYLNALEASVSYFSHELGFKVVLRQDKEFQDILMDHNRKSNVIIMCGGPEFLYKLKGDRAVAEDIVIILVDLFNDQYLEDNVTAPDYMKNVLVLTLSPGNSLLNSSFSRNLSPTKRDFALAYLNGILLFGHMLKIFLENGENITTPKFAHAFRNLTFEGYDGPVTLDDWGDVDSTMVLLYTSVDTKKYKVLLTYDTHVNKTYPVDMSPTFTWKNSKLPNDITGRGPQILMIAVFTLTGAVVLLLLVALLMLRKYRKDYELRQKKWSHIPPENIFPLETNETNHVSLKIDDDKRRDTIQRLRQCKYDKKRVILKDLKHNDGNFTEKQKIELNKLLQIDYYNLTKFYGTVKLDTMIFGVIEYCERGSLREVLNDTISYPDGTFMDWEFKISVLYDIAKGMSYLHSSKTEVHGRLKSTNCVVDSRMVVKITDFGCNSILPPKKDLWTAPEHLRQANISQKGDVYSYGIIAQEIILRKETFYTLSCRDRNEKIFRVENSNGMKPFRPDLFLETAEEKELEVYLLVKNCWEEDPEKRPDFKKIETTLAKIFGLFHDQKNESYMDTLIRRLQLYSRNLEHLVEERTQLYKAERDRADRLNFMLLPRLVVKSLKEKGFVEPELYEEVTIYFSDIVGFTTICKYSTPMEVVDMLNDIYKSFDHIVDHHDVYKVETIGDAYMVASGLPKRNGNRHAIDIAKMALEILSFMGTFELEHLPGLPIWIRIGVHSGPCAAGVVGIKMPRYCLFGDTVNTASRMESTGLPLRIHVSGSTIAILKRTECQFLYEVRGETYLKGRGNETTYWLTGMKDQKFNLPTPPTVENQQRLQAEFSDMIANSLQKRQAAGIRSQKPRRVASYKKGTLEYLQLNTTDKESTYF

SEQ ID NO: 11028 - protein, 233 aa, Homo sapiens
MWQLLLPTALLLLVSAGMRTEDLPKAVVFLEPQWYSVLEKDSVTLKCQGAYSPEDNSTQWFHNESLISSQASSYFIDAATVNDSGEYRCQTNLSTLSDPVQLEVHIGWLLLQAPRWVFKEEDPIHLRCHSWKNTALHKVTYLQNGKDRKYFHHNSDFHIPKATLKDSGSYFCRGLVGSKNVSSETVNITITQGLAVSTISSFSPPGYQVSFCLVMVLLFAVDTGLYFSVKTNI

SEQ ID NO: 11029 - protein, 476 aa, Homo sapiens
  VARIANT 354, 412: Xaa = Any Amino Acid
MSMRVTQKSYKVSTSGPRAFSSCSYKSESGACISSSSFSRVVSSSFPGGLGRGYGRSCGMGSITTVTVNQSLLSPLNLEVDPNIQAMRTQEKKQIKTLNNKFASFINKEQQNKMLETKWSLQHRRCLGATWTTCSTATSTFGSSWRLGQEKLKLKAGLGNMQGLVEDFKNKYQDEINKLTKMENEFVLIEKDVDEAYTNKVEIESHLERLTDEISFLRQLSEEEIWELQSQISDTSVVLSIDNSLPPDMDGIIAEVKGQYEELANCSRAEAESMHQIKYEDLQMLAEKHRDDLQHTKTEISKMNRNISGLQAETEGLKGQRASPEAATADFEQHGELALNNANTKLSELEAAVXQAKQDAARQLQEYQELINFRLALDVQIASYRKLLEGKESWLECGMQNISTHTKTTSGXADGLSSTYGGLTSPGLSYVLGSSFDSWAGFISFNRTSSTRAMVVKKMETLDGKLVSESSDVLPK

SEQ ID NO: 11030 - protein, 1817 aa, Homo sapiens
WSLLQGFKSTCFYIMTSLKRSQTERPLATDRASVVGTDGTPKVHTDDFYMRRFRSQNGSLGSSVMAPVGPPRSEGSHHITSTPGVPKMGVRARIADWPPRKENIKESSRSSQEIETSSCLDSLSSKSSPVSQGSSVSLNSNDSAMLKSIQNTLKNKTRPSENMDSRFLMPEAYPSSPRKALRRIRQRSNSDITISELDVDSFDECISPTYKTGPSLHREYGSTSSIDKQGTSGESFFDLLKGYKDDKSDRGPTPTKLSDFLITGGGKGSGFSLDVIDGPISQRENLRLFKEREKPLKRRSKSETGDSSIFRKLRNAKGEELGKSSDLEDNRSEDSVRPWTCPKCFAHYDVQSILFDLNEAIMNRHNVIKRRNTTTGASAAAVASLVSGPLSHSASFSSPMGSTEDLNSKGSLSMDQGDDKSNELVMSCPYFRNEIGGEGERKISLSKSNSGSFSGCESASFESTLSSHCTNAGVAVLEVPKENLVLHLDRVKRYIVEHVDLGAYYYRKFFYQKEHWNYFGADENLGPVAVSIRREKPDEMKENGSPYNYRIIFRTSELMTLRGSVLEDAIPSTAKHSTARGLPLKEVLEHVVPELNVQCLRLAFNTPKVTEQLMKLDEQGLNYQQKVGIMYCKAGQSTEEEMYNNESAGPAFEEFLQLLGERVRLKGFEKYRAQLDTKTDSTGTHSLYTTYKDYEIMFHVSTMLPYTPNNKQQLLRKRHIGNDIVTIVFQEPGAQPFSPKNIRSHFQHVFVIVRVHNPCSDSVCYSVAVTRSRDVPSFGPPIPKGVTFPKSNVFRDFLLAKVINAENAAHKSEKFRAMATRTRQEYLKDLAEKNVTNTPIDPSGKFPFISLASKKKEKSKPYPGAELSSMGAIVWAVRAEDYNKAMELDCLLGISNEFIVLIEQETKSVVFNCSCRDVIGWTSTDTSLKIFYERGECVSVGSFINIEEIKEIVKRLQFVSKGCESVEMTLRRNGLGQLGFHVNYEGIVADVEPYGYAWQAGLRQGSRLVEICKVAVATLSHEQMIDLLRTSVTVKVVIIPPHDDCTPRRSCSETYRMPVMEYKMNEGVSYEFKFPFRNNNKWQRNASKGPHSPQVPSQVQSPMTSRLNAGKGDGKMPPPERAANIPRSISSDGRPLERRLSPGSDIYVTVSSMALARSQCRNSPSNLSSSSDTGSVGGTYRQKSMPEGFGVSRRSPASIDRQNTQSDIGGSGKSTPSWQRSEDSIADQMAYSYRGPQDFNSFVLEQHEYTEPTCHLPAVSKVLPAFRESPSGRLMRQDPVVHLSPNKQGHSDSHYSSHSSSNTLSSNASSAHSDEKWYDGDRTESELNSYNYLQGTSADSGIDTTSYGPSHGSTASLGAATSSPRSGPGKEKVAPLWHSSSEVISMADRTLETESHGLDRKTESSLSLDIHSKSQAGSTPLTRENSTFSINDAASHTSTMSSRHSASPVVFTSARSSPKEELHPAAPSQLAPSFSSSSSSSSGPRSFYPRQGATSKYLIGWKKPEGTINSVGFMDTRKRHQSDGNEIAHTRLRASTRDLRASPKPTSKSTIEEDLKKLIDLESPTPESQKSFKFHALSSPQSPFPSTPTSRRALHRTLSDESIYNSQREHFFTSRASLLDQALPNDVLFSSTYPSLPKSLPLRRPSYTLGMKSLHGEFSASDSSLTDIQETRRQPMPDPGLMPLPDTAADLDWSNLVDAAKAYEVQRASFFAASDENHRPLSAASNSDQLEDQALPQMKPYSSKDSSPTLASKVDQLEGMLKMLREDLKKEKEDKAHLQAEVQHLREDNLRLQEESQNASDKLKKFTEWVFNTIDMS

SEQ ID NO: 11031 - protein, 1729 aa, Homo sapiens
MKVSTLRESSAMASPLPREMEEELVPTGSEPGDTRAKPPVKPKPRALPAKPALPAKPSLLVPVGPRPPRGPLAELPSARKMNMPAGPQPYGGSKRPLPFAPRPAVEASTGGEATQETGKEEAGKEEPPPLTPPARCAAPGGVRKAPAPFRPASERFAATTVEEILAKMEQPRKEVLASPDRLWGSRLTFNHDGSSRYGPRTYGTTTAPRDEDGSTLFRGWSQEGPVKSPAECREEHSKTPEERSLPSDLAFNGDLAKAASSELPADISKPWIPSSPAPSSENGGPASPGLPAEASGSGPGSPHLHPPDKSSPCHSQLLEAQSPEASQASPCPAVTPSAPSAALPDEGSRHTPSPGLPAEGAPEAPRPSSPPPEVLEPHSLDQPPATSSRPLIEVGELLDLTRTFPSGGEEEAKGDAHLRPTSLVQRRFSEGVLQSPSQDQEKLGGSLAALPQGQGSQLALDRPFGAESNWSLSQSFEWTFPTRPSGLGVWRLDSPPPSPITEASEAAEAAEAGNLAVSSREEGVSQQGQGAGSAPSGSGSSWVQGDDPSMSLTQKGDGESQPQFPAVPLEPLPTTEGTPGLPLQQAEERYESQEPLAGQESPLPLATREAALPILEPVLGQEQPAAPDQPCVLFADAPEPGQALPVEEEAVTLARAETTQARTEAQDLCRASPEPPGPESSSRWLDDLLASPPPSGGGARRGAGAELKDTQSPSTCSEGLLGWSQKDLQSEFGITGDPQPSSFSPSSWCQGASQDYGLGGASPRGDPGLGERDWTSKYGQGAGEGSTREWASRCGIGQEEMEASSSQDQSKVSAPGVLTAQDRVVGKPAQLGTQRSQEADVQDWEFRKRDSQGTYSSRDAELQDQEFGKRDSLGTYSSRDVSLGDWEFGKRDSLGAYASQDANEQGQDLGKRDHHGRYSSQDADEQDWEFQKRDVSLGTYGSRAAEPQEQEFGKSAWIRDYSSGGSSRTLDAQDRSFGTRPLSSGFSPEEAQQQDEEFEKKIPSVEDSLGEGSRDAGRPGERGSGGLFSPSTAHVPDGALGQRDQSSWQNSDASQEVGGHQERQQAGAQGPGSADLEDGEMGKRGWVGEFSLSVGPQREAAFSPGQQDWSRDFCIEASERSYQFGIIGNDRVSGAGFSPSSKMEGGHFVPPGKTTAGSVDWTDQLGLRNLEVSSCVGSGGSSEARESAVGQMGWSGGLSLRDMNLTGCLESGGSEEPGGIGVGEKDWTSDVNVKSKDLAEVGEGGGHSQARESGVGQTDWSGVEAGEFLKSRERGVGQADWTPDLGLRNMAPGAVCSPGESKELGVGQMDWGNNLGLRDLEVTCDPDSGGSQGLRGCGVGQMDWTQDLAPQNVELFGAPSEAREHGVGGVSQCPEPGLRHNGSLSPGLEARDPLEARELGVGETSGPETQGEDYSSSSLEPHPADPGMETGEALSFGASPGRCPARPPPFGSQGLLEEMLAASSSKAVARRESAASGLGGLLEEEGAGAGAAQEEVLEPGRDSPPSWRPQPDGEASQTEDVDGTWGSSAARWSDQGPAQTSRRPSQGPPARSPSQDFSFIEDTEILDSAMYRSRANLGRKRGHRAPVIRPGGTLGLSEAADSDAHLFQDSTEPRASRVPSSDEEVVEEPQSRRTRMSLGTKGLKVNLFPGLSPSALKAKLRPRNRSAEEGELAESKSSQKESAVQRSKSCKVPGLGKPLTLPPKPEKSSGSEGSSPNWLQALKLKKKKV

SEQ ID NO: 11032 - protein, 388 aa, Homo sapiens
MFAKGKGSAVPSDGQAREKLALYVYEYLLHVGAQKSAQTFLSEIRWEKNITLGEPPGFLHSWWCVFWDLYCAAPERRDTCEHSSEAKAFHDYSAAAAPSPVLGNIPPNDGMPGGPIPPGFFQGPPGSQPSPHAQPPPHNPSSMMGPHSQPFMSPRYAGGPRPPIRMGNQPPGGVPGTQPLLPNSMDPTRQQGHPNMGGSMQRMNPPRGMGPMGPGPQNYGSGMRPPPNSLGPAMPGINMGPGAGRPWPNPNSANSIPYSSSSPGTYVGPPGGGGPPGTPIMPSPADSTNSSDNIYTMINPVPPGGSRSNFPMGPGSDGPMGGMGGMEPHHMNGSLGSGDIDGLPKNSPNNISGISNPPGTPRDDGELGGNFLHSFQNDNYSPSMTMSV

SEQ ID NO: 11033 - protein, 368 aa, Homo sapiens
MFAKGKGSAVPSDGQAREKLALYVYEYLLHVGAQKSAQTFLSEIRWEKNITLGEPPGFLHSWWCVFWDLYCAAPERRDTCEHSSEAKAFHDYSAAAAPSPVLGNIPPNDGMPGGPIPPGFFQGPPGSQPSPHAQPPPHNPSSMMGPHSQPPGGVPGTQPLLPNSMDPTRQQGHPNMGGSMQRMNPPRGMGPMGPGPQNYGSGMRPPPNSLGPAMPGINMGPGAGRPWPNPNSANSIPYSSSSPGTYVGPPGGGGPPGTPIMPSPADSTNSSDNIYTMINPVPPGGSRSNFPMGPGSDGPMGGMGGMEPHHMNGSLGSGDIDGLPKNSPNNISGISNPPGTPRDDGELGGNFLHSFQNDNYSPSMTMSV

SEQ ID NO: 11034 - protein, 361 aa, Homo sapiens
MFAKGKGSAVPSDGQAREKLALYVYEYLLHVGAQKSAQTFLSEIRWEKNITLGEPPGFLHSWWCVFWDLYCAAPERRDTCEHSSEAKAFHDYSAAAAPSPVLGNIPPNDGMPGGPIPPGFFQPFMSPRYAGGPRPPIRMGNQPPGGVPGTQPLLPNSMDPTRQQGHPNMGGSMQRMNPPRGMGPMGPGPQNYGSGMRPPPNSLGPAMPGINMGPGAGRPWPNPNSANSIPYSSSSPGTYVGPPGGGGPPGTPIMPSPADSTNSSDNIYTMINPVPPGGSRSNFPMGPGSDGPMGGMGGMEPHHMNGSLGSGDIDGLPKNSPNNISGISNPPGTPRDDGELGGNFLHSFQNDNYSPSMTMSV

SEQ ID NO: 11035 - protein, 602 aa, Homo sapiens [sequence omitted]

SEQ ID NO: 11036 - protein, 119 aa, Homo sapiens
MSTVGLFHFPTPLTRICPAPWGLRLWEKLTLLSPGIAVTPVQMAGKKDYPALLSLDENELEEQFVKGHGPGGQATNKTSNCVVLKHIPSGIVVKVDHRRPLRGEAPPKGSTASRDFSQV

SEQ ID NO: 11037 - protein, 558 aa, Homo sapiens
MAALTRDPQFQKLQQWYREHRSELNLRRLFDANKDRFNHFSLTLNTNHGHILVDYSKNLVTEDVMRMLVDLAKSRGVEAARERMFNGEKINYTEGRAVLHVALRNRSNTPILVDGKDVMPEVNKVLDKMKSFCQRVRSGDWKGYTGKTITDVINIGIGGSDLGPLMVTEALKPYSSGGPRVWYVSNIDGTHIAKTLAQLNPESSLFIIASKTFTTQETITNAETAKEWFLQAAKDPSAVAKHFVALSTNTTKVKEFGIDPQNMFEFWDWVGGRYSLWSAIGLSIALHVGFDNFEQLLSGAHWMDQHFRTTPLEKNAPVLLALLGIWYINCFGCETHAMLPYDQYLHRFAAYFQQGDMESNGKYITKSGTRVDHQTGPIVWGEPGTNGQHAFYQLIHQGTKMIPCDFLIPVQTQHPIRKGLHHKILLANFLAQTEALMRGKSTEEARKELQAAGKSPEDLERLLPHKVFEGNRPTNSIVFTKLTPFMLGALVAMYEHKIFVQGIIWDINSFDQWGVELGKQLAKKIEPELDGSAQVTSHDASTNGLINFIKQQREARVQ

SEQ ID NO: 11038 - protein, 394 aa, Homo sapiens
MAAVVIQSYWRGYLMRRQTHFSTRLHTAATEGLPNSSIKNQTILKKGKRENIVNIRKQREKAAILIQAVWKGFILRKKLTTALEAIKNEESDEEYREIDLEDFIFDEIPGNLKWDDTSFNLPSNPAQAWLCNDKENLSSSEHTQFNSRSENKTSSWTPESKTSRKSLLKSEKEKKISEEWGFKDISTAQQMLKRAQKMKSKKLKKKIDSTVRLALFKNNENKVSLPKSPKMVQPRRDGYFEGIEEDPIHKDTTANEKLERNREYTYQWLHTQVGVHETTSSRNMKCNHFLPELDPDVLNGGRVQLVARLVSREDTDLDLFSMTNGSALSVNREKKNQAHRHSAGSSSNSVKGIPISPIITNTRPSKKERISFRDNPVQLSGGWGSGKKKANISN

SEQ ID NO: 11039 - protein, 336 aa, Homo sapiens
VIGVMSKEYIPKGTRFGPLIGEIYTNDTVPKNANRKYFWRIYSRGELHHFIDGFNEEKSNWMRYVNPAHSPREQNLAACQNGMNIYFYTIKPIPANPHSSPGNTVSPVGPGSQEHRDSYAYLNASYGTEGLGSYPGYAPLPHLPPAFIPSYNAHYPKFLLPPYGMNCNGLSAVSSMNGINNFGLFPRLCPVYSNLLGGGSLPHPMLNPTSLPSSLPSDGARRLLQPEHPREVLVPAPHSAFSFTGAAASMKDKACSPTSGSPTAGTAATAEHVVQPKATSAAMAAPSSDEAMNLIKNKRNMTGYKTLPYPLKKQNGKIKYECNVCAKTFGQLSNLK

SEQ ID NO: 11040 - protein, 1082 aa, Homo sapiens
MAARRITQETFDAVLQEKAKRYHMDASGEAVSETLQFKAQDLLRAVPRSRAEMYDDVHSDGRYSLSGSVAHSRDAGREGLRSDVFPGPSFRSSNPSISDDSYFRKECGRDLEFSHSDSRDQVIGHRKLGHFRSQDWKFALRGSWEQDFGHPVSQESSWSQEYSFGPSAVLGDFGSSRLIEKECLEKESRDYDVDHPGEADSVLRGSSQVQARGRALNIVDQEGSLLGKGETQGLLTAKGGVGKLVTLRNVSTKKIPTVNRITPKTQGTNQIQKNTPSPDVTLGTNPGTEDIQFPIQKIPLGLDLKNLRLPRRKMSFDIIDKSDVFSRFGIEIIKWAGFHTIKDDIKFSQLFQTLFELETETCAKMLASFKCSLKPEHRDFCFFTIKFLKHSALKTPRVDNEFLNMLLDKGAVKTKNCFFEIIKPFDKYIMRLQDRLLKSVTPLLMACNAYELSVKMKTLSNPLDLALALETTNSLCRKSLALLGQTFSLASSFRQEKILEAVGLQDIAPSPAAFPNFEDSTLFGREYIDHLKAWLVSSGCPLQVKKAEPEPMREEEKMIPPTKPEIQAKAPSSLSDAVPQRADHRVVGTIDQLVKRVIEGSLSPKERTLLKEDPAYWFLSDENSLEYKYYKLKLAEMQRMSENLRGADQKPTSADCAVRAMLYSRAVRNLKKKLLPWQRRGLLRAQGLRGWKARRATTGTQTLLSSGTRLKHHGRQAPGLSQAKPSLPDRNDAAKDCPPDPVGPSPQDPSLEASGPSPKPAGVDISEAPQTSSPCPSADIDMKTMETAEKLARFVAQVGPEIEQFSIENSTDNPDLWFLHDQNSSAFKFYRKKVFELCPSICFTSSPHNLHTGGGDTTGSQESPVDLMEGEAEFEDEPPPREAELESPEVMPEEEDEDDEDGGEEAPAPGGAGKSEGSTPADGLPGEAAEDDLAGAPALSQASSGTCFPRKRISSKSLKVGMIPAPKRVCLIQEPKVHEPVRIAYDRPRGRPMSKKKKPKDLDFAQQKLTDKNLGFQMLQKMGWKEGHGLGSLGKGIREPVSVGTPSEGEGLGADGQEHKEDTFDVFRQRMMQMYRHKRANK

SEQ ID NO: 11041 - protein, 1096 aa, Homo sapiens
MSPPRAAAAAGQNNMAARRITQETFDAVLQEKAKRYHMDASGEAVSETLQFKAQDLLRAVPRSRAEMYDDVHSDGRYSLSGSVAHSRDAGREGLRSDVFPGPSFRSSNPSISDDSYFRKECGRDLEFSHSDSRDQVIGHRKLGHFRSQDWKFALRGSWEQDFGHPVSQESSWSQEYSFGPSAVLGDFGSSRLIEKECLEKESRDYDVDHPGEADSVLRGGSQVQARGRALNIVDQEGSLLGKGETQGLLTAKGGVGKLVTLRNVSTKKIPTVNRITPKTQGTNQIQKNTPSPDVTLGTNPGTEDIQFPIQKIPLGLDLKNLRLPRRKMSFDIIDKSDVFSRFGIEIIKWAGFHTIKDDIKFSQLFQTLFELETETCAKMLASFKCSLKPEHRDFCFFTIKFLKHSALKTPRVDNEFLNMLLDKGAVKTKNCFFEIIKPFDKYIMRLQDRLLKSVTPLLMACNAYELSVKMKTLSNPLDLALALETTNSLCRKSLALLGQTFSLASSFRQEKILEAVGLQDIAPSPAAFPNFEDSTLFGREYIDHLKAWLVSSGCPLQVKKAEPEPMREEEKMIPPTKPEIQAKAPSSLSDAVPQRADHRVVGTIDQLVKRVIEGSLSPKERTLLKEDPAYWFLSDENSLEYKYYKLKLAEMQRMSENLRGADQKPTSADCAVRAMLYSRAVRNLKKKLLPWQRRGLLRAQGLRGWKARRATTGTQTLLSSGTRLKHHGRQAPGLSQAKPSLPDRNDAAKDCPPDPVGPSPQDPSLEASGPSPKPAGVDISEAPQTSSPCPSADIDMKTMETAEKLARFVAQVGPEIEQFSIENSTDNPDLWFLHDQNSSAFKFYRKKVFELCPSICFTSSPHNLHTGGGDTTGSQESPVDLMEGEAEFEDEPPPREAELESPEVMPEEEDEDDEDGGEEAPAPGGAGKSEGSTPADGLPGEAAEDDLAGAPALSQASSGTCFPRKRISSKSLKVGMIPAPKRVCLIQEPKVHEPVRIAYDRPRGRPMSKKKKPKDLDFAQQKLTDKNLGFQMLQKMGWKEGHGLGSLGKGIREPVSVGTPSEGEGLGADGQEHKEDTFDVFRQRMMQMYRHKRANK

SEQ ID NO: 11042 - protein, 955 aa, Homo sapiens
WEQDFGHPVSQESSWSQEYSFGPSAVLGDFGSSRLIEKECLEKESRDYDVDHPGEADSVLRGGSQVQARGRALNIVDQEGSLLGKGETQGLLTAKGGVGKLVTLRNVSTKKIPTVNRITPKTQGTNQIQKNTPSPDVTLGTNPGTEDIQFPIQKIPLGLDLKNLRLPRRKMSFDIIDKSDVFSRFGIEIIKWAGFHTIKDDIKFSQLFQTLFELETETCAKMLASFKCSLKPEHRDFCFFTIKFLKHSALKTPRVDNEFLNMLLDKGAVKTKNCFFEIIKPFDKYIMRLQDRLLKSVTPLLMACNAYELSVKMKTLSNPLDLALALETTNSLCRKSLALLGQTFSLASSFRQEKILEAVGLQDIAPSPAAFPNFEDSTLFGREYIDHLKAWLVSSGCPLQVKKAEPEPMREEEKMIPPTKPEIQAKAPSSLSDAVPQRADHRVVGTIDQLVKRVIEGSLSPKERTLLKEDPAYWFLSDENSLEYKYYKLKLAEMQRMSENLRGADQKPTSADCAVRAMLYSRAVRNLKKKLLPWQRRGLLRAQGLRGWKARRATTGTQTLLSSGTRLKHHGRQAPGLSQAKPSLPDRNDAAKDCPPDPVGPSPQDPSLEASGPSPKPAGVDISEAPQTSSPCPSADSALCFVVDMKTMETAEKLARFVAQVGPEIEQFSIENSTDNPDLWFLHDQNSSAFKFYRKKVFELCPSICFTSSPHNLHTGGGDTTGSQESPVDLMEGEAEFEDEPPPREAELESPEVMPEEEDEDDEDGGEEAPAPGGAGKSEGSTPADGLPGEAAEDDLAGAPALSQASSGTCFPRKRISSKSLKVGMIPAPKRVCLIQEPKVHEPVRIAYDRPRGRPMSKKKKPKDLDFAQQKLTDKNLGFQMLQKMGWKEGHGLGSLGKGIREPVSVYAAGSLGWEWVGPQSFHLQPAAWLLHSQDGLQLAVDFCFLNRRHLQMRS

SEQ ID NO: 11043 - protein, 994 aa, Homo sapiens
MYDDVHSDGRYSLSGSVAHSRDAGREGLRSDVFPGPSFRSSNPSISDDSYFRKECGRDLEFSHSDSRDQVIGHRKLGHFRSQDWKFALRGSWEQDFGHPVSQESSWSQEYSFGPSAVLGDFGSSRLIEKECLEKESRDYDVDHPGEADSVLRGGSQVQARGRALNIVDQEGSLLGKGETQGLLTAKGGVGKLVTLRNVSTKKIPTVNRITPKTQGTNQIQKNTPSPDVTLGTNPGTEDIQFPIQKIPLGLDLKNLRLPRRKMSFDIIDKSDVFSRFGIEIIKWAGFHTIKDDIKFSQLFQTLFELETETCAKMLASFKCSLKPEHRDFCFFTIKFLKHSALKTPRVDNEFLNMLLDKGAVKTKNCFFEIIKPFDKYIMRLQDRLLKSVTPLLMACNAYELSVKMKTLSNPLDLALALETTNSLCRKSLALLGQTFSLASSFRQEKILEAVGLQDIAPSPAAFPNFEDSTLFGREYIDHLKAWLVSSGCPLQVKKAEPEPMREEEKMIPPTKPEIQAKAPSSLSDAVPQRADHRVVGTIDQLVKRVIEGSLSPKERTLLKEDPAYWFLSDENSLEYKYYKLKLAEMQRMSENLRGADQKPTSADCAVRAMLYSRAVRNLKKKLLPWQRRGLLRAQGLRGWKARRATTGTQTLLSSGTRLKHHGRQAPGLSQAKPSLPDRNDAAKDCPPDPVGPSPQDPSLEASGPSPKPAGVDISEAPQTSSPCPSADSALCFVVDMKTMETAEKLARFVAQVGPEIEQFSIENSTDNPDLWFLHDQNSSAFKFYRKKVFELCPSICFTSSPHNLHTGGGDTTGSQESPVDLMEGEAEFEDEPPPREAELESPEASSGTCFPRKRISSKSLKVGMIPAPKRVCLIQEPKVHEPVRIAYDRPRGRPMSKKKKPKDLDFAQQKLTDKNLGFQMLQKMGWKEGHGLGSLGKGIREPVSVYAAGSLGWEWVGPQSFHLQPAAWLLHSQDGLQLAVDFCFLNRRHLQMRS

SEQ ID NO: 11044 - protein, 520 aa, Homo sapiens
MPGSLPLNAEACWPKDVGIVALEIYFPSQYVDQAELEKYDGVDAGKYTIGLGQAKMGFCTDREDINSLCMTVVQNLMERNNLSYDCIGRLEVGTETIIDKSKSVKTNLMQLFEESGNTDIEGIDTTNACYGGTAAVFNAVNWIESSSWDGRYALVVAGDIAVYATGNARPTGGVGAVALLIGPNAPLIFERGLRGTHMQHAYDFYKPDMLSEYPIVDGKLSIQCYLSALDRCYSVYCKKIHAQWQKEGNDKDFTLNDFGFMIFHSPYCKLVQKSLARMLLNDFLNDQNRDKNSIYSGLEAFGDVKLEDTYFDRDVEKAFMKASSELFSQKTKASLLVSNQNGNMYTSSVYGSLASVLAQYSPQQLAGKRIGVFSYGSGLAATLYSLKVTQDATPGSALDKITASLCDLKSRLDSRTGVAPDVFAENMKLREDTHHLVNYIPQGSIDSLFEGTWYLVRVDEKHRRTYARRPTPNDDTLDEGVGLVHSNIATEHIPSPAKKVPRLPATAAEPEAAVISNGEH

SEQ ID NO: 11045 - protein, 520 aa, Homo sapiens
MPGSLPLNAEACWPKDVGIVALEIYFPSQYVDQAELEKYDGVDAGKYTIGLGQAKMGFCTDREDINSLCMTVVQNLMERNNLSYDCIGRLEVGTETIIDKSKSVKTNLMQLFEESGNTDIEGIDTTNACYGGTAAVFNAVNWIESSSWDGRYALVVAGDIAVYATGNARPTGGVGAVALLIGPNAPLIFERGLRGTHMQHAYDFYKPDMLSEYPIVDGKLSIQCYLSALDRCYSVYCKKIHAQWQKEANDNDFTLNDFGFMIFHSPYCKLVQKSLARMLLNDFLNDQNRDKNSIYSGLKAFGDVKLEDTYFDRDVEKAFMKASSELFSQKTKASLLVSNQNGNMYTSSVYGSLASVLAQYSPQHLAGKRIGVFSYGSGLAATLYSLKVTQDATPGSALDKITASLCDLKSRLDSRTGVAQDVFAENMKLREDTHHLVNYIPQGSIDSLFEGTWYLVRVDEKHRRTYARRPTPNDDTLDEGVGLVHSNIATEHIPSPAKKVPRLPATAAEPEAAVISNGVW

SEQ ID NO: 11046 - protein, 568 aa, Homo sapiens
MASSCSVQVKLELGHRAQVRKKPTVEGFTHDWMVFVRGPEHSNIQHFVEKVVFHLHESFPRPKRVCKDPPYKVEESGYAGFILPIEVYFKNKEEPRKVRFDYDLFLHLEGHPPVNHLRCEKLTFNNPTEDFRRKLLKAGGDPNRSIHTSSSSSSSSSSSSSSSSSSSSSSSSSSSSSSSSSSSSSSSSSSTSFSKPHKLMKEHKEKPSKDSREHKSAFKEPSRDHNKSSKESSKKPKENKPLKEEKIVPKMAFKEPKPMSKEPKPDSNLLTITSGQDKKAPSKRPPISDSEELSAKKRKKSSSEALFKSFSSAPPLILTCSADKKQIKDKSHVKMGKVKIESETSEKKKSTLPPFDDIVDPNDSDVEENISSKSDSEQPSPASSSSSSSSSFTPSQTRQQGPLRSIMKDLHSDDNEEESDEVEDNDNDSEMERPVNRGGSRSRRVSLSDGSDSESSSASSPLHHEPPPPLLKTNNNQILEVKSPIKQSKSDKQIKNGECDKAYLDELVELHRRLMTLRERHILQQIVNLIEETGHFHITNTTFDFDLCSLDKTTVRKLQSYLETSGTS

SEQ ID NO: 11047 - protein, 138 aa, Homo sapiens
MKDLHSDDNEEESDEVEDNDNDSEMERPVNRGGSRSRRVSLSDGSDSESSSASSPLHHEPPPPLLKTNNNQILEVKSPIKQSKSDKQIKNGECDKIVNLIEETGHFHITNTTFDFDLCSLDKTTVRKLQSYLETSGTS

SEQ ID NO: 11048 - protein, 401 aa, Homo sapiens
MSLWKKTVYRSLCLALALLVAVTVFQRSLTPGQFLQEPPPPTLEPQKAQKPNGQLVNPNNFWKNPKDVAAPTPMASQGPQAWDVTTTNCSANINLTHQPWFQVLEPQFRQFLFYRHCRYFPMLLNHPEKCRGDVYLLVVVKSVITQHDRREAIRQTWGRERQSAGGGRGAVRTLFLLGTASKQEERTHYQQLLAYEDRLYGDILQWGFLDTFFNLTLKEIHFLKWLDIYCPHVPFIFKGDDDVFVNPTNLLEFLADRQPQENLFVGDVLQHARPIRRKDNKYYIPGALYGKASYPPYAGGGGFLMAGSLARRLHHACDTLELYPIDDVFLGMCLEVLGVQPTAHEGFKTFGISRNRNSRMNKEPCFFRAMLVVHKLLPPELLAMWGLVHSNLTCSRKLQVL

SEQ ID NO: 11049 - protein, 309 aa, Homo sapiens
MRENNQSSTLEFILLGVTGQQEQEDFFYILFLFIYPITLIGNLLIVLAICSDVRLHNPMYFLLANLSLVDIFFSSVTIPKMLANHLLGSKSISFGGCLTQMYFMIALGNTDSYILAAMAYDRAVAISHPLHYTTIMSPRSCIWLIAGSWVIGNANALPHTLLTASLSFCGNQEVANFYCDITPLLKLSCSDIHFHVKMMYLGVGIFSVPLLCIIVSYIRVFSTVFQVPSTKGVLKAFSTCGSHLTVVSLYYGTVMGTYFRPLTNYSLKDAVITVMYTAVTPMLNPFIYSLRNRDMKAALRKLFNKRISS

SEQ ID NO: 11050 - protein, 472 aa, Homo sapiens
MGCDRNCGLIAGAVIGAVLAVFGGILMPVGDLLIQKTIKKQVVLEEGTIAFKNWVKTGTEVYRQFWIFDVQNPQEVMMNSSNIQVKQRGPYTYRVRFLAKENVTQDAEDNTVSFLQPNGAIFEPSLSVGTEADNFTVLNLAVAAASHIYQNQFVQMILNSLINKSKSSMFQVRTLRELLWGYRDPFLSLVPYPVTTTVGLFYPYNNTADGVYKVFNGKDNISKVAIIDTYKGKRNLSYWESHCDMINGTDAASFPPFVEKSQVLQFFSSDICRSIYAVFESDVNLKGIPVYRFVLPSKAFASPVENPDNYCFCTEKIISKNCTSYGVLDISKCKEGRPVYISLPHFLYASPDVSEPIDGLNPNEEEHRTYLDIQPITGFTLQFAKRLQVNLLVKPSEKIQVLKNLKRNYIVPILWLNETGTIGDEKANMFRSQVTGKINLLGLIEMILLSVGVVMFVAFMISYCACRSKTIK

SEQ ID NO: 11051 - protein, 471 aa, Homo sapiens
GCDRNCGLIAGAVIGAVLAVFGGILMPVGDLLIQKTIKKQVVLEEGTIAFKNWVKTGTEVYRQFWIFDVQNPQEVMMNSSNIQVKQRGPYTYRVRFLAKENVTQDAEDNTVSFLQPNGAIFEPSLSVGTEADNFTVLNLAVAAASHIYQNQFVQMILNSLINKSKSSMFQVRTLRELLWGYRDPFLSLVPYPVTTTVGLFYPYNNTADGVYKVFNGKDNISKVAIIDTYKGKRNLSYWESHCDMINGTDAASFPPFVEKSQVLQFFSSDICRSIYAVFESDVNLKGIPVYRFVLPSKAFASPVENPDNYCFCTEKIISKNCTSYGVLDISKCKEGRPVYISLPHFLYASPDVSEPIDGLNPNEEEHRTYLDIEPITGFTLQFAKRLQVNLLVKPSEKIQVLKNLKRNYIVPILWLNETGTIGDEKANMFRSQVTGKINLLGLIEMILLSVGVVMFVAFMISYCACRSKTIK

SEQ ID NO: 11052 - protein, 379 aa, Homo sapiens
MKEYVLLLFLALCSAKPFFSPSHIALKNMMLKDMEDTDDDDDDDDDDDDDEDNSLFPTREPRSHFFPFDLFPMCPFGCQCYSRVVHCSDLGLTSVPTNIPFDTRMLDLQNNKIKEIKENDFKGLTSLYGLILNNNKLTKIHPKAFLTTKKLRRLYLSHNQLSEIPLNLPKSLAELRIHENKVKKIQKDTFKGMNALHVLEMSANPLDNNGIEPGAFEGVTVFHIRIAEAKLTSVPKGLPPTLLELHLDYNKISTVELEDFKRYKELQRLGLGNNKITDIENGSLANIPRVREIHLENNKLKKIPSGLPELKYLQIIFLHSNSIARVGVNDFCPTVPKMKKSLYSAISLFNNPVKYWEMQPATFRCVLSRMSVQLGNFGM

SEQ ID NO: 11053 - protein, 399 aa, Homo sapiens
MAVTMLQDWCRWMGVNARRGLLILGIPEDCDDAEFQESLEAALRPMGHFTVLGKAFREEDNATAALVELDREVNYALVPREIPGTGGPWNVVFVPRCSGEEFLGLGRVFHFPEQEGQMVESVAGALGVGLRRVCWLRSIGQAVQPWVEAVRCQSLGVFSGRDQPAPGEESFEVWLDHTTEMLHVWQGVSERERRRRLLEGLRGTALQLVHALLAENPARTAQDCLAALAQVFGDNESQATIRVKCLTAQQQSGERLSAFVLRLEVLLQKAMEKEALARASADRVRLRQMLTRAHLTEPLDEALRKLRMAGRSPSFLEMLGLVRESEAWEASLARSVRAQTQEGAGARAGAQAVARASTKVEAVPGGPGREPEGLLQAGGQEAEELLQEGLKPVLEECDN

SEQ ID NO: 11054 - protein, 269 aa, Homo sapiens
MASEFKKKLFWRAVVAEFLATTLFVFISIGSALGFKYPVGNNQTAVQDNVKVSLAFGLSIATLAQSVGHISGAHLNPAVTLGLLLSCQISIFRALMYIIAQCVGAIVATAILSGITSSLTGNSLGRNDLADGVNSGQGLGIEIIGTLQLVLCVLATTDRRRRDLGGSAPLAIGLSVALGHLLAIDYTGCGINPARSFGSAVITHNFSNHWIFWVGPFIGGALAVLIYDFILAPRSSDLTDRVKVWTSGQVEEYDLDADDINSRVEMKPK

SEQ ID NO: 11055 - protein, 118 aa, Homo sapiens
MASEFKKKLFWRAVVAEFLATTLFVFISIGSALGFKYPVGNNQTAVQDNVKVSLAFGLSIATLAQSVGHISGAHLNPLSHWGCCSAARSASSVPSCTSSPSAWGPSSPPPSSQASPPP

SEQ ID NO: 11056 - protein, 717 aa, Homo sapiens
MSRRSQRLTRYSQGDDDGSSSSGGSSVAGSQSTLFKDSPLRTLKRKSSNMKRLSPAPQLGPSSDAHTSYYSESLVHESWFPPRSSLEELHGDANWGEDLRVRRRRGTGGSESSRASGLVGRKATEDFLGSSSGYSSEDDYVGYSDVDQQSSSSRLRSAVSRAGSLLWMVATSPGRLFRLLYWWAGTTWYRLTTAASLLDVFVLTRRFSSLKTFLWFLLPLLLLTCLTYGAWYFYPYGLQTFHPALVSWWAAKDSRRPDEGWEARDSSPHFQAEQRVMSRVHSLERRLEALAAEFSSNWQKEAMRLERLELRQGAPGQGGGGGLSHEDTLALLEGLVSRREAALKEDFRRETAARIQEELSALRAEHQQDSEDLFKKIVRASQESEARIQQLKSEWQSMTQESFQESSVKELRRLEDQLAGLQQELAALALKQSSVAEEVGLLPQQIQAVRDDVESQFPAWISQFLARGGGGRVGLLQREEMQAQLRELESKILTHVAEMQGKSAREAAASLSLTLQKEGVIGVTEEQVHHIVKQALQRYSEDRIGLADYALESGGASVISTRCSETYETKTALLSLFGIPLWYHSQSPRVILQPDVHPGNCWAFQGPQGFAVVRLSARIRPTAVTLEHVPKALSPNSTISSAPKDFAIFGFDEDLQQEGTLLGKFTYDQDGEPIQTFHFQAPTMATYQVVELRILTNWGHPEYTCIYRFRVHGEPAH

SEQ ID NO: 11057 - protein, 564 aa, Homo sapiens [sequence omitted]

SEQ ID NO: 11058 - protein, 549 aa, Homo sapiens
MRTGGRGISTPRKGVDSIIWAAGKDGEQHLEGLPEGTGSLRTSVGLRCQGTVRAGATEQALAQRAPLVIVHKSPVRNMEGGTSVHEEASSMGPNMDMPEHSPPADDLGHPEHHKPPLLCRSEPVNSNIQISQGPESHADGSRSSSIRLSVTGKNNSTILSHAKMSRMSTYATARAGPQKDGPEVYMRSVRESGVWSGARITVSGGARKGLGKELCLRGLGSLLASPRGAQPQERNAGRPTSAQCRASFQARAALGAMSCGRPPPDVDGMITLKVDNLTYRTSPDSLRRVFEKYGRVGDVYIPLEPHTKAPRGFAFVRFHDRSDAQDAEAAMDGAVLDERELRVRMARYGRRDLPRSSQEEPRGRSWGGRYGRRSGSPRGRHRSQSRGPSYSRSRSRSHYGGSRYSLSIYRRSRYSRSPYRRSHYRGSRYGRSPYSRSYSRHHYSRSPYRESHYRESRYRRSPYIRSSRNRSPYRRSHSKSGSRSRSPSISKSSSPRRSKSSSVSRSCSRSMSRSTSGSPPPTSKRESKSRSRSKSPPKSPEGEKGQVPS

SEQ ID NO: 11059 - protein, 282 aa, Homo sapiens
MSCGRPPPDVDGMITLKVDNLTYRTSPDSLRRVFEKYGRVGDVYIPREPHTKAPRGFAFVRFHDRRDAQDAEAAMDGAELDGRELRVQVARYGRRDLPRSRQGEPRGRSRGGGYGRRSRSYGRRSRSPRRRHRSRSRGPSCSRSRSRSRYRGSRYSRSPYSRSPYSRSRYSRSPYSRSRYRESRYGGSHYSSSGYSNSRYSRYHSSRSHSKSGSSTSSRSASTSKSSSARRSKSSSVSRSRSRSRSSSMTRSPPRVSKRKSKSRSRSKRPPKSPEEEGQMSS

SEQ ID NO: 11060 - protein, 293 aa, Homo sapiens
MSCGRPPPDVDGMITLKVDNLTYRTSPDCLRRVFEKYGRVGDVYIPREPHTKAPRGFAFVRFHYRSDAQDAEAAMDWAVLDGRELRVQMARYGRRDLPRSSQEEPSGRSWGGRYGRRSRSPRERHRSQSRGPSYSRSRSRSHYGGSRYSPSPYRRSRYSRSPYRRSHYRGSRYGPSPYSRSYSWHHYSRSPYRESHYRESRYRRSPYIRSSRNRSPYRRSHSKSGSRSRSPSISKSSSPRRSKSSSVSRSCSRSMSRSTSGSPPPTSKRESKSRSRSKSPPKSPEGEKGQVPS

SEQ ID NO: 11061 - protein, 674 aa, Homo sapiens
MAEVPEDYDSGPDEDGELEPERPELPGLHKLYENAEPDTMAKADSKLPAEIYQEPQPETEEEDFKEGEPDSAKNVQLKPGGTSQEGIAKESKRDVPSETEPGIHQEVKSETSREMGEFFKDLEAPMDETHKESDLEPPEEAKPNVTEDVFLESAMETDPDPVPPTETMSEVSGATVRERNLELLEEETEPGVPEESLRVQHEETGLEPPEQTKQDFPSEKLGESLEETDLQPPKMTKPETPEETQRESTEKKRTEPPEQARLEFLEKEPRKSSEEAGLEPPEETQPEVPEEMQRKATEEKGTELPERTKPDFPDHKPRKSTDENVPEPLEEIKLEFPEEESRKTNEETILEQSEMMKPESPEEIRKSNEKKNPQPPEETGPVLPQEINPQVEEKTQTKPTEKILELPDETKPRETHVEFSKEDRPEPIKSKYSVGNDELEHREPKRGKLSLSDKFRKEYYALGSLRESEESIGTHYEFLQPLQKLLNVSEECSYSDPSESQTELSEFVHEKEVVDLSQELKERVSEDDETQPEKGTELQFEHLNWDPEEVAEWISQLGFPQYKECFITNFISGRKLIHVNCSNLPQMGITNFEDMKAISRHTQELLEIEEPLFKRSISLPYRDIIGLYLEQKGHTGIKSDSLTLSEFVKAAGLQDYAPEITAPEENEELPCTEP

SEQ ID NO: 11062 - protein, 379 aa, Homo sapiens
MVFFTCNACGESVKKIQVEKHVSVCRNCECLSCIDCGKDFWGDDYKNHVKCISEDQKYGGKGYEGKTHKGDIKQQAWIQKISELIKRPNVSPKVRELLEQISAFDNVPRKKAKFQNWMKNSLKVHNESILDQVWNIFSEASNSEPVNKEQDQRPLHPVANPHAEISTKVPASKVKDAVEQQGEVKKNKRERKEERQKKRKREKKELKLENHQENSRNQKPKKRKKGQEADLEAGGEEVPEANGSAGKRSKKKKQRKDSASEEEARVGAGKRKRRHSEVETDSKKKKMKLPEHPEGGEPEDDEAPAKGKFNWKGTIKAILKQAPDNEITIKKLRKKVLAQYYTVTDEHHRSEEELLVIFNKKISKNPTFKLLKDKVKLVK

SEQ ID NO: 11063 - protein, 756 aa, Homo sapiens
MSRPGTATPALALVLLAVTLAGVGAQGAALEDPDYYGQEIWSREPYYARPEPELETFSPPLPAGPGEEWERRPQEPRPPKRATKPKKAPKREKSAPEPPPPGKHSNKKVMRTKSSEKAANDDHSVRVAREDVRESCPPLGLETLKITDFQLHASTVKRYGLGAHRGRLNIQAGINENDFYDGAWCAGRNDLQQWIEVDARRLTRFTGVITQGRNSLWLSDWVTSYKVMVSNDSHTWVTVKNGSGDMIFEGNSEKEIPVLNELPVPMVARYIRINPQSWFDNGSICMRMEILGCPLPDPNNYYHRRNEMTTTDDLDFKHHNYKEMRQLMKVVNEMCPNITRIYNIGKSHQGLKLYAVEISDHPGEHEVGEPEFHYIAGAHGNEVLGRELLLLLVQFVCQEYLARNARIVHLVEETRIHVLPSLNPDGYEKAYEGGSELGGWSLGRWTHDGIDINNNFPDLNTLLWEAEDRQNVPRKVPNHYIAIPEWFLSENATVAAETRAVIAWMEKIPFVLGGNLQGGELVVAYPYDLVRSPWKTQEHTPTPDDHVFRWLAYSYASTHRLMTDARRRVCHTEDFQKEEGTVNGASWHTVAGSLNDFSYLHTNCFELSIYVGCDKYPHESQLPEEWENNRESLIVFMEQVHRGIKGLVRDSHGKGIPNAIISVEGINHDIRTANDGDYWRLLNPGEYVVTAKAEGFTASTKNCMVGYDMGATRCDFTLSKTNMARIREIMEKFGKQPVSLPARRLKLRGRKRRQRG

SEQ ID NO: 11064 - protein, 1201 aa, Homo sapiens
MSRPGTATPALALVLLAVTLAGVGAQGAALEDPDYYGQEIWSREPYYARPEPELETFSPPLPAGPGEEWERRPQEPRPPKRATKPKKAPKREKSAPEPPPPGHIAQFTAALASTGISKPHTENTSSEDLETHIRGLLGQLPADLLPCKHSNKKVMRTKSSEKAANDDHSVRVAREDVRESCPPLGLETLKITDFQLHASTVKRYGLGAHRGRLNIQAGINENDFYDGAWCAGRNDLQQWIEVDARRLTRFTGVITQGRNSLWLSDWVTSYKVMVSNDSHTWVTVKNGSGDMIFEGNSEKEIPVLNELPVPMVARYIRINPQSWFDNGSICMRMEILGCPLPDPNNYYHRRNEMTTTDDLDFKHHNYKEMRQCSEWAIKKQEITVRKVITTTEGGENHNEGSEIHNKGSDNHNQGNDDHNEGGDDHNQGGDNHDQGSDNHNEGGDDHNQGGDNHNQGSDNHNEGADDHNERDKNHNQGGNNHNQGADNHNEGGGDHNNSDKNHNQRGDNHNQGSDNHNQGNDDHKEGGDAHNQRGENHNKGGGDHKQESDKNHNQRGVNHNQESDNHDQGSDDHKEGGDDHSKGSDNHDQGSDDHNGGGNDHSKGSDNHDQGGDDHNQGGDNYTQGSDNCNQGSDNHDQGGDNYTQGGDNYTQGSDNQNKAGDDHNQGGDNHTQGGDNCKRGSDNHDQGGGDYNQGGENHNSEGENHNQGSDSYSNGGDNHNQGGDNHNQGGGNHNEGGDDHNQRGNNHNQGGDSHSQGRCHHNQGVDNHNQLMKVVNEMCPNITRIYNIGKSHQGLKLYAVEISDHPGEHEVGEPEFHYIAGAHGNEVLGRELLLLLVQFVCQEYLARNARIVHLVEETRIHVLPSLNPDGYEKAYEGGSELGGWSLGRWTHDGIDINNNFPDLNTLLWEAEDRQNVPRKVPNHYIAIPEWFLSENATVAAETRAVIAWMEKIPFVLGGNLQGGELVVAYPYDLVRSPWKTQEHTPTPDDHVFRWLAYSYASTHRLMTDARRRVCHTEDFQKEEGTVNGASWHTVAGSLNDFSYLHTNCFELSIYVGCDKYPHESQLPEEWENNRESLIVFMEQVHRGIKGLVRDSHGKGIPNAIISVEGINHDIRTANDGDYWRLLNPGEYVVTAKAEGFTASTKNCMVGYDMGATRCDFTLSKTNMARIREIMEKFGKQPVSLPARRLKLRGQKRRQRG

SEQ ID NO: 11065 - protein, 247 aa, Homo sapiens
MLLLPLPLLLFLLCSRAEAGEIIGGTECKPHSRPYMAYLEIVTSNGPSKFCGGFLIRRNFVLTAAHCAGRSITVTLGAHNITEEEDTWQKLEVIKQFRHPKYNTSTLHHDIMLLKLKEKASLTLAVGTLPFPSQFNFVPPGRMCRVAGWGRTGVLKPGSDTLQEVKLRLMDPQACSHFRDFDHNLQLCVGNPRKTKSAFKGDSGGPLLCAGVAQGIVSYGRSDAKPPAVFTRISHYRPWINQILQAN

SEQ ID NO: 11066 - protein, 431 aa, Homo sapiens
MEGSASPPEKPRARPAAAVLCRGPVEPLVFLANFALVLQGPLTTQYLWHRFSADLGYNGTRQRGGCSNRSADPTMQEVETLTSHWTLYMNVGGFLVGLFSSTLLGAWSDSVGRRPLLVLASLGLLLQALVSVFVVQLQLHVGYFVLGRILCALLGDFGGLLAASFASVADVSSSRSRTFRMALLEASIGVAGMLASLLGGHWLRAQGYANPFWLALALLIAMTLYAAFCFGETLKEPKSTRLFTFRHHRSIVQLYVAPAPEKSRKHLALYSLAIFVVITVHFGAQDILTLYELSTPLCWDSKLIGYGSAAQHLPYLTSLLALKLLQYCLADAWVAEIGLAFNILGMVVFAFATITPLMFTGALFSAVACVNSLAMLTASGIFNSLYPATLNFMKGFPFLLGAGLLLIPAVLIGMLEKADPHLEFQQFPQSP

SEQ ID NO: 11067 - protein, 459 aa, Homo sapiens
MEGSASPPEKPRARPAAAVLCRGPVEPLVFLANFALVLQGPLTTQYLWHRFSADLGYNGTRQRGGCSNRSADPTMQEVETLTSHWTLYMNVGGFLVGLFSSTLLGAWSDSVGRRPLLVLASLGLLLQALVSVFVVQLQLHVGYFVLGRILCALLGDFGGLLAASFASVADVSSSRSRTFRMALLEASIGVAGMLASLLGGHWLRAQGYANPFWLALALLIAMTLYAAFCFGETLKEPKSTRLFTFRHHRSIVQLYVAPAPEKSRKHLALYSLAIFVVITVHFGAQDILTLYELSTPLCWDSKLIGYGSAAQHLPYLTSLLALKLLQYCLADAWVAEIGLAFNILGMVVFAFATITPLMFTGYGLLFLSLVITPVIRAKLSKLVRETEQGALFSAVACVNSLAMLTASGIFNSLYPATLNFMKGFPFLLGAGLLLIPAVLIGMLEKADPHLEFQQFPQSP

SEQ ID NO: 11068 - protein, 801 aa, Homo sapiens
VVAAGTTDVCHQAQLHRQFRGGPWASGCPPPLLYKVLASGQPAQLPSLRRRDSPVPLTLSPAAPAGSSAGTMGGRVFLVFLAFCVWLTLPGAETQDSRGCARWCPQDSSCVNATACRCNPGFSSFSEIITTPMETCDDINECATLSKVSCGKFSDCWNTEGSYDCVCSPGYEPVSGAKTFKNESENTCQDVDECSSGQHQCDSSTVCFNTVGSYSCRCRPGWKPRHGIPNNQKDTVCEDMTFSTWTPPPGVHSQTLSRFFDKVQDLGRDYKPGLANNTIQSILQALDELLEAPGDLETLPRLQQHCVASHLLDGLEDVLRGLSKNLSNGLLNFSYPAGTELSLEVQKQVDRSVTLRQNQAVMQLDWNQAQKSGDPGPSVVGLVSIPGMGKLLAEAPLVLEPEKQMLLHETHQGLLQDGSPILLSDVISAFLSNNDTQNLSSPVTFTFSHRSVIPRQKVLCVFWEHGQNGCGHWATTGCSTIGTRDTSTICRCTHLSSFAVLMAHYDVQEEDPVLTVITYMGLSVSLLCLLLAALTFLLCKAIQNTSTSLHLQLSLCLFLAHLLFLVAIDQTGHKVLCSIIAGTLHYLYLATLTWMLLEALYLFLTARNLTVVNYSSINRFMKKLMFPVGYGVPAVTVAISAASRPHLYGTPSRCWLQPEKGFIWGFLGPVCAIFSVNLVLFLVTLWILKNRLSSLNSEVSTLRNTRMLAFKATAQLFILGCTWCLGILQVGPAARVMAYLFTIINSLQGVFIFLVYCLLSQQVREQYGKWSKGIRKLKTESEMHTLSSSAKADTSKPSTVN

SEQ ID NO: 11069 - protein, 719 aa, Homo sapiens
MGGRVFLVFLAFCVWLTLPGAETQDSRGCARWCPQDSSCVNATACRCNPGFSSFSEIITTPMETCDDINECATLSKVSCGKFSDCWNTEGSYDCVCSPGYEPVSGAKTFKNESENTCQDVDECSSGQHQCDSSTVCFNTVGSYSCRCRPGWKPRHGIPNNQKDTVCEDMTFSTWTPPPGVHSQTLSRFFDKVQDLGRDYKPGLANNTIQSILQALDELLEAPGDLETLPRLQQHCVASHLLDGLEDVLRGLSKNLSNGLLNFSYPAGTELSLEVQKQVDRSVTLRQNQAVMQLDWNQAQKSGDPGMGKLLAEAPLVLEPEKQMLLHETHQGLLQDGSPILLSDVISAFLSNNDTQNLSSPVTFTFSHRSVIPRQKVLCVFWEHGQNGCGHWATTGCSTIGTRDTSTICRCTHLSSFAVLMAHYDVQEEDPVLTVITYMGLSVSLLCLLLAALTFLLCKAIQNTSTSLHLQLSLCLFLAHLLFLVAIDQTGHKVLCSIIAGTLHYLYLATLTWMLLEALYLFLTARNLTVVNYSSINRFMKKLMFPVGYGVPAVTVAISAASRPHLYGTPSRCWLQPEKGFIWGFLGPVCAIFSVNLVLFLVTLWILKNRLSSLNSEVSTLRNTRMLAFKATAQLFILGCTWCLGILQVGPAARVMAYLFTIINSLQGVFIFLVYCLLSQQVREQYGKWSKGIRKLKTESEMHTLSSSAKADTSKPSTVN

SEQ ID NO: 11070 - protein, 181 aa, Homo sapiens
MAAAAWLQVLPVILLLLGAHPSPLSFFSAGPATVAAADRSKWHIPIPSGKNYFSFGKILFRNTTIFLKFDGEPCDLSLNITWYLKSADCYNEIYNFKAEEVELYLEKLKEKRGLSGKYQTSSKLFQNCSELFKTQTFSGDFMHRLPLLGEKQEAKENGTNLTFIGDKTIQMPFLKKHFLDC

SEQ ID NO: 11071 - protein, 564 aa, Homo sapiens [sequence omitted]

SEQ ID NO: 11072 - protein, 147 aa, Homo sapiens [sequence omitted]

SEQ ID NO: 11073 - protein, 1063 aa, Homo sapiens
MECPSCQHVSKEETPKFCSQCGERLPPAAPIADSENNNSTMASASEGEMECGQELKEEGGPCLFPGSDSWQENPEEPCSKASWTVQESKKKKRKKKKKGNKSASSELASLPLSPASPCHLTLLSNPWPQDTALPHSQAQQSGPTGQPSQPPGTATTPLEGDGLSAPTEVGDSPLQAQALGEAGVATGSEAQSSPQFQDHTEGEDQDASIPSGGRGLSQEGTGPPTSAGEGHSRTEDAAQELLLPESKGGSSEPGTELQTTEQQAGASASTAVDAVAEPANAVKGAGKEMKEKTQRMKQPPATTPPFKTHCQEAETKTKDETAAAEEKVGKNEQGEPEDLKKPEGKNRSAAAVKNEKEQKNQEADVQEVKASTLSPGGGVTVFFHAIISLHFPFNPDLHKVFIRGGEEFGESKWDSNICELHYTRDLGHDRVLVEGIVCISKKHLDKYIPYKYVIYNGESFEYEFIYKHQQKKGEYVNRCLFIKSSLLGSGDWHQYYDIVYMKPHGRLQKVMNHITDGPRKDLVKGKQIAAALMLDSTFSILQTWDTINLNSFFTQFEQFCFVLQQPMIYEGQAQLWTDLQYREKEVKRYLWQHLKKHVVPLPDGKSTDFLPVDCPVRSKLKTGLIVLFVVEKIELLLEGSLDWLCHLLTSDASSPDEFHRDLSHILGIPQSWRLYLVNLCQRCMDTRTYTWLGALPVLHCCMELAPRHKDAWRQPEDTWAALEGLSFSPFREQMLDTSSLLQFMREKQHLLSIDEPLFRSWFSLLPLSHLVMYMENFIEHLGRFPAHILDCLSGIYYRLPGLEQVLNTQDVQDVQNVQNILEMLLRLLDTYRDKIPEEALSPSYLTVCLKLHEAICSSTKLLKFYELPALSAEIVCRMIRLLSLVDSAGQRDETGNNSVQTVFQGTLAATKRWLREVFTKNMLTSSGASFTYVKEIEVWRRLVEIQFPAEHGWKESLLGDMEWRLTKEEPLSQITAYCNSCWDTKGLEDSVAKTFEKCIIEAVSSACQVNNLSSWETDSGSQLCSAMTQLRAMKHPLGLSSSANSEIGKWAPSSLAKGNGAEI

SEQ ID NO: 11074 - protein, 1599 aa, Homo sapiens
MECPSCQHVSKEETPKFCSQCGERLPPAAPIADSENNNSTMASASEGEMECGQELKEEGGPCLFPGSDSWQENPEEPCSKASWTVQEGATSEVLVDAAVDLISDEWEAANAIPSKRRKQDAAPLEAASVPSADCEQSKKKKRKKKKKGNKSASSELASLPLSPASPCHLTLLSNPWPQDTALPHSQAQQSGPTGQPSQPPGTATTPLEGDGLSAPTEVGDSPLQAQALGEAGVATGSEAQSSPQFQDHTEGEDQDASIPSGGRGLSQEGTGPPTSAGEGHSRTEDAAQELLLPESKGGSSEPGTELQTTEQQAGASASMAVDAVAEPANAVKGAGKEMKEKTQRMKQPPATTPPFKTHCQEAETKTKDEMAAAEEKVGKNEQGEPEDLKKPEGKNRSAAAVKNEKEQKNQEADVQEVKASTLSPGGGVTVFFHAIISLHFPFNPDLHKVFIRGGEEFGESKWDSNICELHYTRDLGHDRVLVEGIVCISKKHLDKYIPYKYVIYNGESFEYEFIYKHQQKKGEYVNRCLFIKSSLLGSGDWHQYYDIVYMKPHGRLQKVMNHITDGPRKDLVKGKQIAAALMLDSTFSILQTWDTINLNSFFTQFEQFCFVLQQPMIYEGQAQLWTDLQYREKEVKRYLWQHLKKHVVPLPDGKSTDFLPVDCPVRSKLKTGLIVLFVVEKIELLLEGSLDWLCHLLTSDASSPDEFHRDLSHILGIPQSWRLYLVNLCQRCMDTRTYTWLGALPVLHCCMELAPRHKDAWRQPEDTWAALEGLSFSPFREQMLDTSSLLQFMREKQHLLSIDEPLFRSWFSLLPLSHLVMYMENFIEHLGRFPAHILDCLSGIYYRLPGLEQVLNTQDVQDVQNVQNILEMLLRLLDTYRDKIPEEALSPSYLTVCLKLHEAICSSTKLLKFYELPALSAEIVCRMIRLLSLVDSAGQRDETGNNSVQTVFQGTLAATKRWLREVFTKNMLTSSGASFTYVKEIEVWRRLVEIQFPAEHGWKESLLGDMEWRLTKEEPLSQITAYCNSCWDTKGLEDSVAKTFEKCIIEAVSSACQSQTSILQGFSYSDLRKFGIVLSAVITKSWPRTADNFNDILKHLLTLADVKHVFRLCGTDEKILANVTEDAKRLIAVADSVLTKVVGDLLSGTILVGQLELIIKHKNQFLDIWQLREKSLSPQDEQCAVEEALDWRREELLLLKKEKRCVDSLLKMCGNVKHLIQVDFGVLAVRHSQDLSSKRLNDTVTVRLSTSSNSQRATHYHLSSQVQEMAGKIDLLRDSHIFQLFWREAAEPLSEPKEDQEAAELLSEPEEESERHILELEEVYDYLYQPSYRKFIKLHQDLKSGEVTLAEIDVIFKDFVNKYTDLDSELKIMCTVDHQDQRDWIKDRVEQIKEYHHLHQAVHAAKVILQVKESLGLNGDFSVLNTLLNFTDNFDDFRRETLDQINQELIQAKKLLQDISEARCKGLQALSLRKEFICWVREALGGINELKVFVDLASISAGENDIDVDRVACFHDAVQGYASLLFKLDPSVDFSAFMKHLKKLWKALDKDQYLPRKLVSLILSLMQILLNRALLSNVRAVTVEMVAHLCGRFVHSRFQ

SEQ ID NO: 11075 - protein, 153 aa, Homo sapiens [sequence omitted]

SEQ ID NO: 11076 - protein, 235 aa, Homo sapiens
MNSYFTNPSLSCHLAGGQDVLPNVALNSTAYDPVRHFSTYGAAVAQNRIYSTPFYSPQENVVFSSSRGPYDYGSNSFYQEKDMLSNCRQNTLGHNTQTSIAQDFSSEQGRTAPQDQKASIQIYPWMQRMNSHSGVGYGADRRRGRQIYSRYQTLELEKEFHFNRYLTRRRRIEIANALCLTERQIKIWFQNRRMKWKKESNLTSTLSGGGGGATADSMGGKEEKREETEEEKQKE

SEQ ID NO: 11077 - protein, 475 aa, Homo sapiens
MQVAMNGKARKEAVQTAAKELLKFVNRSPSPFHAVAECRNRLLQAGFSELKETEKWNIKPESKYFMTRNSSTIIAFAVGGQYVPGNGFSLIGAHTDSPCLRVKRRSRRSQVGFQQVGVETYGGGIWSTWFDRDLTLAGRVIVKCPTSGRLEQQLVHVERPILRIPHLAIHLQRNINENFGPNTEMHLVPILATAIQEELEKGTPEPGPLNAVDERHHSVLMSLLCAHLGLSPKDIVEMELCLADTQPAVLGGAYDEFIFAPRLDNLHSCFCALQALIDSCAGPGSLATEPHVRMVTLYDNEEVGSESAQGAQSLLTELVLRRISASCQHPTAFEEAIPKSFMISADMAHAVHPNYLDKHEENHRPLFHKGPVIKVNSKQRYASNAVSEALIREVANKVKVPLQDLMVRNDTPCGTTIGPILASRLGLRVLDLGSPQLAMHSIREMACTTGVLQTLTLFKGFFELFPSLSHNLLVD

SEQ ID NO: 11078 - protein, 381 aa, Homo sapiens
GTRLSLSLSLSLSLSLSLSLSLSLSLSLSLSRSTWFDRDLTLAGRVIVKCPTSGRLEQQLVHVERPILRIPHLAIHLQRNINENFGPNTEMHLVPILATAIQEELEKGTPEPGPLNAVDERHHSVLMSLLCAHLGLSPKDIVEMELCLADTQPAVLGGAYDEFIFAPRLDNLHSCFCALQALIDSCAGPGSLATEPHVRMVTLYDNEEVGSESAQGAQSLLTELVLRRISASCQHPTAFEEAIPKSFMISADMAHAVHPNYLDKHEENHRPLFHKGPVIKVNSKQRYASNAVSEALIREVANKVKVPLQDLMVRNDTPCGTTIGPILASRLGLRVLDLGSPQLAMHSIREMACTTGVLQTLTLFKGFFELFPSLSHNLLVD

SEQ ID NO: 11079 - protein, 343 aa, Homo sapiens
MLVVQMPFSFPMAHFILFVFTVSTIFHVQQRLAKIQAMWELPVQIPVLASTSKALGPSQLRGMWTINAIGRLGNQMGEYATLYALAKMNGRPAFIPAQMHSTLAPIFRITLPVLHSATASRIPWQNYHLNDWMEEEYRHIPGEYVRFTGYPCSWTFYHHLRQEILQEFTLHDHVREEAQKFLRGLQVNGSRPGTFVGVHVRRGDYVHVMPKVWKGVVADRRYLQQALDWFRARYSSLIFVVTSNGMAWCRENIDTSHGDVVFAGDGIEGSPAKDFALLTQCNHTIMTIGTFGIWAAYLTGGDTIYLANYTLPDSPFLKIFKPEAAFLPEWTGIAADLSPLLKH

SEQ ID NO: 11080 - protein, 1299 aa, Homo sapiens
MSLQEMFRFPMGLLLGSVLLVASAPATLEPPGCSNKEQQVTVSHTYKIDVPKSALVQVDADPQPLSDDGASLLALGEAREEQNIIFRHNIRLQTPQKDCELAGSVQDLLARVKKLEEEMVEMKEQCSAQRCCQGVTDLSRHCSGHGTFSLETCSCHCEEGREGPACERLACPGACSGHGRCVDGRCLCHEPYVGADCGYPACPENCSGHGECVRGVCQCHEDFMSEDCSEKRCPGDCSGHGFCDTGECYCEEGFTGLDCAQVVTPQGLQLLKNTEDSLLVSWEPSSQVDHYLLSYYPLGKELSGKQIQVPKEQHSYEILGLLPGTKYIVTLRNVKNEVSSSPQHLLATTDLAVLGTAWVTDETENSLDVEWENPSTEVDYYKLRYGPMTGQEVAEVTVPKSSDPKSRYDITGLHPGTEYKITVVPMRGELEGKPILLNGRTEIDSPTNVVTDRVTEDTATVSWDPVQAVIDKYVVRYTSADGDTKEMAVHKDESSTVLTGLKPGEAYKVYVWAERGNQGSKKADTNALTEIDSPANLVTDRVTENTATISWDPVQATIDKYVVRYTSADDQETREVLVGKEQSSTVLTGLRPGVEYTVHVWAQKGDRESKKADTNAPTDIDSPKNLVTDRVTENMATVSWDPVQAAIDKYVVRYTSAGGETREVPVGKEQSSTVLTGLRPGMEYMVHVWAQKGDQESKKADTKAQTDIDSPQNLVTDRVTENMATVSWDPVRATIDRYVVRYTSAKDGETREVPVGKEQSSTVLTGLRPGVEYTVHVWAQKGAQESKKADTKAQTDIDSPQNLVTDWVTENTATVSWDPVQATIDRYVVHYTSANGETREVPVGKEQSSTVLTGLRPGMEYTVHVWAQKGNQESKKADTKAQTEIDGPKNLVTDWVTENMATVSWDPVQATIDKYMVRYTSADGETREVPVGKEHSSTVLTGLRPGMEYMVHVWAQKGAQESKKADTKAQTELDPPRNLRPSAVTQSGGILTWTPPSAQIHGYILTYQFPDGTVKEMQLGREDQRFALQGLEQGATYPVSLVAFKGGRRSRNVSTTLSTVGARFPHPSDCSQVQQNSNAASGLYTIYLHGDASRPLQVYCDMETDGGGWIVFQRRNTGQLDFFKRWRSYVEGFGDPMKEFWLGLDKLHNLTTGTPARYEVRVDLQTANESAYAIYDFFQVASSKERYKLTVGKYRGTAGDALTYHNGWKFTTFDRDNDIALSNCALTHHGGWWYKNCHLANPNGRYGETKHSEGVNWEPWKGHEFSIPYVELKIRPHGYSREPVLGRKKRTLRGRLRTF

SEQ ID NO: 11081 - protein, 736 aa, Homo sapiens
MAVRALKLLTTLLAVVAAASQAEVESEAGWGMVTPDLLFAEGTAAYARGDWPGVVLSMERALRSRAALRALRLRCRTQCAADFPWELDPDWSPSPAQASGAAALRDLSFFGGLLRRAACLRRCLGPPAAHSLSEEMELEFRKRSPYNYLQVAYFKINKLEKAVAAAHTFFVGNPEHMEMQQNLDYYQTMSGVKEADFKDLETQPHMQEFRLGVRLYSEEQPQEAVPHLEAALQEYFVAYEECRALCEGPYDYDGYNYLEYNADLFQAITDHYIQVLNCKQNCVTELASHPSREKPFEDFLPSHYNYLQFAYYNIGNYTQAVECAKTYLLFFPNDEVMNQNLAYYAAMLGEEHTRSIGPRESAKEYRQRSLLEKELLFFAYDVFGIPFVDPDSWTPEEVIPKRLQEKQKSERETAVRISQEIGNLMKEIETLVEEKTKESLDVSRLTREGGPLLYEGISLTMNSKLLNGSQRVVMDGVISDHECQELQRLTNVAATSGDGYRGQTSPHTPNEKFYGVTVFKALKLGQEGKVPLQSAHLYYNVTEKVRRIMESYFRLDTPLYFSYSHLVCRTAIEEVQAERKDDSHPVHVDNCILNAETLVCVKEPPAYTFRDYSAILYLNGDFDGGNFYFTELDAKTVTAEVQPQCGRAVGFSSGTENPHGVKAVTRGQRCAIALWFTLDPRHSERDRVQADDLVKMLFSPEEMDLSQEQPLDAQQGPPEPAQESLSGSESKPKDEL

SEQ ID NO: 11082 - protein, 804 aa, Homo sapiens
MAVRALKLLTTLLAVVAAASQAEVESEAGWGMVTPDLLFAEGTAAYARGDWPGVVLSMERALRSRAALRALRLRCRTQCAADFPWELDPDWSPSPAQASGAAALRDLSFFGGLLRRAACLRRCLGPPAAHSLSEEMELEFRKRSPYNYLQVAYFKINKLEKAVAAAHTFFVGNPEHMEMQQNLDYYQTMSGVKEADFKDLETQPHMQEFRLGVRLYSEEQPQEAVPHLEAALQEYFVAYEECRALCEGPYDYDGYNYLEYNADLFQAITDHYIQVLNCKQNCVTELASHPSREKPFEDFLPSHYNYLQFAYYNIGNYTQAVECAKTYLLFFPNDEVMNQNLAYYAAMLGEEHTRSIGPRESAKEYRQRSLLEKELLFFAYDVFGIPFVDPDSWTPGEVIPKRLQEKQKSERETAVRISQEIGNLMKEIETLVEEKTKESLDVSRLTREGGPLLYEGISLTMNSKLLNGSQRVVMDGVISDHECQELQRLTNVAATSGDGYRGQTSPHTPNEKFYGVTVFKALKLGQEGKVPLQSAHLYYNVTEKVRRIMESYFRLDTPLYFSYSHLVCRTAIEEVQAERKDDSHPVHVDNCILNAETLVCVKEPPAYTFRDYSAILYLNGDFDGGNFYFTELDAKTVTAEVQPQCGRAVGFSSGTENPHGVKAVTRGQRCAIALWFTLDPRHSERVRAARAGESSWCCGDPFPERPWFAFLFPKSHCQWLRHERSTWDTSSNALSLWSHCLVLPGPAVNGIQVGKEVKTGSDAEFLVPSLGPTSAVLFQRVGPAGKEMSLGPLRNLPCPLGSSS

SEQ ID NO: 11083 - protein, 644 aa, Homo sapiens
MFSMRIVCLVLSVVGTAWTADSGEGDFLAEGGGVRGPRVVERHQSACKDSDWPFCSDEDWNYKCPSGCRMKGLIDEVNQDFTNRINKLKNSLFEYQKNNKDSHSLTTNIMEILRGDFSSANNRDNTYNRVSEDLRSRIEVLKRKVIEKVQHIQLLQKNVRAQLVDMKRLEVDIDIKIRSCRGSCSRALAREVDLKDYEDQQKQLEQVIAKDLLPSRDRQHLPLIKMKPVPDLVPGNFKSQLQKVPPEWKALTDMPQMRMELERPGGNEITRGGSTSYGTGSETESPRNPSSAGSWNSGSSGPGSTGNRNPGSSGTGGTATWKPGSSGPGSTGSWNSGSSGTGSTGNQNPGSPRPGSTGTWNPGSSERGSAGHWTSESSVSGSTGQWHSESGSFRPDSPGSGNARPNNPDWGTFEEVSGNVSPGTRREYHTEKLVTSKGDKELRTGKEKVTSGSTTTTRRSCSKTVTKTVIGPDGHKEVTKEVVTSEDGSDCPEAMDLGTLSGIGTLDGFRHRHPDEAAFFDTASTGKTFPGFFSPMLGEFVSETESRGSESGIFTNTKESSSHHPGIAEFPSRGKSSSYSKQFTSSTSYNRGDSTFESKSYKMADEAGSEADHEGTHSTKRGHAKSRPVRGIHTSPLGKPSLSP

SEQ ID NO: 11084 - protein, 164 aa, Homo sapiens
MMVLQVSAAPRTVALTALLMVLLTSVVQGRATPENYLFQGRQECYAFNGTQRFLERYIYNREEFARFDSDVGEFRAVTELGRPAAEYWNSQKDILEEKRAVPDRMCRHNYELGGPMTLQRREAQSDSARSKTLTGAGGFVLGLIICGVGIFMHRRSKKVQRGSA

SEQ ID NO: 11085 - protein, 258 aa, Homo sapiens
MMVLQVSAAPRTVALTALLMVLLTSVVQGRATPENYLFQGRQECYAFNGTQRFLERYIYNREEFARFDSDVGEFRAVTELGRPAAEYWNSQKDILEEKRAVPDRMCRHNYELGGPMTLQRRVQPRVNVSPSKKGPLQHHNLLVCHVTDFYPGSIQVRWFLNGQEETAGVVSTNLIRNGDWTFQILVMLEMTPQQGDVYTCQVEHTSLDSPVTVEWKAQSDSARSKTLTGAGGFVLGLIICGVGIFMHRRSKKVQRGSA

SEQ ID NO: 11086 - protein, 865 aa, Homo sapiens
MALVLGSLLLLGLCGNSFSGGQPSSTDAPKAWNYELPATNYETQDSHKAGPIGILFELVHIFLYVVQPRDFPEDTLRKFLQKAYESKIDYDKPETVILGLKIVYYEAGIILCCVLGLLFIILMPLVGYFFCMCRCCNKCGGEMHQRQKENGPFLRKCFAISLLVICIIISIGIFYGFVANHQVRTRIKRSRKLADSNFKDLRTLLNETPEQIKYILAQYNTTKDKAFTDLNSINSVLGGGILDRLRPNIIPVLDEIKSMATAIKETKEALENMNSTLKSLHQQSTQLSSSLTSVKTSLRSSLNDPLCLVHPSSETCNSIRLSLSQLNSNPELRQLPPVDAELDNVNNVLRTDLDGLVQQGYQSLNDIPDRVQRQTTTVVAGIKRVLNSIGSDIDNVTQRLPIQDILSAFSVYVNNTESYIHRNLPTLEEYDSYWWLGGLVICSLLTLIVIFYYLGLLCGVCGYDRHATPTTRGCVSNTGGVFLMVGVGLSFLFCWILMIIVVLTFVFGANVEKLICEPYTSKELFRVLDTPYLLNEDWEYYLSGKLFNKSKMKLTFEQVYSDCKKNRGTYGTLHLQNSFNISEHLNINEHTGSISSELESLKVNLNIFLLGAAGRKNLQDFAACGIDRMNYDSYLAQTGKSPAGVNLLSFAYDLEAKANSLPPGNLRNSLKRDAQTIKTIHQQRVLPIEQSLSTLYQSVKILQRTGNGLLERVTRILASLDFAQNFITNNTSSVIIEETKKYGRTIIGYFEHYLQWIEFSISEKVASCKPVATALDTAVDVFLCSYIIDPLNLFWFGIGKATVFLLPALIFAVKLAKYYRRMDSEDVYDDVETIPMKNMENGNNGYHKDHVYGIHNPVMTSPSQH

SEQ ID NO: 11087 - protein, 1013 aa, Homo sapiens
MAEPGHSHHLSARVRGRTERRIPRLWRLLLWAGTAFQVTQGTGPELHACKESEYHYEYTACDSTGSRWRVAVPHTPGLCTSLPDPVKGTECSFSCNAGEFLDMKDQSCKPCAEGRYSLGTGIRFDEWDELPHGFASLSANMELDDSAAESTGNCTSSKWVPRGDYIASNTDECTATLMYAVNLKQSGTVNFEYYYPDSSIIFEFFVQNDQCQPNADDSRWMKTTEKGWEFHSVELNRGNNVLYWRTTAFSVWTKVPKPVLVRNIAITGVAYTSECFPCKPGTYADKQGSSFCKLCPANSYSNKGETSCHQCDPDKYSEKGSSSCNVRPACTDKDYFYTHTACDANGETQLMYKWAKPKICSEDLEGAVKLPASGVKTHCPPCNPGFFKTNNSTCQPCPYGSYSNGSDCTRCPAGTEPAVGFEYKWWNTLPTNMETTVLSGINFEYKGMTGWEVAGDHIYTAAGASDNDFMILTLVVPGFRPPQSVMADTENKEVARITFVFETLCSVNCELYFMVGVNSRTNTPVETWKGSKGKQSYTYIIEENTTTSFTWAFQRTTFHEASRKYTNDVAKIYSINVTNVMNGVASYCRPCALEASDVGSSCTSCPAGYYIDRDSGTCHSCPTNTILKAHQPYGVQACVPCGPGTKNNKIHSLCYNDCTFSRNTPTRTFNYNFSALANTVTLAGGPSFTSKGLKYFHHFTLSLCGNQGRKMSVCTDNVTDLRIPEGESGFSKSITAYVCQAVIIPPEVTGYKAGVSSQPVSLADRLIGVTTDMTLDGITSPAELFHLESLGIPDVIFFYRSNDVTQSCSSGRSTTIRVRCSPQKTVPGSLLLPGTCSDGTCDGCNFHFLWESAAACPLCSVADYHAIVSSCVAGIQKTTYVWREPKLCSGGISLPEQRVTICKTIDFWLKVGISAGTCTAILLTVLTCYFWKKNQKLEYKYSKLVMNATLKDCDLPAADSCAIMEGEDVEDDLIFTSKKSLFGKIKSFTSKRTPDGFDSVPLKTSSGGLDMDL

SEQ ID NO: 11088 - protein, 591 aa, Homo sapiens
MWERLNCAAEDFYSRLLQKFNEEKKGIRKDPFLYEADVQVQLISKGQPNPLKNILNENDIVFIVEKVPLEKEETSHIEELQSEETAISDFSTGENVGPLALPVGKARQLIGLYTMAHNPNMTHLKINLPVTALPPLWVRCDSSDPEGTCWLGAELITTNNSITGIVLYVVSCKADKNYSVNLENLKNLHKKRHHLSTVTSKGFAQYELFKSSALDDTITASQTAIALDISWSPVDEILQIPPLSSTATLNIKVESGEPRGPLNHLYRELKFLLVLADGLRTGVTEWLEPLEAKSAVELVQEFLNDLNKLDGFGDSTKKDTEVETLKHDTAAVDRSVKRLFKVRSDLDFAEQLWCKMSSSVISYQDLVKCFTLIIQSLQRGDIQPWLHSGSNSLLSKLIHQSYHGTMDTVSLSGTIPVQMLLEIGLDKLKKDYISFFIGQELASLNHLEYFIAPSVDIQEQVYRVQKLHHILEILVSCMPFIKSQHELLFSLTQICIKYYKQNPLDEQHIFQLPVRPTAVKNLYQSEKPQKWRVEIYRGQKKIKTVWQLSDSSPIDHLNFHKPDFSELTLNGSLEERIFFTNMVTCSQVHFK

SEQ ID NO: 11089 - protein, 177 aa, Homo sapiens
MFHVSFRYIFGLPPLILVLLPVASSDCDIEGKDGKQYESVLMVSIDQLLDSMKEIGSNCLNNEFNFFKRHICDANKEGMFLFRAARKLRQFLKMNSTGDFDLHLLKVSEGTTILLNCTGQVKGRKPAALGEAQPTKSLEENKSLKEQKKLNDLCFLKRLLQEIKTCWNKILMGTKEH

SEQ ID NO: 11090 - protein, 639 aa, Homo sapiens
MEPPLSKRNPPALRLADLATAQVQPLQNMTGFPALAGPPAHSQLRAAVAHLRLRDLGADPGVATTPLGPEHMAQASTLGLSPPSQAFPAHPEAPAAAARAAALVAHPGAGSYPCGGGSSGAQPSAPPPPAPPLPPTPSPPPPPPPPPPPALSGYTTTNSGGGGSSGKGHSRDFVLRRDLSATAPAAAMHGAPLGGEQRSGTGSPQHPAPPPHSAGMFISASGTYAGPDGSGGPALFPALHDTPGAPGGHPHPLNGQMRLGLAAAAAAAAAELYGRAEPPFAPRSGDAHYGAVAAAAAAALHGYGAVNLNLNLAAAAAAAAAGPGPHLQHHAPPPAPPPPPAPAQHPHQHHPHLPGAAGAFLRYMRQPIKQELICKWIDPDELAGLPPPPPPPPPPPPPPPAGGAKPCSKTFGTMHELVNHVTVEHVGGPEQSSHVCFWEDCPREGKPFKAKYKLINHIRVHTGEKPFPCPFPGCGKVFARSENLKIHKRTHTGEKPFKCEFDGCDRKFANSSDRKKHSHVHTSDKPYYCKIRGCDKSYTHPSSLRKHMKIHCKSPPPSPGPLGYSSVGTPVGAPLSPVLDPARSHSSTLSPQVTNLNEWYVCQASGAPSHLHTPSSNGTTSETEDEEIYGNPEVVRTIH

SEQ ID NO: 11091 - protein, 301 aa, Homo sapiens
EGEGEAVLMEEDLIQQSLDDYDAGRYSPRLLTAHELPLDAHVLEPDEDLQRLQLSRQQLQVTGDASESAEDIFFRRAKEGMGQDEAQFSVEMPLTGKAYLWADKYRPRKPRFFNRVHTGFEWNKYNQTHYDFDNPPPKIVQGYKFNIFYPDLIDKRSTPEYFLEACADNKDFAILRFTRGRLRGHRFQDRQPRVGILAPPRLPLPVCQRHLPAVLSLQALPLSAVTALGNGRPGGPRATRVPQPRSEWPSRQACSSASDGNISNRSKTESASRTPRGPPNLTSHQPQTTHSPSQTPRLIWK

SEQ ID NO: 11092 - protein, 395 aa, Homo sapiens
MSGGKKKSSFQITSVTTDYEGPGSPGASDPPTPQPPTGPPPRLPNGEPSPDPGGKGTPRNGSPPPGAPSSRFRVVKLPHGLGEPYRRGRWTCVDVYERDLEPHSFGGLLEGIRGASGGAGGRSLDSRLELASLGLGAPTPPSGLSQGPTSWLRPPPTSPGPQARSFTGGLGQLVVPSKAKAEKPPLSASSPQQRPPEPETGESAGTSRAATPLPSLRVEAEAGGSGARTPPLSRRKAVDMRLRMELGAPEEMGQVPPLDSRPSSPALYFTHDASLVHKSPDPFGAVAAQKFSLAHSMLAISGHLDSDDDSGSGSLVGIDNKIEQAMDLVKSHLMFAVREEVEVLKEQIRELAERNAALEQENGLLRALASPEQLAQLPSSGVPRLGPPAPNGPSV

SEQ ID NO: 11093 - protein, 187 aa, Homo sapiens
LLASFQPEPLPCPPETEDMAPKRAKRRTVEGGSSSVFSMFDQTQIQEFKEAFTVIDQNRDGIIDKEDLRDTFAAMGRLNVKNEELDAMMKEASGPINFTVFLTMFGEKLKGADPEDVITGAFKVLDPEGKGTIKKKFLEELLTTQCDRFSQEEIKNMWAAFPPDVGGNVDYKNICYVITHGDAKDQE

SEQ ID NO: 11094 - protein, 170 aa, Homo sapiens
MAPKRAKRRTVAEGGSSSVFSMFDQTQIQEFKEAFTVIDQNRDGIIDKEDLRDTFAAMGRLNVKNEELDAMMKEASGPINFTVFLTMFGEKLKGADPEDVITGAFKVLDPEGKGTIKKKFLEELLTTQCDRFSQEEIKNMWAAFPPDVGGNVDYKNICYVITHGDAKDQE

SEQ ID NO: 11095 - protein, 619 aa, Homo sapiens [sequence omitted]

SEQ ID NO: 11096 - protein, 182 aa, Homo sapiens
EGLAECPPDPNPPYPSFKKRRGHSIGGAPEQRYQIIPVCVAARLPTRAQDVLDAHLSEVNAVRFGPNSSLLATGGADRLIHLWNVVGSRLEANQTLEGAGGSITSVDFDPSGYQVLAATYNQAAQLWKVGEAQSKVRPDWGGCLEVRGHTSGLGGLLWGLGQTLDPYLGPGYRRHCLDTRIR

SEQ ID NO: 11097 - protein, 2106 aa, Homo sapiens
MQKLLSEERFVSMETDSDEKQLLNQILNAVKVTPSLNEDLQVEVMKVLLCITYTPTFDLNGSAVLKIAEVCIETYISSCHQRSINTAVRATLSQMLSDLTLQLRQRQENTIIENPDVPQDFGNQGSTVESLCDDVVSVLTVLCEKLQAAINDSQQLQLLYLECILSVLSSSSSSMHLHRRFTDLIWKNLCPALIVILGNPIHDKTITSAHTSSTSTSLESDSASPGVSDHGRGSGCSCTAPALSGPVARTIYYIAAELVRLVGSVDSMKPVLQSLYHRVLLYPPPQHRVEAIKIMKEILGSPQRLCDLAGPSSTESESRKRSISKRKSHLDLLKLIMDGMTEACIKGGIEACYAAVSCVCTLLGALDELSQGKGLSEGQVQLLLLRLEELKDGAEWSRDSMEINEADFRWQRRVLSSEHTPWESGNERSLDISISVTTDTGQTTLEGELGQTTPEDHSGNHKNSLKSPAIPEGKETLSKVLETEAVDQPDVVQRSHTVPYPDITNFLSVDCRTRSYGSRYSESNFSVDDQDLSRTEFDSCDQYSMAAEKDSGRSDVSDIGSDNCSLADEEQTPRDCLGHRSLRTAALSLKLLKNQEADQHSARLFIQSLEGLLPRLLSLSNVEEVDTALQNFASTFCSGMMHSPGFDGNSSLSFQMLMNADSLYTAAHCALLLNLKLSHGDYYRKRPTLAPGVMKDFMKQVQTSGVLMVFSQAWIEELYHQVLDRNMLGEAGYWGSPEDNSLPLITMLTDIDGLESSAIGGQLMASAATESPFAQSRRIDDSTVAGVAFARYILVGCWKNLIDTLSTPLTGRMAGSSKGLAFILGAEGIKEQNQKERDAICMSLDGLRKAARLSCALGVAANCASALAQMAAASCVQEEKEEREAQEPSDAITQVKLKVEQKLEQIGKVQGVWLHTAHVLCMEAILSVGLEMGSHNPDCWPHVFRVCEYVGTLEHNHFSDGASQPPLTISQPQKATGSAGLLGDPECEGSPPEHSPEQGRSLSTAPVVQPLSIQDLVREGSRGRASDFRGGSLMSGSSAAKVVLTLSTQADRLFEDATDKLNLMALGGFLYQLKKASQSQLFHSVTDTVDYSLAMPGEVKSTQDRKSALHLFRLGNAMLRIVRSKARPLLHVMRCWSLVAPHLVEAACHKERHVSQKAVSFIHDILTEVLTDWNEPPHFHFNEALFRPFERIMQLELCDEDVQDQVVTSIGELVEVCSTQIQSGWRPLFSALETVHGGNKSEMKEYLVGDYSMGKGQAPVFDVFEAFLNTDNIQVFANAATSYIMCLMKFVKGLGEVDCKEIGDCAPAPGAPSTDLCLPALDYLRRCSQLLAKIYKMPLKPIFLSGRLAGLPRRLQEQSASSEDGIESVLSDFDDDTGLIEVWIILLEQLTAAVSNCPRQHQPPTLDLLFELLRDVTKTPGPGFGIYAVVHLLLPVMSVWLRRSHKDHSYWDMASANFKHAIGLSCELVVEHIQSFLHSDIRYESMINTMLKDLFELLVACVAKPTETISRVGCSCIRYVLVTAGPVFTEEMWRLACCALQDAFSATLKPVKDLLGCFHSGTESFSGEGCQVRVAAPSSSPSAEAEYWRIRAMAQQVFMLDTQCSPKTPNNFDHAQSCQLIIELPPDEKPNGHTKKSVSFREIVVSLLSHQVLLQNLYDILLEEFVKGPSPGEEKTIQVPEAKLAGFLRYISMQNLAVIFDLLLDSYRTAREFDTSPGLKCLLKKVSGIGGAANLYRQSAMSFNIYFHALVCAVLTNQETITAEQVKKVLFEDDERSTDSSQQCSSEDEDIFEETAQVSPPRGKEKRQWRARMPLLSVQPVSNADWVWLVKRLHKLCMELCNNYIQMHLDLENCMEEPPIFKGDPFFILPSFQSESSTPSTGGFSGKETPSEDDRSQSREHMGESLSLKAGGGDLLLPPSPKVEKKDPSRKKEWWENAGNKIYTMAADKTISKLMTEYKKRKQQHNLSAFPKEVKVEKKGEPLGPRGQDSPLLQRPQHLMDQGQMRHSFSAGPELLRQDKRPRSGSTGSSLSVSVRDAEAQIQAWTNMVLTVLNQIQILPDQTFTALQPAVFPCISQLTCHVTDIRVRQAVREWLGRVGRVYDIIV

SEQ ID NO: 11098 - protein, 116 aa, Homo sapiens
MRALGQNPTNAEVLKVLGNPKSDEMNVKVLDFEHFLPMLQTVAKNKDQGTYEDYVEGLRVFDKEGNGTVMGAEIRHVLVTLGEKMTEEEVEMLVAGHEDSNGCINYEAFVRHILSG

SEQ ID NO: 11099 - protein, 150 aa, Homo sapiens
CDFTEDQTAEFKEAFQLFDRTGDGKILYSQCGDVMRALGQNPTNAEVLKVLGNPKSDEMNVKVLDFEHFLPMLQTVAKNKDQGTYEDYVEGLRVFDKEGNGTVMGAEIRHVLVTLGEKMTEEEVEMLVAGHEDSNGCINYEELVRMVLNG

SEQ ID NO: 11100 - protein, 208 aa, Homo sapiens
MPPKKDVPVKKPAGPSISKPAAKPAAAGAPPAKTKAEPAVPQAPQKTQEPPVDLSKVVIEFNKDQLEEFKEAFELFDRVGDGKILYSQCGDVMRALGQNPTNAEVLKVLGNPKSDELKSRRVDFETFLPMLQAVAKNRGQGTYEDYLEGFRVFDKEGNGKVMGAELRHVLTTLGEKMTEEEVETVLAGHEDSNGCINYEAFLKHILSV

SEQ ID NO: 11101 - protein, 157 aa, Homo sapiens
MCDFTEDQTADLIPSTEFKEAFQLFDRTGDGKILYSQCGDVMRALGQNPTNAEVLKVLGNPKSDEMNVKVLDFEHFLPMLQTVAKNKDQGTYEDYVEGLRVFDKEGNGTVMGAEIRHVLVTLGEKMTEEEVEMLVAGHEDSNGCINYEAFVRHILSG

SEQ ID NO: 11102 - protein, 151 aa, Homo sapiens
MCDFTEDQTAEFKEAFQLFDRTGDGKILYSQCGDVMRALGQNPTNAEVLKVLGNPKSDEMNVKVLDFEHFLPMLQTVAKNKDQGTYEDYVEGLRVFDKEGNGTVMGAEIRHVLVTLGEKMTEEEVEMLVAGHEDSNGCINYEAFVRHILSG

SEQ ID NO: 11103 - protein, 803 aa, Homo sapiens
RLRDGKSWNSRRRRCRGRPRRWRRLGRAGGARRRRIWGKRRRRADRPGPEEKREEGDTEPLLKQEGPVEAAQPPVERKEAAALEQGRKVEELRWQEVDERQTMPRPYTFQVSSGGKQILFPKVNLSPVTPAKDTGLTAAPQEPKAPKASPVQHALPSSLSVPHTAILVTGAQLCGPAVNLSQIKDTACKSLLGLEEKKHAEAPAGENPPRGPGDARAGSGKAKPPQESPSSASALAEWASIRSRILKNAESDPRSSERDQLRPGDESTPRGRCDSRGNQRKTPPVNAKFSIMPAWQKFSDGGTETSKQSTEAESIRKRPMLGPSEETAPQPPPAGVRELGKGPEKSEMHREPADTTEGCKFAKDLPSFLVPSLPYPPQKVVAHTEFTTSSDSETANGIAKPDPVMPGGEEKASPFGIKLRRTNYSLRFNCDQQAEQKKKKRHSSTGDSADAGPPAAGSARGEKEMEGVALKHGPSLPQERKQAPSTRRDSAEPSSSRSVPVAHPGPPPASSQTPAPEHDKAANKMPLAQKPALAPKPTSQTPPASPLSKLSRPYLVELLSRRAGRPDPEPSEPSKEDQESSDRRPPSPPGPEERKGQKRDEEEEATERKPASPPLPATQQEKPSQTPEAGRKEKPMLQSRHSLDGSKLTEKVETAQPLWITLALQKQKGFREQQATREERKQAREAKQAEKLSKENVSVSVQPGSSSVSRAGSLHKSTALPEEKRPETAVSRLERREQLKKANTLPTSVTVEISDSAPPAPLVKEVTKRFSTPDAAPVSTEPAWLALAKRKAKAWSDCPQIIK

SEQ ID NO: 11104 - protein, 647 aa, Homo sapiens
MWRVCARRAQNVAPWAGLEARWTALQEVPGTPRVTSRSGPAPARRNSVTTGYGGVRALCGWTPSSGATPRNRLLLQLLGSPGRRYYSLPPHQKVPLPSLSPTMQAGTIARWEKKEGDKINEGDLIAEVETDKATVGFESLEECYMAKILVAEGTRDVPIGAIICITVGKPEDIEAFKNYTLDSSAAPTPQAAPAPTPAATASPPTPSAQAPGSSYPPHMQVLLPALSPTMTMGTVQRWEKKVGEKLSEGDLLAEIETDKATIGFEVQEEGYLAKILVPEGTRDVPLGTPLCIIVEKEADISAFADYRPTEVTDLKPQVPPPTPPPVAAVPPTPQPLAPTPSAPCPATPAGPKGRVFVSPLAKKLAVEKGIDLTQVKGTGPDGRITKKDIDSFVPSKVAPAPAAVVPPTGPGMAPVPTGVFTDIPISNIRRVIAQRLMQSKQTIPHYYLSIDVNMGEVLLVRKELNKILEGRSKISVNDFIIKASALACLKVPEANSSWMDTVIRQNHVVDVSVAVSTPAGLITPIVFNAHIKGVETIANDVVSLATKAREGKLQPHEFQGGTFTISNLGMFGIKNFSAIINPPQACILAIGASEDKLVPADNEKGFDVASMMSVTLSCDHRVVDGAVGAQWLAEFRKYLEKPITMLL

SEQ ID NO: 11105 - protein, 614 aa, Homo sapiens
MSPHCSTTYLRTLGRTTMFWKTTEGRDGKMAVQEFSEFGLLLQLLGSPGRRYYSLPPHQKVPLPSLSPTMQAGTIARWEKKEGDKINEGDLIAEVETDKATVGFESLEECYMAKILVAEGTRDVPIGAIICITVGKPEDIEAFKNYTLDSSAAPTPQAAPAPTPAATASPPTPSAQAPGSSYPPHMQVLLPALSPTMTMGTVQRWEKKVGEKLSEGDLLAEIETDKATIGFEVQEEGYLAKILVPEGTRDVPLGTPLCIIVEKEADISAFADYRPTEVTDLKPQVPPPTPPPVAAVPPTPQPLAPTPSTPCPATPAGPKGRVFVDPLAKKLAVEKGIDLTQVKGTGPDGRITKKDIDSFVPSKVAPAPAAVVPPTGPGMAPVPTGVFTDIPISNIRRVIAQRLMQSKQTIPHYYLSIDVNMGEVLLVRKELNKILEGRSKISVNDFIIKASALACLKVPEANSSWMDTVIRQNHVVDVSVAVSTPAGLITPIVFNAHIKGVETIANDVVSLATKAREGKLQPHEFQGGTFTISNLGMFGIKNFSAIINPPQACILAIGASEDKLVPADNEKGFDVASMMSVTLSCDHRVVDGAVGAQWLAEFRKYLEKPITMLL

SEQ ID NO: 11106 - protein, 253 aa, Homo sapiens
MNPTEWPEVSHNPIEQWEVPRNPIEQREVPGNPIEQPEVPRNPTEQPEALRNPIEQPEAPRNPTEQPEAPRNLIEKREAPRNPIEQREAHHNPIEQPEVPRNLIEQLEMPHKPHRAARATWPAPLGPPRPSSWKTVQREAEERNVERTKEWASRVGKELMRADEQVSLWGASCLAEARALTAGAVSMLGTDARLIPNQLPGAFRGRSTSDNQWRSVSLATAGDRSQKCRRGPREKQTCENPDFENGSEKTSSV

SEQ ID NO: 11107 - protein, 398 aa, Homo sapiens
MMLKGITRLISRIHKLDPGRFLHMGTQARQSIAAHLDNQVPVESPRAISRTNENDPAKHGDQHEGQHYNISPQDLETVFPHGLPPRFVMQVKTFSEACLMVRKPALELLHYLKNTSFAYPAIRYLLYGEKGTGKTLSLCHVIHFCAKQDWLILHIPDAHLWVKNCRDLLQSSYNKQRFDQPLEASTWLKNFKTTNERFLNQIKVQEKYVWNKRESTEKGSPLGEVVEQGITRVRNATDAVGIVLKELKRQSSLGMFHLLVAVDGINALWGRTTLKREDKSPIAPEELALVHNLRKMMKNDWHGGAIVSALSQTGSLFKPRKAYLPQELLGKEGFDALDPFIPILVSNYNPKEFESCIQYYLENNWLQHEKAPTEEGKKELLFLSNANPSLLERHCAYL

SEQ ID NO: 11108 - protein, 280 aa, Homo sapiens
MPADIMEKNSSSPVAATPASVNTTPDKPKTASEHRKSSKPIMEKRRRARINESLSQLKTLILDALKKDSSRHSKLEKADILEMTVKHLRNLQRAQMTAALSTDPSVLGKYRAGFSECMNEVTRFLSTCEGVNTEVRTRLLGHLANCMTQINAMTYPGQPHPALQAPPPPPPGPGGPQHAPFAPPPPLVPIPGGAAPPPGGAPCKLGSQAGEAAKVFGGFQVVPAPDGQFAFLIPNGAFAHSGPVIPVYTSNSGTSVGPNAVSPSSGPSLTADSMWRPWRN

SEQ ID NO: 11109 - protein, 1295 aa, Homo sapiens
MKTNTSTGLKMAMERSLNPINFNPENNVKESECPLPPPSPPPPPPSNASSEIEFPLPPPPPLMMFPEKNGFLPSLSTEKIKAEFESFPGLPLPPPPVDEKSERESSSMFLPPPPPPTPSQKPAHLLSSSAPEKHSGDFMQQYSQKEASNSQNSQAKIITGKTGVLPPPTLPKPKLPKHIKDNKNDFSPKVELATSLSDMECKITTSKDQKKVMVMTSSEHTETKQNVISKSLDERKQLSIDSANCLSHTVPGTSAPRKKRIAPLIKSHSFPESSGQQNPKPYMRKFKTPLMIAEEKYRQQKEEIEKQKQESSYYNIVKTQSQNQHITEVEKEMPLQKTNEEVSLSGIDSECTVVQPSPGSQSNARILGVCSDNQLSTTSPETVAAKRLHHVLAASEDKDKMKKEVLQSSRDIMQSKSACEIKQSHQECSTQQTQQKKYLEQLHLPQSKPISPNFKVKTIKLPTLDHTLNETDHSYESHKQQSEIDVQTFTKKQYLKTKKTEASTECSHKQSLAERHYQLPKKEKRVTVQLPTESIQKNQEDKLKMVPRKQREFSGSDRGKLPGSEEKNQGPSMIGRKEERLITERKHEHLKNKSAPKVVKQKVIDAHLDSQTQNFQQTQIQTAESKAEHKKLPQPYNSLQEEKCLEVKGIQEKQVFSNTKDSKQEITQNKSFFSSVKESQRDDGKGALNIVEFLRKREELQQILSRVKQFEAEPNKSGLKTFQTLLNTIPGWLISEDKREYAVHIAMENNLEKVKEEITHIKTQAEDMLVSYENIIQTAMMSSKTGKPGNKPTSLDETSSKVSNVHVSNNKNSEQKENKIAKEKTVQHQVAAHHEATVRSHVKTHQEIKLDDSNIPPPSLKTRPPSPTFITIESTARRTENPTKNELAQSPKKDSYVEPPPRRPMSQKSEIHRANTSPSPPRSRSEQLVRLKDTTAKLSKGAIPCPAATPVPIVEKRSEIIMSPATLRRQIKIETRGRDSPPTITIPVNINHAASGSFRESVDAQEEIRKVEKRATYVHKDGLNSTDHMVPDTESYDAVEIIRKVAVPPRLSEHTQRYEAANRTVQMAENFVNDPENEINRWFREFGHGPVSEAKSNRRVYAKGETNHNIQQESRTFCKEEFGLTSLGNTSFTDFSCKHPRELREKIPVKQPRICSETRSLSEHFSGMDAFESQIVESKMKTSSLHSSEAGKSGCDFKHAPPTYEDVIAGHILDISDSPKEVRKNFQKTWQESGRVFKGLGYATADASATEMRTTFQEESAFISEAAAPRQGNMYTLSKDSLSNGVPSGRQAEFS

SEQ ID NO: 11110 - protein, 648 aa, Homo sapiens [sequence omitted]

SEQ ID NO: 11111 - protein, 301 aa, Homo sapiens
DLTEAQETVPSRCLHLDAENEVLQLQQTLFSMKAIQKQCETLQKNKKQLKQEVVNLKSYMERNMLERGEGERHKLLIEERARKEIQEKLNEAVLTLQVAAVSHEQLAQLREDNTTSIKTQMELTIKDLESEISRIKTSQADFNKTELERYKELYLEEVKVRESLSNELSRTNEMIAEVSTQLTVEKEQTRSRSLFTAYATRPVLSPCVGNLNDSEGLNRKHIPRKKRSALKDMESYLLKVSYLFSFGVQISDRILVSATKYEPGSYIASPLGFTHKENLNQDPVLEVTKEYAQILRRKYIL

SEQ ID NO: 11112 - protein, 728 aa, Homo sapiens
MFNCRLALKQENEEKRNADMLYNKDSEQLRIKEEECGKVVETKQQLKWNLRRLVKELRTVRNNLDLVVQERNDAQKQLSEEQDARILQDQILTSKQKELEMARKKMNSEISHRHQKEKDLFHEDCMLQEEIALLRLEIDTIKNQNKQKEKKYFEDIEAVKEKNDNLQKIIKLNEETLTETILQYSGQLNNLTAENKILNSELENGKQNQERLEIEMESYRCRLAAAVRDCDQSQTARDLKLDFQRTRQEWVRLHDKMKVDMSGLQAKNEILSEKLSNAESKINSLQIQLHNTRDALGRESLILERVQRDLSQTQCQKKETEQMYQIEQSKLKKYIAKQESVEERLSQLQSENMLLRQQLDDAHKKANSQEKTSSTIQDQFHSAAKNLQAESEKQILSLQEKNKELMDEYNHLKERMDQCEKEKAGRKIDLTEAQETVPSRCLHLDAENEVLQLQQTLFSMKAIQKQCETLQKNKKQLKQEVVNLKSYMERNMLERGKAEWHKLLIEERARKEIEEKLNEAILTLQKQAAVSHEQLVQLREDNTTSIKTQMELTIKDLESEISRIKTSQADFNKTELERYKELYLEEVKVRESLSNELSRTNEMIAEVSTQLTVEKEQTRSRSLFTAYATRPVLESPCVGNLNDSEGLNRKHIPRKKRSALKDMESYLLKMQQKLQNDLTAEVAAATKYEPGSYIASPLGFTHKENLNQDPVLEVTKEYAQILRRKYIL

SEQ ID NO: 11113 - protein, 261 aa, Homo sapiens
MASPDWGYDDKNGPEQWSKLYPIANGNNQSPVDIKTSETKHDTSLKPISVSYNPATAKEIINVGHSFHVNFEDNDNRSVLKGGPFSDSYRLFQFHFHWGSTNEHGSEHTVDGVKYSAELHVAHWNSAKYSSLAEAASKADGLAVIGVLMKVGEANPKLQKVLDALQAIKTKGKRAPFTNFDPSTLLPSSLDFWTYPGSLTHPPLYESVTWIICKESISVSSEQLAQFRSLLSNVEGDNAVPMQHNNRPTQPLKGRTVRASF

SEQ ID NO: 11114 - protein, 4355 aa, Homo sapiens
LDSGKVAPPSGLEGSFGWGISLRSSMEQPNSKGYSLGRTPQGPECSSAPAVQVGTHRGLEYNPGKILPGSDYGLGNPPALDPKLPHLPLPPAPPTLSDLGQPRKSPLTGTDKKYPLMKQRGFYSDILSPGTLDQLGEVCRGPRMSQNLLRQADLDKFTPRVGSFEVPEDFQERMEQQCIGSTTRLLAQTDFPLQAYEPKMQVPFQVLPGQHPRKIEIERRKQQYLSLDIEQLLFSQGIDSNKLMPRHLDHQHPQTIEQGHDPIFPIYLPLKVFDNEDFDCRTPREWINMGLEPGSLDRKPVPGKALLPTDDFLGHEDPKSQKLKYKWCEVGVLDYDEEKKLYLVHKTDEKGLVRDEMGRPILNAGVTTEGRPPLQVCQYWVPRIQLLFCAEDPCMFAQRVVQANALRKNTEALLLYNLYVDCMPSDGQHVISEQSLSKIKQWALSTPRMRKGPSVLEHLSSLAREVSLDYERSMNKINFDHVVSSKPETFSYVTLPKKEEEQVPERGLVSVPKYHFWEQKEDFTFVSLLTRPEVITALSKVRAECNKVTAMSLFHSSLSKYSHLEEFEQIQSQTFSQVQMFLKDSWISSLKVAMRSSLRDMSKGWYNLYETNWEVYLMSKLRKLMELVKYMLQDTLRFLVQDSLASFSQFISDTCCSVLNCTDDMVWGDDLINSPYRPRKNPLFIMDLVLDSSGVHYSTPLEQFEASLLNLFDKGILATHAVPQLEKLVMEDIFISGDPLLESVGLHEPLVEELRATIASAVSKAMIPLQAYAKEYRKYLELNNNDIASFLKTYQTQGLLAQEVREVVLTHLREKEILDSSLPSSIIIGPFYINTDNVKQSLSKKRKALATSVLDILAKNLHKEVDSICEEFRSISRKIYEKPNSIEELAELREWMKGIPERLVGLEERIVKVMDDYQVMDEFLYNLSSDDFNDKWIASNWPSKILGQIELVQQQHVEDEEKFRKIQIMDQNNFQEKLEGLQLVVAGFSIHVEISRAHEIANEVRRVKKQLKDCQQLAMLYNNRERIFSLPITNYDKLSRMVKEFQPYLDLWTTASDWLRWSESWMNDPLSAIDAEQLEKNVVEAFKTMHKCVKQFKDMPACQEVALDIRARIEEFKPYIPLIQGLRNPGMRIRHWETLSNQININVRPKANLTFARCLEMNLQDHIESISKVAEVAGKEYAIEQALDKMEKEWSTILFNVLPYKATDTYILKSPDEASQLLDDHIVMTQNMSFSPYKKPFEQRINSWENKLKLTQEVLEEWLNCQRSWLYLEPIFSSEDINQQLPVESKRYQTMERIWKKIMKNAYENREVINVCSDLRMLDSLRDCNKILDLVQKGLSEYLETKRSAFPRFYFLSDDELLEILSQTKDPTAVQPHLRKCFENIARLLFQEDLEITHMYSAEGEEVQLCFSIYPSSNVEDWLREVERSMKASVHDIIEKAIRAYPTMPRTQWVLNWPGQVTIAGCQTYWTMEVAEALEAGNLRSQLFPQLCQQLSDLVALVRGKLSRMQRAVLSALIVIEVHAKDVVSKLIQENVVSVNDFQWISQLRYYWTNNDLYIRAVNAEFIYGYEYLGNSGRLVITPLTDRCYLTLTGALHLKFGGAPAGPAGTGKTETTKDLGKALAIQTVVFNCSDQLDFMAMGKFFKGLASAGAWACFDEFNRIDIEVLSVVAQQITTIQKAQQQRVERFMFEGVEIPLVPSCAVFITMNPGYAGRTELPDNLKALFRPVAMMVPDYAMITEISLYSFGFNEASVLAKKITTTFKLSSEQLSSQDHYDFGMRAVKTVISAAGNLKRENPSMNEELICLRAIRDVNVPKFLQEDLKLFSGIVSDLFPTIKEEDTDYGILDEAIREACRNSNLKDVEGFLTKCIQLYETTVVRHGLMLVGPTGSGKSTCYRVLAAAMTSLKGQPSISGGMYEAVNYYVLNPKSITMGQLYGEFDLLTHEWTDGIFSSFIRAGAITSDTNKKWYMFDGPVDAIWIENMNTVLDDNKKLCLSSGEIIKLTEAMTMMFEVQDLAVASPATVSRCGMVYLEPSILGLMPFIECWLRKLPPLLKPYEEHFKALFVSFLEESISFVRSSVKEVIASTNCNLTMSLLKLLDCFFKPFLPREGLKKIPSEKLSRIVELIEPWFIFSLIWSVGATGDSSGRTSFSHWLRLKMENEQLTLLFPEEGLVFDYRLEDAGISGTNDSEDEEEEYKQVAWVKWMDSSAPFTMVPDTNYCNIIVPTMDTVQMSHLLDMLLTNKKPVLCIGPTGTGKTLTISDKLLKNLALDYISHFLTFSARTSANQTQDFIDSKLDKRRKGVFGPPLGRNFIFFIDDLNMPALETYGAQPPIELLRQWMDHGGWYDRKIIGAFKNLVDINFVCAMGPPGGGRNTVTPRLMRHFNYLSFAEMDEVSKKRIFSTILGNWLDGLLGEKSYRERVPGAPHIAHFTEPLVEATIMVYATITSQLLPTPAKSHYTFNLRDLSKVFQGMLMADPAKVEDQVQLLRLWYHENCRVFRDRLVNEEDRSWFDQLLKRCMEQWEVTFNKVCPFQPILYGDFMSPGSDVKSYELITSESKMMQVIEEYIEDYNQINTAKLKLVLFMDAMSHICRISRTLRQALGNALLLGVGGSGRSSLTRLASHMAEYECFQIELSKNYGMSEWRDDVKKVLLKAGLQNLPITFLFSDTQIKNESFLEDINNVLNSGDIPNLYTADEQDQIVSTMRPYIQEQGLQPTKANLMAAYTGRVRSNIHMVLCMSPIGEVFRARLRQFPSLVNCCTIDWFNEWPAEALKSVATVFLNEIPELESSQEEIQGLIQVCVYIHQSVSKKCIEYLAELTRHNYVTPKSYLELLHIFSILIGQKKLELKTAKNRMKSGLDKLLRTSEDVAKMQEDLESMHPLLEEAAKDTMLTMEQIKVDTAIAEETRNSVQTEEIKANEKAKKAQAIADDAQKDLDEALPALDAALASLRNLNKNDVTEVRAMQRPPPGVKLVIEAVCIMKGIKPKKVPGEKPGTKVDDYWEPGKGLLQDPGHFLESLFKFDKDNIGDVVIKAIQPYIDNEEFQPATIAKVSKACTSICQWVRAMHKYHFVAKAVEPKRQALLEAQDDLGVTQRILDEAKQRLREVEDGIATMQAKYRECITKKEELELKCEQCEQRLGRAGKVRTLLLQGLQAGPAQTGARKDQGAGGSWGGCPHPLPGNPGATVGRASPRPLAQPPRAHPTGLPLQLINGLSDEKVRWQETVENLQYMLNNISGDVLVAAGFVAYLGPFTGQYRTVLYDSWVKQLRSHNVPHTSEPTLIGTLGNPVKIRSWQIAGLPNDTLSVENGVINQFSQRWTHFIDPQSQANKWIKNMEKDNGLDVFKLSDRDFLRSMENAIRFGKPCLLENVGEELDPALEPVLLKQTYKQQGNTVLKLGDTVIPYHEDFRMYITTKLPNPHYTPEISTKLTLINFTLSPSGLEDQLLGQVVAEERPDLEEAKNQLIISNAKMRQELKDIEDQILYRLSSSEGNPVDDMELIKVLEASKMKAAEIQAKVRIAEQTEKDIDLTRMEYIPVAIRTQILFFCVSDLANVDPMYQYSLEWFLNIFLSGIANSERADNLKKRISNINRYLTYSLYSNVCRSLFEKHKLMFAFLLCVRIMMNEGKINQSEWRYLLSGGSISIMTENPAPDWLSDRAWRDILALSNLPTFSSFSSDFVKHLSEFRVIFDSLEPHREPLPGIWDQYLDQFQKLLVLRCLRGDKVTNAMQDFVATNLEPRFIEPQTANLSVVFKDSNSTTPLIFVLSPGTDPAADLYKFAEEMKFSKKLSAISLGQGQGPRAEAMMRSSIERGKWVFFQNCHLAPSWMPALERLIEHINPDKVHRDFRLWLTSLPSNKFPVSILQNGSKMTIEPPRGVRANLLKSYSSLGEDFLNSCHKVMEFKSLLLSLCLFHGNALERRKFGPLGFNIPYEFTDGDLRICISQLKMFLDEYDDIPYKVLKYTAGEINYGGRVTDDWDRRCIMNILEDFYNPDVLSPEHSYSASGIYHQIPPTYDLHGYLSYIKSLPLNDMPEIFGLHDNANITFAQNETFALLGTIIQLQPKSSSAGSQGREEIVEDVTQNILLKVPEPINLQWVMAKYPVLYEESMNTVLVQEVIRYNRLLQVITQTLQDLLKALKGLVVMSSQLELMAASLYNNTVPELWSAKAYPSLKPLSSWVMDLLQRLDFLQAWIQDGIPAVFWISGFFFPQAFLTGTLQNFARKFVISIDTISFDFKVMFEAPSELTQRPQVGCYIHGLFLEGARWDPEAFQLAESQPKELYTEMAVIWLLPTPNRKAQDQDFYLCPIYKTLTRAGTLSTTGHSTNYVIAVEIPTHQPQRHWIKRGVALICALDY

SEQ ID NO: 11115 - protein, 1320 aa, Homo sapiens
MQVYNLTFYSTSDGKEKLTATNMRSDGASGCWRKEVGAGSANGVEMVQGPVQTPALTIHRRKRRRSCPPNRASYLPKAESLASLGSHLPALLSRARVPRPPAGRRERERRRRPVAKAPARLRGEYETGVKMTSRFGKTYSRKGGNGSSKFDEVFSNKRTTLSTKWGETTFMAKLGQKRPNFKPDIQEIPKKPKVEEESTGDPFGFDSDDESLPVSSKNLAQVKCSSYSESSEAAQLEEVTSVLEANSKISHVVVEDTVVSDKCFPLEDTLLGKEKSTNRIVEDDASISSCNKLITSDKVENFHEEHEKNSHHIHKNADDSTKKPNAETTVASEIKETNDTWNSQFGKRPESPSEISPIKGSVRTGLFEWDNDFEDIRSEDCILSLDSDPLLEMKDDDFKNRLENLNEAIEEDIVQSVLRPTNCRTYCRANKTKSSQGASNFDKLMDGTSQALAKANSESSKDGLNQAKKGGVSCGTSFRGTVGRTRDYTVLHPSCLSVCNVTIQDTMERSMDEFTASTPADLGEAGRLRKKADIATSKTTTRFRPSNTKSKKDVKLEFFGFEDHETGGDEGGSGSSNYKIKYFGFDDLSESEDDEDDDCQVERKTSKKRTKTAPSPSLQPPPESNDNSQDSQSGTNNAENLDFTEDLPGVPESVKKPINKQGDKSKENTRKIFSGPKRSPTKAVYNARHWNHPDSEELPGPPVVKPQSVTVRLSSKEPNQKDDGVFKAPAPPSKVIKTVTIPTQPYQDIVTALKCRREDKELYTVVQHVKHFNDVVEFGENQEFTDDIEYLLSGLKSTQPLNTRCLSVISLATKCAMPSFRMHLRAHGMVAMVFKTLDDSQHHQNLSLCTAALMYILSRDRLNMDLDRASLDLMIRLLELEQDASSAKLLNEKDMNKIKEKIRRLCETVHNKHLDLENITTGHLAMETLLSLTSKRAGDWFKEELRLLGGLDHIVDKVKECVDHLSRDEDEEKLVASLWGAERCLRVLESVTVHNPENQSYLIAYKDSQLIVSSAKALQHCEELIQQYNRAEDSICLADSKPLPHQNVTNHVGKAVEDCMRAIIGVLLNLTNDNEWGSTKTGEQDGLIGTALNCVLQVPKYLPQEQRFDIRVLGLGLLINLVEYSARNRHCLVNMETSCSFDSSICSGEGDDSLRIGGQVHAVQALVQLFLERERAAQLAESKTDELIKDAPTTQHDKSGEWQETSGEIQWVSTEKTDGTEEKHKKEEEDEELDLNKALQHAGKHMEDCIVASYTALLLGCLCQESPINVTTVREYLPEGDFSIMTEMLKKFLSFMNLTCAVGTTGQKSISRVIEYLEHC

SEQ ID NO: 11116 - protein, 1165 aa, Homo sapiens
RAGEVVPGWLLAAAAAHPGRPAASLSPGLGAVLGVAGRQVADPRFRRDWFRIPSPPAESAGPARQAGFAAAPPARAGPALSTMKGTRAIGSVPERSPAGVDLSLTGLPPPVSRRPGSAATTKPIVRSVSVVTGSEQKRKVLEATGPGGSQAINNLRRSNSTTQVSQPRSGSPRPTEPTDFLMLFEGSPSGKKRPASLSTAPSEKGATWNVLDDQPRGFTLPSNARSSSALDSPAGPRRKECTVALAPNFTANNRSNKGAVGNCVTTMVHNRYTPSERAPPLKSSNQTAPSLNNIIKAATCEGSESSGFGKLPKNVSSATHSARNNTGGSTGLPRRKEVTEEEAERFIHQVNQAAVTIQRWYRHQVQRRGAGAARLEHLLQAKREEQRQRSGEGTLLDLHQQKEAARRKAREEKARQARRAAIQELQQKRALRAQKASTAERGPPENPRETRVPGMRQPAQELSPTPGGTAHQALKANNAGGGLPAAGPGDRCLPTSDSSPEPQQPPEDRTQDVLAQDAAGDNLEMMAPSRGSAKSRGPLEELLHTLQLLEKEPDALPRPRTHHRGRYAWASEVTTEDDASSLTADNLEKFGKLSAFPEPPEDGTLLSEAKLQSIMSFLDEMEKSGQDQLDSQQEGWVPEAGPGPLELGSEVSTSVMRLKLEVEEKKQAMLLLQRALAQQRDLTARRVKETEKALSRQLQRQREHYEATIQRHLAFIDQLIEDKKVLSEKCEAVVAELKQEDQRCTERVAQAQAQHELEIKKLKELMSATEKARREKWISEKTKKIKEVTVRGLEPEIQKLIARHKQEVRRLKSLHEAELLQSDERASQRCLRQAEELREQLEREKEALGQQERERARQRFQQHLEQEQWALQQQRQRLYSEVAEERERLGQQAARQRAELEELRQQLEESSSALTRALRAEFEKGREEQERRHQMELNTLKQQLELERQAWEAGRTRKEEAWLLNREQELREEIRKGRDKEIELVIHRLEADMALAKEESEKAAESRIKRLRDKYEAELSELEQSERKLQERCSELKGQLGEAEGENLRLQGLVRQKERALEDAQAVNEQLSSERSNLAQVIRQEFEDRLAASEEETRQAKAELATLQARQQLELEEVHRRVKTALARKEEAVSSLRTQHEAAVKRADHLEELLEQHRRPTPSTK

SEQ ID NO: 11117 - protein, 1254 aa, Homo sapiens
MKKHRRALALVSCLFLCSLVWLPSWRVCCKESSSASASSYYSQDDNCALENEDVQFQKKDEREGPINAESLGKSGSNLPISPKEHKLKDDSIVDVQNTESKKLSPPVVETLPTVDLHEESSNAVVDSETVENISSSSTSEITPISKLDEIEKSGTIPIAKPSETEQSETDCDVGEALDASAPIEQPSFVSPPDSLVGQHIENVSSSHGKGKITKSEFESKVSASEQGGGDPKSALNASDNLKNESSDYTKPGDIDPTSVASPKDPEDIPTFDEWKKKVMEVEKEKSQSMHASSNGGSHATKKVQKNRNNYASVECGAKILAANPEAKSTSAILIENMDLYMLNPCSTKIWFVIELCEPIQVKQLDIANYELFSSTPKDFLVSISDRYPTNKWIKLGTFHGRDERNVQSFPLDEQMYAKYVKMFIKYIKVELLSHFGSEHFCPLSLIRVFGTSMVEEYEEIADSQYHSERQELFDEDYDYPLDYNTGEDKSSKNLLGSATNAILNMVNIAANILGAKTEDLTEGNKSISENATATAAPKMPESTPVSTPVPSPEYVTTEVHTHDMEPSTPDTPKESPIVQLVQEEEEEASPSTVTLLGSGEQEDESSPWFESETQIFCSELTTICCISSFSEYIYKWCSVRVALYRQRSRTALSKGKDYLVLAQPPLLLPAESVDVSVLQPLSGELENTNIEREAETVVLGDLSSSMHQDDLVNHTVDAVELEPSHSQTLSQSLLLDITPEINPLPKIEVSESVEYEAGHIPSPVIPQESSVEIDNETEQKSESFSSIEKPSITYETNKVNELMDNIIKEDVNSMQIFTKLSETIVPPINTATVPDNEDGEAKMNIADTAKQTLISVVDSSSLPEVKEEEQSPEDALLRGLQRTATDFYAELQNSTDLGYANGNLVHGSNQKESVFMRLNNRIKALEVNMSLSGRYLEELSQRYRKQMEEMQKAFNKTIVKLQNTSRIAEEQDQRQTEAIQLLQAQLTNMTQLVSNLSATVAELKREVSDRQSYLVISLVLCVVLGLMLCMQRCRNTSQFDGDYISKLPKSNQYPSPKRCFSSYDDMNLKRRTSFPLMRSKSLQLTGKEVDPNDLYIVEPLKFSPEKKKKRCKYKIEKIETIKPEEPLHPIANGDIKGRKPFTNQRDFSNMGEVYHSSYKGPPSEGSSETSSQSEESYFCGISACTSLCNGQSQKTKTEKRALKRRRSKVQDQGKLIKTLIQTKSGSLPSLHDIIKGNKEITVGTFGVTAVSGHI

SEQ ID NO: 11118 - protein, 1405 aa, Homo sapiens
MRGFLARPFLSTNQHLAQWGSPLPQGKGLVQLPSQHTRHSRPFHELCSKEENSATVPKLISLVVSSETIDFSNKTMDSRRDWEREKRILEGKLQLPKALARTQRARDEGRAWTSRWLQRRRSPESCEAPLSAPLWGPQRGLPGREPLRSRSASAIALRTIGHILALLLRLLHLGLGSGGCREDVPPSGRGKKEEKMKKHRRALALVSCLFLCSLVWLPSWRVCCKESSSASASSYYSQDDNCALENEDVQFQKKNTESKKLSPPVVETLPTVDLHEESSNAVVDSETVENISSSSTSEITPISKLDEIEKSGTIPIAKPSETEQSETDCDVGEALDASAPIEQPSFVSPPDSLVGQHIENVSSSHGKGKITKSEFESKVSASEQGGGDPKSALNASDNLKNESSDYTKPGDIDPTSVASPKDPEDIPTFDEWKKKVMEVEKEKSQSMHASSNGGSHATKKVQKNRNNYASVECGAKILAANPEAKSTSAILIENMDLYMLNPCSTKIWFVIELCEPIQVKQLDIANYELFSSTPKDFLVSISDRYPTNKWIKLGTFHGRDERNVQSFPLDEQMYAKYVKVELLSHFGSEHFCPLSLIRVFGTNMVEEYEEIADSQYHSERQELFDEDYDYPLDYNTGEDKSSKNLLGSATNAILNMVNIAANILGAKTEDLTEGNKSISENATATAAPKMPESTPVSTPVPSPEYVTTEVHTHDMEPSTPDTPKESPIVQLVQEEEEEASPSTVTLLGSGEQEDESSPWFESETQIFCSELTTICCISSFSEYIYKWCSVRVALYRQRSRTALSKGKDYLVLAQPPLLLPAESVDVSVLQPLSGELENTNIEREAETVVLGDLSSSMHQDDLVNHTVDAVELEPSHSQTLSQSLLLDITPEINPLPKIEVSESVEYEAGHIPSPVIPQESSVEIDNETEQKSESFSSIEKPSITYETNKVNELMDNIIKEDMNSMQIFTKLSETIVPPINTATVPDNEDGEAKMNIADTAKQTLISVVDSSSLPEVKEEEQSPEDALLRGLQRTATDFYAELQNSTDLGYANGNLVHGSNQKESVFMRLNNRIKALEVNMSLSGRYLEELSQRYRKQMEEMQKAFNKTIVKLQNTSRIAEEQDQRQTEAIQLLQAQLTNMTQLVSNLSATVAELKREVSDRQSYLVISLVLCVVLGLMLCMQRCRNTSQFDGDYISKLPKSNQYPSPKRCFSSYDDMNLKRRTSFPLMRSKSLQLTGKEVDPNDLYIVEPLKFSPEKKKKRCKYKIEKIETIKPEEPLHPIANGDIKGRKPFTNQRDFSNMGEVYHSSYKGPPSEGSSETSSQSEESYFCGISACTSLCNGQSQKTKTEKRALKRRRSKVQDQGKLIKTLIQTKSGSLPSLHDIIKGNKEITVGTFGVTAVSGHI

SEQ ID NO: 11119 - protein, 173 aa, Homo sapiens
MSLLGPKVLLFLAAFIITSDWIPLGVNSQRGDDVTQATPETFTEDPNLVNDPATDETVLAVLADIAPSTDDLASLSEKNTTAECWDEKFTCTRLYSVHRPVKQCIHQLCFTSLRRMYIVNKEICSRLVCKEHEAMKDELCRQMAGLPPRRLRRSNYFRLPPCENVDLQRPNGL

SEQ ID NO: 11120 - protein, 453 aa, Homo sapiens [sequence omitted]

SEQ ID NO: 11121 - protein, 564 aa, Homo sapiens
MLRTTRGPGLGPPLLQAALGLGRAGWHWPAGRAASGGRGRAWLQPTGRETGVQVYNSLTGRKEPLIVAHAEAASWYSCGPTVYDHAHLGHACSYVRFDIIRRILTKVFGCSIVMVMGITDVDDKIIKRANEMNISPASLASLYEEDFKQDMAALKVLPPTVYLRVTENIPQIISFIEGIIARGNAYSTAKGNVYFDLKSRGDKYGKLVGVVPGPVGEPADSDKRHASDFALWKAAKPQEVFWASPWGPGRPGWHIECSAIASMVFGSQLDIHSGGIDLAFPHHENEIAQCEVFHQCEQWGNYFLHSGHLHAKGKEEKMSKSLKNYITIKDFLKTFSPDVFRFFCLRSSYRSAIDYSDSAMLQAQQLLLGLGSFLEDARAYMKGQLACGSVREAMLWERLSSTKRAVKAALADDFDTPRVVDAILGLAHHGNGQLRASLKEPEGPRSPAVFGAIISYFEQFFETVGISLANQQYVSGDGSEATLHGVVDELVRFRQKVRQFALAMPEATGDARRQQLLERQPLLEACDTLRRGLTAHGINIKDRSSTTSTWELLDQRTKDQKSAG

SEQ ID NO: 11122 - protein, 564 aa, Homo sapiens [sequence omitted]

SEQ ID NO: 11123 - protein, 1613 aa, Homo sapiens
MGAVLRSLLACSFCVLLRAAPLLLYANRRDLRLVDATNGKENATIVVGGLEDAAAVDFVFSHGLIYWSDVSEEAIKRTEFNKTESVQNVVVSGLLSPDGLACDWLGEKLYWTDSETNRIEVSNLDGSLRKVLFWQELDQPRAIALDPSSGFMYWTDWGEVPKIERAGMDGSSRFIIINSEIYWPNGLTLDYEEQKLYWADAKLNFIHKSNLDGTNRQAVVKGSLPHPFALTLFEDILYWTDWSTHSILACNKYTGEGLREIHSDIFSPMDIHAFSQQRQPNATNPCGIDNGGCSHLCLMSPVKPFYQCACPTGVKLLENGKTCKDGATELLLLARRTDLRRISLDTPDFTDIVLQLEDIRHAIAIDYDPVEGYIYWTDDEVRAIRRSFIDGSGSQFVVTAQIAHPDGIAVDWVARNLYWTDTGTDRIEVTRLNGTMRKILISEDLEEPRAIVLDPMVGYMYWTDWGEIPKIERAALDGSDRVVLVNTSLGWPNGLALDYDEGKIYWGDAKTDKIEVMNTDGTGRRVLVEDKIPHIFGFTLLGDYVYWTDWQRRSIERVHKRSAEREVIIDQLPDLMGLKATNVHRVIGSNPCAEENGGCSHLCLYRPQGLRCACPIGFELISDMKTCIVPEAFLLFSRRADIRRISLETNNNNVAIPLTGVKEASALDFDVTDNRIYWTDISLKTISRAFMNGSALEHVVEFGLDYPEGMAVDWLGKNLYWADTGTNRIEVSKLDGQHRQVLVWKDLDSPRALALDPAEGFMYWTEWGGKPKIDRAAMDGSERTTLVPNVGRANGLTIDYAKRRLYWTDLDTNLIESSNMLGLNREVIADDLPHPFGLTQYQDYIYWTDWSRRSIERANKTSGQNRTIIQGHLDYVMDILVFHSSRQSGWNECASSNGHCSHLCLAVPVGGFVCGCPAHYSLNADNRTCSAPTTFLLFSQKSAINRMVIDEQQSPDIILPIHSLRNVRAIDYDPLDKQLYWIDSRQNMIRKAQEDGSQGFTVVVSSVPSQNLEIQPYDLSIDIYSRYIYWTCEATNVINVTRLDGRSVGVVLKGEQDRPRAIVVNPEKGYMYFTNLQERSPKIERAALDGTEREVLFFSGLSKPIALALDSRLGKLFWADSDLRRIESSDLSGANRIVLEDSNILQPVGLTVFENWLYWIDKQQQMIEKIDMTGREGRTKVQARIAQLSDIHAVKELNLQEYRQHPCAQDNGGCSHICLVKGDGTTRCSCPMHLVLLQDELSCGEPPTCSPQQFTCFTGEIDCIPVAWRCDGFTECEDHSDELNCPVCSESQFQCASGQCIDGALRCNGDANCQDKSDEKNCEVLCLIDQFRCANGQCIGKHKKCDHNVDCSDKSDELDCYPTEEPAPQATNTVGSVIGVIVTIFVSGTVYFICQRMLCPRMKGDGETMTNDYVVHGPASVPLGYVPHPSSLSGSLPGMSRGKSMISSLSIMGGSSGPPYDRAHVTGASSSSSSSTKGTYFPAILNPPPSPATERSHYTMEFGYSSNSPSTHRSYSYRPYSYRHFAPPTTPCSTDVCDSDYAPSRRMTSVATAKGYTSDLNYDSEPVPPPPTPRSQYLSAEENYESCPPSPYTERSYSHHLYPPPPSPCTDSS

SEQ ID NO: 11124 - protein, 2623 aa, Homo sapiens
MKVKGRGITCLLVSFAVICLVATPGGKACPRRCACYMPTEVHCTFRYLTSIPDSIPPNVERINLGYNSLVRLMETDFSGLTKLELLMLHSNGIHTIPDKTFSDLQALQVLKMSYNKVRKLQKDTFYGLRSLTRLHMDHNNIEFINPEVFYGLNFLRLVHLEGNQLTKLHPDTFVSLSYLQIFKISFIKFLYLSDNFLTSLPQEMVSYMPDLDSLYLHGNPWTCDCHLKWLSDWIQEKPDVIKCKKDRSPSSAQQCPLCMNPRTSKGKPLAMVSAAAFQCAKPTIDSSLKSKSLTILEDSSSAFISPQGFMAPFGSLTLNMTDQSGNEANMVCSIQKPSRTSPIAFTEENDYIVLNTSFSTFLVCNIDYGHIQPVWQILALYSDSPLILERSHLLSETPQLYYKYKQVAPKPEDIFTNIEADLRADPSWLMQDQISLQLNRTATTFSTLQIQYSSDAQITLPRAEMRPVKHKWTMISRDNNTKLEHTVLVGGTVGLNCPGQGDPTPHVDWLLADGSKVRAPYVSEDGRILIDKSGKLELQMADSFDTGVYHCISSNYDDADILTYRITVVEPLVEAYQENGIHHTVFIGETLDLPCHSTGIPDASISWVIPGNNVLYQSSRDKKVLNNGTLRILQVTPKDQGYYRCVAANPSGVDFLIFQVSVKMKGQRPLEHDGETEGSGLDESNPIAHLKEPPGAQLRTSALMEAEVGKHTSSTSKRHNYRELTLQRRGDSTHRRFRENRRHFPPSARRIDPQHWAALLEKAKKNAMPDKRENTTVSPPPVVTQLPNIPGEEDDSSGMLALHEEFMVPATKALNLPARTVTADSRTISDSPMTNINYGTEFSPVVNSQILPPEEPTDFKLSTAIKTTAMSKNINPTMSSQIQGTTNQHSSTVFPLLLGATEFQDSDQMGRGREHFQSRPPITVRTMIKDVNVKMLSSTTNKLLLESVNTTNSHQTSVREVSEPRHNHFYSHTTQILSTSTFPSDPHTAAHSQFPIPRNSTVNIPLFRRFGRQRKIGGRGRIISPYRTPVLRRHRYSIFRSTTRGSSEKSTTAFSATVLNVTCLSCLPRERLTTATAALSFPSAAPITFPKADIARVPSEESTTLVQNPLLLLENKPSVEKTTPTIKYFRTEISQVTPTGAVMTYAPTSIPMEKTHKVNASYPRVSSTNEAKRDSVITSSLSGAITKPPMTIIAITRFSRRKIPWQQNFVNNHNPKGRLRNQHKVSLQKSTAVMLPKTSPALPRDKVSPFHFTTLSTSVMQIPSNTLTTAHHTTTKTHNPGSLPTKKELPFPPLNPMLPSIISKDSSTKSIISTQTAIPATTPTFPASVITYETQTERSRAQTIQREQEPQKKNRTDPNISPDQSSGFTTPTAMTPPVLTTAETSVKPSVSAFTHSPPENTTGISSTISFHSRTLNLTDVIEELAQASTQTLKSTIASETTLSSKSHQSTTTRKAIIRHSTIPPFLSSSATLMPVPISPPFTQRAVTDNVATPISGLMTNTVVKLHESSRHNAKPQQLVAEVATSPKVHPNAKFTIGTTHFIYSNLLHSTPMPALTTVKSQNSKLTPSPWAENQFWHKPYSEIAEKGKKPEVSMLATTGLSEATTLVSDWDGQKNTKKSDFDKKPVQEATTSKLLPFDSLSRYIFEKPRIVGGKAASFTIPANSDAFLPCEAVGNPLPTIHWTRVPSGLDLSKRKQNSRVQVLPNGTLSIQRVEIQDRGQYLCSASNLFGTDHLHVTLSVVSYPPRILERRTKEITVHSGSTVELKCRAEGRPSPTVTWILANQTVVSESSQGSRQAVVTVDGTLVLHNLSIYDRGFYKCVASNPGGQDSLLVKIQVIAAPPVILEQRRQVIVGTWGESLKLPCTAKGTPQPSVYWVLSDGTEVKPLQFTNSKLFLFSNGTLYIRNLASSDRGTYECIATSSTGSERRVVMLTMEERVTSPRIEAASQKRTEVNFGDKLLLNCSATGEPKPQIMWRLPSKAVVDQQHRVGSWIHVYPNGSLFIGSVTEKDSGVYLCVARNKMGDDLILMHVSLRLKPAKIDHKQYFRKQVLHGKDFQVDCKASGSPVPEISWSLPDGTMINNAMQADDSGHRTRRYTLFNNGTLYFNKVGVAEEGDYTCYAQNTLGKDEMKVHLTVITAAPRIRQSNKTNKRIKAGDTAVLDCEVTGDPKPKIFWLLPSNDMISFSIDRYTFHANGSLTINKVKLLDSGEYVCVARNPSGDDTKMYKLDVVSKPPLINGLYTNRTVIKATAVRHSKKHFDCRAEGTPSPEVMWIMPDNIFLTAPYYGSRITVHKNGTLEIRNVRLSDSADFICVARNEGGESVLVVQLEVLEMLRRPTFRNPFNEKIVAQLGKSTALNCSVDGNPPPEIIWILPNGTRFSNGPQSYQYLIASNGSFIISKTTREDAGKYRCAARNKVGYIEKLVILEIGQKPVILTYAPGTVKGISGESLSLHCVSDGIPKPNIKWTMPSGYVVDRPQINGKYILHDNGTLVIKEATAYDRGNYICKAQNSVGHTLITVPVMIVAYPPRITNRPPRSIVTRTGAAFQLHCVALGVPKPEITWEMPDHSLLSTASKERTHGSEQLHLQGTLVIQNPQTSDSGIYKCTAKNPLGSDYAATYIQVI

SEQ ID NO: 11125 - protein, 490 aa, Homo sapiens
MRPAFALCLLWQALWPGPGGGEHPTADRAGCSASGACYSLHHATMKRQAAEEACILRGGALSTVRAGAELRAVLALLRAGPGPGGGSKDLLFWVALERRRSHCTLENEPLRGFSWLSSDPGGLESDTLQWVEEPQRSCTARRCAVLQATGGVEPAGWKEMRCHLRANGYLCKYQFEVLCPAPRPGAASNLSYRAPFQLHSAALDFSPPGTEVSALCRGQLPISVTCIADEIGARWDKLSGDVLCPCPGRYLRAGKCAELPNCLDDLGGFACECATGFELGKDGRSCVTSGEGQPTLGGTGVPTRRPPATATSPVPQRTWPIRVDEKLGETPLVPEQDNSVTSIPEIPRWGSQSTMSTLQMSLQAESKATITPSGSVISKFNSTTSSATPQAFDSSSAVVFIFVSTAVVVLVILTMTVLGLVKLCFHESPSSQPRKESMGPPGLESDPEPAALGSSSAHCTNNGVKVGDCDLRDRAEGALLAESPLGSSDA

SEQ ID NO: 11126 - protein, 304 aa, Homo sapiens
MLPPPRPAAALALPVLLLLLVVLTPPPTGARPSPGPDYLRRGWMRLLAEGEGCAPCRPEECAAPRGCLAGRVRDACGCCWECANLEGQLCDLDPSAHFYGHCGEQLECRLDTGGDLSRGEVPEPLCACRSQSPLCGSDGHTYSQICRLQEAARARPDANLTVAHPGPCESGPQIVSHPYDTWNVTGQDVIFGCEVFAYPMASIEWRKDGLDIQLPGDDPHISVQFRGGPQRFEVTGWLQIQAVRPSDEGTYRCLGRNALGQVEAPASLTVLTPDQLNSTGIPQLRSLNLVPEEEAESEENDDYY

SEQ ID NO: 11127 - protein, 633 aa, Homo sapiens
AALGSSSGSASPAVAELCQNTPETFLEASKLLLTYADNILRNPNDEKYRSIRIGNTAFSTRLLPVRGAVECLFEMGFEEGETHLIFPKKASVEQLQKIRDLIAIERSSRLDGSNKSHKVKSSQQPAASTQLPTTPSSNPSGLNQHTRNRQGQSSDPPSASTVAADSAILEVLQSNIQHVLVYENPALQEKALACIPVQELKRKSQEKLSRARKLDKGINISDEDFLLLELLHWFKEEFFHWVNNVLCSKCGGQTRSRDRSLLPSDDELKWGAKEVEDHYCDACQFSNRFPRYNNPEKLLETRCGRCGEWANCFTLCCRAVGFEARYVWDYTELQRTLSLKLTTLKEIGKTFLRISKRQKLIQVVDVTWRYSCKHEEVIARRTKVKEALLRDTINGLNKQRQLFLSENRRKELLQRIIVELVEFISPKTPKPGELGGRISGSVAWRVARGEMGLQRKETLFIPCENEKISKQLHLCYNIVKDRYVRVSNNNQTISGWENGVWKMESIFRKVETDWHMVYLARKEGSSFAYISWKFECGSVGLKVDSISIRTSSQTFQTGTVEWKLRSDTAQVELTGDNSLHSYADFSGATEVILEAELSRGDGDVAWQHTQLFRQSLNDHEENCLEIIIKFSDL

SEQ ID NO: 11128 - protein, 654 aa, Homo sapiens [sequence omitted]

SEQ ID NO: 11129 - protein, 244 aa, Homo sapiens
MKKLMVVLSLIAAAWAEEQNKLVHGGPCDKTSHPYQAALYTSGHLLCGGVLIHPLWVLTAAHCKKPNLQVFLGKHNLRQRESSQEQSSVVRAVIHPDYDAASHDQDIMLLRLARPAKLSELIQPLPLERDCSANTTSCHILGWGKTADGDFPDTIQCAYIHLVSREECEHAYPGQITQNMLCAGDEKYGKDSCQGDSGGPLVCGDHLRGLVSWGNIPCGSKEKPGVYTNVCRYTNWIQKTIQAK

SEQ ID NO: 11130 - protein, 331 aa, Homo sapiens
MWRGSDLRPRPVSLTGLTLVVVAAQGPQVHSVKLCFGLGGPCLLFPIFRPLLLHPRRPRLHPGTRGVAVEPHALRVVHVAHGEEAGIRAAGPGHGGVEIPQGVSLGARRGLRPSRPSSRHRNRVPAPPPGRPLATPHRRRFPPDPALTCPGLGQDQGPREQQKQGSGRHDTILGDWEESESRWVRGNFRTGTAATLIGFSRNPTLNGSENWGSPVSTQEEGPDTGWEREKRNPAKMGNAQRWASPIHTPPLGPEILRATPEALGLRPDPATSVPSALSQCFPESWPRSCLRNQGETLGMGPVPLSSLCITESPSQNWTPCLLLLTCPRGLF

SEQ ID NO: 11131 - protein, 421 aa, Homo sapiens
MGFLSPIYVIFFFFGVKVHCQYETYQWDEDYDQEPDDDYQTGFPFRQNVDYGVPFHQYTLGCVSECFCPTNFPSSMYCDNRKLKTIPNIPMHIQQLYLQFNEIEAVTANSFINATHLKEINLSHNKIKSQKIDYGVFAKLPNLLQLHLEHNNLEEFPFPLPKSLERLLLGYNEISKLQTNAMDGLVNLTMLDLCYNYLHDSLLKDKIFAKMEKLMQLNLCSNRLESMPPGLPSSLMYLSLENNSISSIPEKYFDKLPKLHTLRMSHNKLQDIPYNIFNLPNIVELSVGHNKLKQAFYIPRNLEHLYLQNNEIEKMNLTVMCPSIDPLHYHHLTYIRVDQNKLKEPISSYIFFCFPHIHTIYYGEQRSTNGQTIQLKTQVFRRFPDDDDESEDHDDPDNAHESPEQEGAEGHFDLHYYENQE

SEQ ID NO: 11132 - protein, 702 aa, Homo sapiens
MESPSAPPHRWCIPWQRLLLTASLLTFWNPPTTAKLTIESTPFNVAEGKEVLLLVHNLPQHLFGYSWYKGERVDGNRQIIGYVIGTQQATPGPAYSGREIIYPNASLLIQNIIQNDTGFYTLHVIKSDLVNEEATGQFRVYPELPKPSISSNNSKPVEDKDAVAFTCEPETQDATYLWWVNNQSLPVSPRLQLSNGNRTLTLFNVTRNDTASYKCETQNPVSARRSDSVILNVLYGPDAPTISPLNTSYRSGENLNLSCHAASNPPAQYSWFVNGTFQQSTQELFIPNITVNNSGSYTCQAHNSDTGLNRTTVTTITVYAEPPKPFITSNNSNPVEDEDAVALTCEPEIQNTTYLWWVNNQSLPVSPRLQLSNDNRTLTLLSVTRNDVGPYECGIQNELSVDHSDPVILNVLYGPDDPTISPSYTYYRPGVNLSLSCHAASNPPAQYSWLIDGNIQQHTQELFISNITEKNSGLYTCQANNSASGHSRTTVKTITVSAELPKPSISSNNSKPVEDKDAVAFTCEPEAQNTTYLWWVNGQSLPVSPRLQLSNGNRTLTLFNVTRNDARAYVCGIQNSVSANRSDPVTLDVLYGPDTPIISPPDSSYLSGANLNLSCHSASNPSPQYSWRINGIPQQHTQVLFIAKITPNNNGTYACFVSNLATGRNNSIVKSITVSASGTSPGLSAGATVGIMIGVLVGVALI

SEQ ID NO: 11133 - protein, 346 aa, Homo sapiens
MARKSNLPVLLVPFLLCQALVRCSSPLPLVVNTWPFKNATEAAWRALASGGSALDAVESGCAMCEREQCDGSVGFGGSPDELGETTLDAMIMDGTTMDVGAVGDLRRIKNAIGVARKVLEHTTHTLLVGESATTFAQSMGFINEDLSTSASQALHSDWLARNCQPNYWRNVIPDPSKYCGPYKPPGILKQDIPIHKETEDDRGHDTIGMVVIHKTGHIAAGTSTNGIKFKIHGRVGDSPIPGAGAYADDTAGAAAATGNGDILMRFLPSYQAVEYMRRGEDPTIACQKVISRIQKHFPEFFGAVICANVTGSYGAACNKLSTFTQFSFMVYNSEKNQPTEEKVDCI

SEQ ID NO: 11134 - protein, 729 aa, Homo sapiens
MNPFQKNESKETLFSPVSIEEVPPRPPSPPKKPSPTICGSNYPLSIAFIVVNEFCERFSYYGMKAVLILYFLYFLHWNEDTSTSIYHAFSSLCYFTPILGAAIADSWLGKFKTIIYLSLVYVLGHVIKSLGALPILGGQVVHTVLSLIGLSLIALGTGGIKPCVAAFGGDQFEEKHAEERTRYFSVFYLSINAGSLISTFITPMLRGDVQCFGEDCYALAFGVPGLLMVIALVVFAMGSKIYNKPPPEGNIVAQVFKCIWFAISNRFKNRSGDIPKRHDWLDWAAEKYPKQLIMDVKALTRVLFLYIPLPMFWALLDQQGSRWTLQAIRMNRNLGFFVLQPDQMQVLNPLLVLIFIPLFDFVIYRLVSKCGINFSSLRKMAVGMILACLAFAVAARVEIKINEMAPAQPGPQEVFLQVLNLADDEVKVTVVGNENNSLLIESIKSFQKTPHYSKLHLKTKSQDFHFHLKYHNLSLYTEHSVQEKNWYSLVIREDGNSISSMMVKDTESRTTNGMTTVRFVNTLHKDVNISLSTDTSLNVGEDYGVSAYRTVQRGEYPAVHCRTEDKNFSLNLGLLDFGAAYLFVITNNTNQGLQAWKIEDIPANKMSIRWQLPQYALVTAGEVMFSVTGLEFSYSQAPSSMKSVLQAAWLLTIAVGNIIVLVVAQFSGLVQWAEFILFSCLLLVICLIFSIMGYYYVPVKTEDMRGPADKHIPHIQGNMIKLETKKTKL

SEQ ID NO: 11135 - protein, 729 aa, Homo sapiens
MNPFQKNESKETLFSPVSIEEVPPRPPSPPKKPSPTICGSNYPLSIAFIVVNEFCERFSYYGMKAVLILYFLYFLHWNEDTSTSIYHAFSSLCYFTPILGAAIADSWLGKFKTIIYLSLVYVLGHVIKSLGALPILGGQVVHTVLSLIGLSLIALGTGGIKPCVAAFGGDQFEEKHAEERTRYFSVFYLSINAGSLISTFITPMLRGDVQCFGEDCYALAFGVPGLLMVIALVVFAMGSKIYNKPPPEGNIVAQVFKCIWFAISNRFKNRSGDIPKRQHWLDWAAEKYPKQLIMDVKALTRVLFLYIPLPMFWALLDQQGSRWTLQAIRMNRNLGFFVLQPDQMQVLNPLLVLIFIPLFDFVIYRLVSKCGINFSSLRKMAVGMILACLAFAVAAAVEIKINEMAPAQPGPQEVFLQVLNLADDEVKVTVVGNENNSLLIESIKSFQKTPHYSKLHLKTKSQDFHFHLKYHNLSLYTEHSVQEKNWYSLVIREDGNSISSMMVKDTESRTTNGMTTVRFVNTLHKDVNISLSTDTSLNVGEDYGVSAYRTVQRGEYPAVHCRTEDKNFSLNLGLLDFGAAYLFVITNNTNQGLQAWKIEDIPANKMSIAWQLPQYALVTAGEVMFSVTGLEFSYSQAPSGMKSVLQAAWLLTIAVGNIIVLVVAQFSGLVQWAEFILFSCLLLVICLIFSIMGYYYVPVKTEDMRGPADKHIPHIQGNMIKLETKKTKL

SEQ ID NO: 11136 - protein, 318 aa, Homo sapiens
MAAAAAAAAEQQSSNGPVKKSMREKAVERRSVNKEHNSNFKAGYIPIDEDRLHKTGLRGRKGNLAICVIILLFILAVINLIITLVIWAVIRIGPNGCDSMEFHESGLLRFKQVSDMGVIHPLYKSTVGGRRNENLVITGNNQPIVFQQGTTKLSVENNKTSITSDIGMQFFDPRTQNILFSTDYETHEFHLPSGVKSLNVQKASTERITSNATSDLNIKVDGRAIVRGNEGVFIMGKTIEFHMGGNMELKAENSIILNGSVMVSTTRLPSSSSGDQLGSGDWVRYKLCMCADGTLFKVQVTSQNMGCQISDNPCGNTH

SEQ ID NO: 11137 - protein, 325 aa, Homo sapiens
MTTIILEVDNHTVTTRFILLGFPTRPAFQLLFFSIFLATYLLTLLENLLIILAIHSDGQLHKPMYFFLSHLSFLEMWYVTVISPKMLVDFLSHDKSISFNGCMTQLYFFVTFVCTEYILLAIMAFDRYVAICNPLRYPVIMTNQLCGTLAGGCWFCGLMTAMIKMVFIAQLHYCGMPQINHYFCDISPLLNVSCEDASQAEMVDFFLALMVIAIPLCVVVASYAAILATILRIPSAQGRQKAFSTCASHLTVVILFYSMTLFTYARPKLMYAYNSNKVVSVLYTVIVPLLNPIIYCLRNHEVKAALRKTIHCRGSGPQGNGAFSS

SEQ ID NO: 11138 - protein, 568 aa, Homo sapiens
MVLGPEQKMSDDSVSGDHGESASLGNINPAYSNPSLSQSPGDSEEYFATYFNEKISIPEEEYSCFSFRKLWAFTGPGFLMSIAYLDPGNIESDLQSGAVAGFKLLWILLLATLVGLLLQRLAARLGVVTGLHLAEVCHRQYPKVPRVILWLMVELAIIGSDMQEVIGSAIAINLLSVGRIPLWGGVLITIADTFVFLFLDKYGLRKLEAFFGFLITIMALTFGYEYVTVKPSQSQVLKGMFVPSCSGCRTPQIEQAVGIVGAVIMPHNMYLHSALVKSRQVNRNNKQEVREANKYFFIESCIALFVSFIINVFVVSVFAEAFFGKTNEQVVEVCTNTSSPHAGLFPKDNSTLAVDIYKGGVVLGCYFGPAALYIWAVGILAAGQSSTMTGTYSGQFVMEGFLNLKWSRFARVVLTRSIAIIPTLLVAVFQDVEHLTGMNDFLNVLQSLQLPFALIPILTFTSLRPVMSDFANGLGWRIAGGILVLIICSINMYFVVVYVRDLGHVALYVVAAVVSVAYLGFVFYLGWQCLIALGMSFLDCGHTCHLGLTAQPELYLLNTMDADSLVSR

SEQ ID NO: 11139 - protein, 561 aa, Homo sapiens
MVLGPEQKMSDDSVSGDHGESASLGNINPAYSNPSLSQSPGDSEEYFATYFNEKISIPEEEYSCFSFRKLWAFTGPGFLMSIAYLDPGNIESDLQSGAVAGFKLLWILLLATLVGLLLQRLAARLGVVTGLHLAEVCHRQYPKVPRVILWLMVELAIIGSDMQEVIGSAIAINLLSVGRIPLWGGVLITIADTFVFLFLDKYGLRKLEAFFGFLITIMALTFGYEYVTVKPSQSQVLKGMFVPSCSGCRTPQIEQAVGIVGAVIMPHNMYLHSALVKSRQVNRNNKQEVREANKYFFIESCIALFVSFIINVFVVSVFAEAFFGKTNEQVVEVCTNTSSPHAGLFPKDNSTLAVDIYKGGVVLGCYFGPAALYIWAVGILAAGQSSTMTGTYSGQFVMEGFLNLKWSRFARVVLTRSIAIIPTLLVAVFQDVEHLTGMNDFLNVLQSLQLPFALIPILTFTSLRPVMSDFANGLGWRIAGGILVLIICSINMYFVVVYVRDLGHVALYVVAAVVSVAYLGFVFYLGWQCLIALGMSFLDCGHTVSISKGLLTEEATRGYVK

SEQ ID NO: 11140 - protein, 495 aa, Homo sapiens
MKKRKELNALIGLAGDSRRKKPKKGPSSHRLLRTEPPDSDSESSSEEEEEFGVVGNRSRFAKGDYLRCCKICYPLCGFVILAACVVACVGLVWMQVALKEDLDALKEKFRTMESNQKSSFQEIPKLNEELLSKQKQLEKIESGEMGLNKVWINITEMNKQISLLTSAVNHLKANVKSAADLISLPTTVEGLQKSVASIGNTLNSVHLAVEALQKTVDEHKKTMELLQSDMNQHFLKETPGSNQIIPSPSATSELDNKTHSENLKQDILYLHNSLEEVNSALVGYQRQNDLKLEGMNETVSNLTQRVNLIESDVVAMSKVEKKANLSFSMMGDRSATLKRQSLDQVTNRTDTVKIQSIKKEDSSNSQVSKLREKLQLISALTNKPESNRPPETADEEQVESFTSKPSALPKFSQFLGDPVEKAAQLRPISLPGVSSTEDLQDLFRKTGQDVDGKLTYQEIWTSLGSAMPEPESLRAFDSDGDGRYSFLELRVALGI

SEQ ID NO: 11141 - protein, 1980 aa, Homo sapiens
MAARLLAPPGPDSFKPFTPESLANIERRIAESKLKKPPKADGSHREDDEDSKPKPNSDLEAGKSLPFIYGDIPQGLVAVPLEDFDPYYLTQKTFVVLNRGKTLFRFSATPALYILSPFNLIRRIAIKILIHSVFSMIIMCTILTNCVFMTFSNPPDWSKNVEYTFTGIYTFESLVKIIARGFCIDGFTFLRDPWNWLDFSVIMMAYITEFVNLGNVSALRTFRVLRALKTISVIPGLKTIVGALIQSVKKLSDVMILTVFCLSVFALIGLQLFMGNLRNKCVVWPINFNESYLENGTKGFDWEEYINNKTNFYTVPGMLEPLLCGNSSDAGQCPEGYQCMKAGRNPNYGYTSFDTFSWAFLALFRLMTQDYWENLYQLTLRAAGKTYMIFFVLVIFVGSFYLVNLILAVVAMAYEEQNQATLEEAEQKEAEFKAMLEQLKKQQEEAQAAAMATSAGTVSEDAIEEEGEEGGGSPRSSSEISKLSSKSAKERRNRRKKRKQKELSEGEEKGDPEKVFKSESEDGMRRKAFRLPDNRIGRKFSIMNQSLLSIPGSPFLSRHNSKSSIFSFRGPGRFRDPGSENEFADDEHSTVEESEGRRDSLFIPIRARERRSSYSGYSGYSQGSRSSRIFPSLRRSVKRNSTVDCNGVVSLIGGPGSHIGGRLLPEATTEVEIKKKGPGSLLVSMDQLASYGRKDRINSIMSVVTNTLVEELEESQRKCPPCWYKFANTFLIWECHPYWIKLKEIVNLIVMDPFVDLAITICIVLNTLFMAMEHHPMTPQFEHVLAVGNLVFTGIFTAEMFLKLIAMDPYYYFQEGWNIFDGFIVSLSLMELSLADVEGLSVLRSFRLLRVFKLAKSWPTLNMLIKIIGNSVGALGNLTLVLAIIVFIFAVVGMQLFGKSYKECVCKINQDCELPRWHMHDFFHSFLIVFRVLCGEWIETMWDCMEVAGQAMCLIVFMMVMVIGNLVVLNLFLALLLSSFSADNLAATDDDGEMNNLQISVIRIKKGVAWTKLKVHAFMQAHFKQREADEVKPLDELYEKKANCIANHTGADIHRNGDFQKNGNGTTSGIGSSVEKYIIDEDHMSFINNPNLTVRVPIAVGESDFENLNTEDVSSESDPEGSKDKLDDTSSSEGSTIDIKPEVEEVPVEQPEEYLDPDACFTEGCVQRFKCCQVNIEEGLGKSWWILRKTCFLIVEHNWFETFIIFMILLSSGALAFEDIYIEQRKTIRTILEYADKVFTYIFILEMLLKWTAYGFVKFFTNAWCWLDFLIVAVSLVSLIANALGYSELGAIKSLRTLRALRPLRALSRFEGMRVVVNALVGAIPSIMNVLLVCLIFWLIFSIMGVNLFAGKYHYCFNETSEIRFEIEDVNNKTECEKLMEGNNTEIRWKNVKINFDNVGAGYLALLQVATFKGWMDIMYAAVDSRKPDEQPKYEDNIYMYIYFVIFIIFGSFFTLNLFIGVIIDNFNQQKKKFGGQDIFMTEEQKKYYNAMKKLGSKKPQKPIPRPLNKIQGIVFDFVTQQAFDIVIMMLICLNMVTMMVETDTQSKQMENILYWINLVFVIFFTCECVLKMFALRHYYFTIGWNIFDFVVVILSIVGMFLADIIEKYFVSPTLFRVIRLARIGRILRLIKGAKGIRTLLFALMMSLPALFNIGLLLFLVMFIFSIFGMSNFAYVKHEAGIDDMFNFETFGNSMICLFQITTSAGWDGLLLPILNRPPDCSLDKEHPGSGFKGDCGNPSVGIFFFVSYIIISFLIVVNMYIAIILENFSVATEESADPLSEDDFETFYEIWEKFDPDATQFIEYCKLADFADALEHPLRVPKPNTIELIAMDLPMVSGDRIHCLDILFAFTKRVLGDSGELDILRQQMEERFVASNPSKVSYEPITTTLRRKQEEVSAVVLQRAYRGHLARRGFICKKTTSNKLENGGTHREKKESTPSTASLPSYDSVTKPEKEKQQRAEEGRRERAKRQKEVRESKC

SEQ ID NO: 11142 - protein, 1282 aa, Homo sapiens
MAARLLAPPGPDSFKPFTPESLANIERRIAESKLKKPPKADGSHREDDEDSKPKPNSDLEAGKSLPFIYGDIPQGLVAVPLEDFDPYYLTQKTFVVLNRGKTLFRFSATPALYILSPFNLIRRIAIKILIHSVFSMIIMCTILTNCVFMTFSNPPDWSKNVEYTFTGIYTFESLVKIIARGFCIDGFTFLRDPWNWLDFSVIMMAYITEFVNLGNVSALRTFRVLRALKTISVIPGLKTIVGALIQSVKKLSDVMILTVFCLSVFALIGLQLFMGNLRNKCVVWPINFNESYLENGTKGFDWEEYINNKTNFYTVPGMLEPLLCGNSSDAGQCPEGYQCMKAGRNPNYGYTSFDTFSWAFLALFRLMTQDYWENLYQLTLRAAGKTYMIFFVLVIFVGSFYLVNLILAVVAMAYEEQNQATLEEAEQKEAEFKAMLEQLKKQQEEAQAAAMATSAGTVSEDAIEEEGEEGGGSPRSSSEISKLSSKSAKERRNRRKKRKQKELSEGEEKGDPEKVFKSESEDGMRRKAFRLPDNRIGRKFSIMNQSLLSIPGSPFLSRHNSKSSIFSFRGPGRFRDPGSENEFADDEHSTVEESEGRRDSLFIPIRARERRSSYSGYSGYSQGSRSSRIFPSLRRSVKRNSTVDCNGVVSLIGGPGSHIGGRLLPEATTEVEIKKKGPGSLLVSMDQLASYGRKDRINSIMSVVTNTLVEELEESQRKCPPCWYKFANTFLIWECHPYWIKLKEIVNLIVMDPFVDLAITICIVLNTLFMAMEHHPMTPQFEHVLAVGNLVFTGIFTAEMFLKLIAMDPYYYFQEGWNIFDGFIVSLSLMELSLADVEGLSVLRSFRLLRVFKLAKSWPTLNMLIKIIGNSVGALGNLTLVLAIIVFIFAVVGMQLFGKSYKECVCKINQDCELPRWHMHDFFHSFLIVFRVLCGEWIETMWDCMEVAGQAMCLIVFMMVMVIGNLVVLNLFLALLLSSFSADNLAATDDDGEMNNLQISVIRIKKGVAWTKLKVHAFMQAHFKQREADEVKPLDELYEKKANCIANHTGADIHRNGDFQKNGNGTTSGIGSSVEKYIIDEDHMSFINNPNLTVRVPIAVGESDFENLNTEDVSSESDPEGSKDKLDDTSSSEGSTIDIKPEVEEVPVEQPEEYLDPDACFTEGCVQRFKCCQVNIEEGLGKSWWILRKTCFLIVEHNWFETFIIFMILLSSGALAFEDIYIEQRKTIRTILEYADKVFTYIFILEMLLKWTAYGFVKFFTNAWCWLDFLIVAVPLNLSGLI

SEQ ID NO: 11143 - protein, 1991 aa, Homo sapiens
MAARLLAPPGPDSFKPFTPESLANIERRIAESKLKKPPKADGSHREDDEDSKPKPNSDLEAGKSLPFIYGDIPQGLVAVPLEDFDPYYLTQKTFVVLNRGKTLFRFSATPALYILSPFNLIRRIAIKILIHSVFSMIIMCTILTNCVFMTFSNPPDWSKNVEYTFTGIYTFESLVKIIARGFCIDGFTFLRDPWNWLDFSVIMMAYITEFVNLGNVSALRTFRVLRALKTISVIPGLKTIVGALIQSVKKLSDVMILTVFCLSVFALIGLQLFMGNLRNKCVVWPINFNESYLENGTKGFDWEEYINNKTNFYTVPGMLEPLLCGNSSDAGQCPEGYQCMKAGRNPNYGYTSFDTFSWAFLALFRLMTQDYWENLYQLTLRAAGKTYMIFFVLVIFVGSFYLVNLILAVVAMAYEEQNQATLEEAEQKEAEFKAMLEQLKKQQEEAQAAAMATSAGTVSEDAIEEEGEEGGGSPRSSSEISKLSSKSAKERRNRRKKRKQKELSEGEEKGDPEKVFKSESEDGMRRKAFRLPDNRIGRKFSIMNQSLLSIPGSPFLSRHNSKSSIFSFRGPGRFRDPGSENEFADDEHSTVEESEGRRDSLFIPIRARERRSSYSGYSGYSQGSRSSRIFPSLRRSVKRNSTVDCNGVVSLIGGPGSHIGGRLLPEVKIDKAATDDSATTEVEIKKKGPGSLLVSMDQLASYGRKDRINSIMSVVTNTLVEELEESQRKCPPCWYKFANTFLIWECHPYWIKLKEIVNLIVMDPFVDLAITICIVLNTLFMAMEHHPMTPQFEHVLAVGNLVFTGIFTAEMFLKLIAMDPYYYFQEGWNIFDGFIVSLSLMELSLADVEGLSVLRSFRLLRVFKLAKSWPTLNMLIKIIGNSVGALGNLTLVLAIIVFIFAVVGMQLFGKSYKECVCKINQDCELPRWHMHDFFHSFLIVFRVLCGEWIETMWDCMEVAGQAMCLIVFMMVMVIGNLVVLNLFLALLLSSFSADNLAATDDDGEMNNLQISVIRIKKGVAWTKLKVHAFMQAHFKQREADEVKPLDELYEKKANCIANHTGADIHRNGDFQKNGNGTTSGIGSSVEKYIIDEDHMSFINNPNLTVRVPIAVGESDFENLNTEDVSSESDPEGSKDKLDDTSSSEGSTIDIKPEVEEVPVEQPEEYLDPDACFTEGCVQRFKCCQVNIEEGLGKSWWILRKTCFLIVEHNWFETFIIFMILLSSGALAFEDIYIEQRKTIRTILEYADKVFTYIFILEMLLKWTAYGFVKFFTNAWCWLDFLIVAVSLVSLIANALGYSELGAIKSLRTLRALRPLRALSRFEGMRVVVNALVGAIPSIMNVLLVCLIFWLIFSIMGVNLFAGKYHYCFNETSEIRFEIEDVNNKTECEKLMEGNNTEIRWKNVKINFDNVGAGYLALLQVATFKGWMDIMYAAVDSRKPDEQPKYEDNIYMYIYFVIFIIFGSFFTLNLFIGVIIDNFNQQKKKFGGQDIFMTEEQKKYYNAMKKLGSKKPQKPIPRPLNKIQGIVFDFVTQQAFDIVIMMLICLNMVTMMVETDTQSKQMENILYWINLVFVIFFTCECVLKMFALRHYYFTIGWNIFDFVVVILSIVGMFLADIIEKYFVSPTLFRVIRLARIGRILRLIKGAKGIRTLLFALMMSLPALFNIGLLLFLVMFIFSIFGMSNFAYVKHEAGIDDMFNFETFGNSMICLFQITTSAGWDGLLLPILNRPPDCSLDKEHPGSGFKGDCGNPSVGIFFFVSYIIISFLIVVNMYIAIILENFSVATEESADPLSEDDFETFYEIWEKFDPDATQFIEYCKLADFADALEHPLRVPKPNTIELIAMDLPMVSGDRIHCLDILFAFTKRVLGDSGELDILRQQMEERFVASNPSKVSYEPITTTLRRKQEEVSAVVLQRAYRGHLARRGFICKKTTSNKLENGGTHREKKESTPSTASLPSYDSVTKPEKEKQQRAEEGRRERAKRQKEVRESKC

SEQ ID NO: 11144 - protein, 1980 aa, Homo sapiens
MAARLLAPPGPDSFKPFTPESLANIERRIAESKLKKPPKADGSHREDDEDSKPKPNSDLEAGKSLPFIYGDIPQGLVAVPLEDFDPYYLTQKTFVVLNRGKTLFRFSATPALYILSPFNLIRRIAIKILIHSVFSMIIMCTILTNCVFMTFSNPPDWSKNVEYTFTGIYTFESLVKIIARGFCIDGFTFLRDPWNWLDFSVIMMAYVTEFVDLGNVSALRTFRVLRALKTISVIPGLKTIVGALIQSVKKLSDVMILTVFCLSVFALIGLQLFMGNLRNKCVVWPINFNESYLENGTKGFDWEEYINNKTNFYTVPGMLEPLLCGNSSDAGQCPEGYQCMKAGRNPNYGYTSFDTFSWAFLALFRLMTQDYWENLYQLTLRAAGKTYMIFFVLVIFVGSFYLVNLILAVVAMAYEEQNQATLEEAEQKEAEFKAMLEQLKKQQEEAQAAAMATSAGTVSEDAIEEEGEEGGGSPRSSSEISKLSSKSAKERRNRRKKRKQKELSEGEEKGDPEKVFKSESEDGMRRKAFRLPDNRIGRKFSIMNQSLLSIPGSPFLSRHNSKSSIFSFRGPGRFRDPGSENEFADDEHSTVEESEGRRDSLFIPIRARERRSSYSGYSGYSQGSRSSRIFPSLRRSVKRNSTVDCNGVVSLIGGPGSHIGGRLLPEATTEVEIKKKGPGSLLVSMDQLASYGRKDRINSIMSVVTNTLVEELEESQRKCPPCWYKFANTFLIWECHPYWIKLKEIVNLIVMDPFVDLAITICIVLNTLFMAMEHHPMTPQFEHVLAVGNLVFTGIFTAEMFLKLIAMDPYYYFQEGWNIFDGFIVSLSLMELSLADVEGLSVLRSFRLLRVFKLAKSWPTLNMLIKIIGNSVGALGNLTLVLAIIVFIFAVVGMQLFGKSYKECVCKINQDCELPRWHMHDFFHSFLIVFRVLCGEWIETMWDCMEVAGQAMCLIVFMMVMVIGNLVVLNLFLALLLSSFSADNLAATDDDGEMNNLQISVIRIKKGVAWTKLKVHAFMQAHFKQREADEVKPLDELYEKKANCIANHTGADIHRNGDFQKNGNGTTSGIGSSVEKYIIDEDHMSFINNPNLTVRVPIAVGESDFENLNTEDVSSESDPEGSKDKLDDTSSSEGSTIDIKPEVEEVPVEQPEEYLDPDACFTEGCVQRFKCCQVNIEEGLGKSWWILRKTCFLIVEHNWFETFIIFMILLSSGALAFEDIYIEQRKTIRTILEYADKVFTYIFILEMLLKWTAYGFVKFFTNAWCWLDFLIVAVSLVSLIANALGYSELGAIKSLRTLRALRPLRALSRFEGMRVVVNALVGAIPSIMNVLLVCLIFWLIFSIMGVNLFAGKYHYCFNETSEIRFEIEDVNNKTECEKLMEGNNTEIRWKNVKINFDNVGAGYLALLQVATFKGWMDIMYAAVDSRKPDEQPKYEDNIYMYIYFVIFIIFGSFFTLNLFIGVIIDNFNQQKKKFGGQDIFMTEEQKKYYNAMKKLGSKKPQKPIPRPLNKIQGIVFDFVTQQAFDIVIMMLICLNMVTMMVETDTQSKQMENILYWINLVFVIFFTCECVLKMFALRHYYFTIGWNIFDFVVVILSIVGMFLADIIEKYFVSPTLFRVIRLARIGRILRLIKGAKGIRTLLFALMMSLPALFNIGLLLFLVMFIFSIFGMSNFAYVKHEAGIDDMFNFETFGNSMICLFQITTSAGWDGLLLPILNRPPDCSLDKEHPGSGFKGDCGNPSVGIFFFVSYIIISFLIVVNMYIAIILENFSVATEESADPLSEDDFETFYEIWEKFDPDATQFIEYCKLADFADALEHPLRVPKPNTIELIAMDLPMVSGDRIHCLDILFAFTKRVLGDSGELDILRQQMEERFVASNPSKVSYEPITTTLRRKQEEVSAVVLQRAYRGHLARRGFICKKTTSNKLENGGTHREKKESTPSTASLPSYDSVTKPEKEKQQRAEEGRRERAKRQKEVRESKC

SEQ ID NO: 11145 - protein, 430 aa, Homo sapiens
MSLNNSSNVFLDSVPSNTNRFQVSVINENHESSAAADDNTDPPHYEETSFGDEAQKRLRISFRPGNQECYDNFLQSGETAKTDASFHAYDSHTNTYYLQTFGHNTMDAVPKIEYYRNTGSISGPKVNRPSLLEIHEQLAKNVAVTPSSADRVANGDGIPGDEQAENKEDDQAGVVKFGWVKGVLVRCMLNIWGVMLFIRLSWIVGEAGIGLGVLIILLSTMVTSITGLSTSAIATNGFVRGGGAYYLISRSLGPEFGGSIGLIFAFANAVAVAMYVVGFAETVVDLLKESDSMMVDPTNDIRIIGSITVVILLGISVAGMEWEAKAQVILLVILLIAIANFFIGTVIPSNNEKKSRGFFNYQASIFAENFGPRFTKGEGFFSVFAIFFPAATGILAGANISGDLEALRKQGASPLPQGAQSRRRRQTSLI

SEQ ID NO: 11146 - protein, 513 aa, Homo sapiens
MAPARTMARARLAPAGIPAVALWLLCTLGLQGTQAGPPPAPPGLPAGADCLNSFTAGVPGFVLDTNASVSNGATFLESPTVRRGWDCVRACCTTQNCNLALVELQPDRGEDAIAACFLINCLYEQNFVCKFAPREGFINYLTREVYRSYRQLRTQGFGGSGIPKAWAGIDLKVQPQEPLVLKDVENTDWRLLRGDTDVRVERKDPNQVELWGLKEGTYLFQLTVTSSDHPEDTANVTVTVLSTKQTEDYCLASNKVGRCRGSFPRWYYDPTEQICKSFVYGGCLGNKNNYLREEECILACRGVQGPSMERRHPVCSGTCQPTQFRCSNGCCIDSFLECDDTPNCPDASDEAACEKYTSGFDELQRIHFPSDKGHCVDLPDTGLCKESIPRWYYNPFSEHCARFTYGGCYGNKNNFEEEQQCLESCRGISKKDVFGLRREIPIPSTGSVEMAVAVFLVICIVVVVAILGYCFFKNQRKDFHGHHHHPPPTPASSTVSTTEDTEHLVYNHTTRPL

SEQ ID NO: 11147 - protein, 529 aa, Homo sapiens [sequence omitted]

SEQ ID NO: 11148 - protein, 116 aa, Homo sapiens
MDYYRKYAAIFLVTLSVFLHVLHSAPDVQDCPECTLQENPFFSQPGAPILQCMGCCFSRAYPTPLRSKKTMLVQKNVTSESTCCVAKSYNRVTVMGGFKVENHTACHCSTCYYHKS

SEQ ID NO: 11149 - protein, 315 aa, Homo sapiens
MDLRQFLMCLSLCTAFALSKPTEKKDRVHHEPQLSDKVHNDAQSFDYDHDAFLGAEEAKTFDQLTPEESKERLGKIVSKIDGDKDGFVTVDELKDWIKFAQKRWIYEDVERQWKGHDLNEDGLVSWEEYKNATYGYVLDDPDPDDGFNYKQMMVRDERRFKMADKDGDLIATKEEFTAFLHPEEYDYMKDIVVQETMEDIDKNADGFIDLEEYIGDMYSHDGNTDEPEWVKTEREQFVEFRDKNRDGKMDKEETKDWILPSDYDHAEAEARHLVYESDQNKDGKLTKEEIVDKYDLFVGSQATDFGEALVRHDEF

SEQ ID NO: 11150 - protein, 1101 aa, Homo sapiens [sequence omitted]

SEQ ID NO: 11151 - protein, 1091 aa, Homo sapiens
MSAKAISEQTGKELLYKFICTTSAIQNRFKYARVTPDTDWARLLQDHPWLLSQNLVVKPDQLIKRRGKLGLVGVNLTLDGVKSWLKPRLGQEATVGKATGFLKNFLIEPFVPHSQAEEFYVCIYATREGDYVLFHHEGGVDVGDVDAKAQKLLVGVDEKLNPEDIKKHLLVHAPEDKKEILASFISGLFNFYEDLYFTYLEINPLVVTKDGVYVLDLAAKVDATADYICKVKWGDIEFPPPFGREAYPEEAYIADLDAKSGASLKLTLLNPKGRIWTMVAGGGASVVYSDTICDLGGVNELANYGEYSGAPSEQQTYDYAKTILSLMTREKHPDGKILIIGGSIANFTNVAATFKGIVRAIRDYQGPLKEHEVTIFVRRGGPNYQEGLRVMGEVGKTTGIPIHVFGTETHMTAIVGMALGHRPIPNQPPTAAHTANFLLNASGSTSTPAPSRTASFSESRADEVAPAKKAKPAMPQGKSTTLFSRHTKAIVWGMQTRAVQGMLDFDYVCSRDEPSVAAMVYPFTGDHKQKFYWGHKEILIPVFKNMADAMRKHPEVDVLINFASLRSAYDSTMETMNYAQIRTIAIIAEGIPEALTRKLIKKADQKGVTIIGPATVGGIKPGCFKIGNTGGMLDNILASKLYRPGSVAYVSRSGGMSNELNNIISRTTDGVYEGVAIGGDRYPGSTFMDHVLRYQDTPGVKMIVVLGEIGGTEEYKICRGIKEGRLTKPIVCWCIGTCATMFSSEVQFGHAGACANQASETAVAKNQALKEAGVFVPRSFDELGEIIQSVYEDLVANGVIVPAQEVPPPTVPMDYSWARELGLIRKPASFMTSICDERGQELIYAGMPITEVFKEEMGIGGVLGLLWFQKRLPKYSCQFIEMCLMVTADHGPAVSGAHNTIICARAGKDLVSSLTSGLLTIGDRFGGALDAAAKMFSKAFDSGIIPMEFVNKMKKEGKLIMGIGHRVKSINNPDMRVQILKDYVRQHFPATPLLDYALEVEKITTSKKPNLILNVDGLIGVAFVDMLRNCGSFTREEADEYIDIGALNGIFVLGRSMGFIGHYLDQKRLKQGLYRHPWDDISYVLPEHMSM

SEQ ID NO: 11152 - protein, 624 aa, Homo sapiens
MAENGESSGPPRPSRGPAAAQGSAAAPAEPKIIKVTVKTPKEKEEFAVPENSSVQQFKEAISKRFKSQTDQLVLIFAGKILKDQDTLIQHGIHDGLTVHLVIKSQNRPQGQSTQPSNAAGTNTTSASTPRSNSTPISTNSNPFGLGSLGGLAGLSSLGLSSTNFSELQSQMQQQLMASPEMMIQIMENPFVQSMLSNPDLMRQLIMANPQMQQLIQRNPEISHLLNNPDIMRQTLEIARNPAMMQEMMRNQDLALSNLESIPGGYNALRRMYTDIQEPMLNAAQEQFGGNPFASVGSSSSSGEGTQPSRTENRDPLPNPWAPPPATQSSATTSTTTSTGSGSGNSSSNATGNTVAAANYVASIFSTPGMQSLLQQITENPQLIQNMLSAPYMRSMMQSLSQNPDLAAQMMLNSPLFTANPQLQEQMRPQLPAFLQQMQNPDTLSAMSNPRAMQALMQIQQGLQTLATEAPGLIPSFTPGVGVGVLGTAIGPVGPVTPIGPIGPIVPFTPIGPIGPIGPTGPAAPPGSTGSGGPTGPTVSSAAPSETTSPTSESGPNQQFIQQMVQALAGANAPQLPNPEVRFQQQLEQLNAMGFLNREANLQALIATGGDINAAIERLLGSQPS

SEQ ID NO: 11153 - protein, 184 aa, Homo sapiens
MNVISYCSGVGCLHSPVLSATVNPTVFFDIAVDGEPLGHVSFELFADKFPKSAEKVHALSTGEKGFGYKGSCFHRIIPGFMCQGGDFTRHKDTGGKSLYREKFDDENFILKHTGPGILSMANAGPNTNCSQCFICTAKTEGLDGKHVVFGTVKEGMKIVEAMEYFGPRNGKTSKEITIADCEQL

SEQ ID NO: 11154 - protein, 409 aa, Homo sapiens
MGCSAKARWAAGALGVAGLLCAVLGAVMIVMVPSLIKQQVLKGAAVMMENKPMTLKLIMTLAFTTLGERAFMNRTVGEIMWGYKDPLVNLINKYFPGMFPFKDKFGLFAELNNSDSGLFTVFTGVQNISRIHLVDKWNGLSKVDFWHSDQCNMINGTSGQMWPPFMTPESSLEFYSPEACRSMKLMYKESGVFEGIPTYRFVAPKTLFANGSIYPPNEGFCPCLESGIQNVSTCRFSAPLFLSHPHFLNADPVLAEAVTGLHPNQEAHSLFLDIHPVTGIPMNCSVKLQLSLYMKSVAGIGQTGKIEPVVLPLLWFAESGAMEGETLHTFYTQLVLMPKVMHYAQYVLLALGCVLLLVPVICQIRSQEKCYLFWSSSKKGSKDKEAIQAYSESLMTSAPKGSVLQEAKL

SEQ ID NO: 11155 - protein, 487 aa, Homo sapiens [sequence omitted]

SEQ ID NO: 11156 - protein, 527 aa, Homo sapiens
MMHFKSGLELTELQNMTVPEDDNISNDSNDFTEVENGQINSKFISDRESRRSLTNSHLEKKKCDEYIPGTTSLGMSVFNLSNAIMGSGILGLAFALANTGILLFLVLLTSVTLLSIYSINLLLICSKETGCMVYEKLGEQVFGTTGKFVIFGATSLQNTGAMLSYLFIVKNELPSAIKFLMGKEETFSAWYVDGRVLVVIVTFGIILPLCLLKNLGYLGYTSGFSLSCMVFFLIVVIYKKFQIPCIVPELNSTISANSTNADTCTPKYVTFNSKTVYALPTIAFAFVCHPSVLPIYSELKDRSQKKMQMVSNISFFAMFVMYFLTAIFGYLTFYDNVQSDLLHKYQSKDDILILTVRLAVIVAVILTVPVLFFTDRSSLFELAKKTKFNLCRHTVVTCILLVVINLLVIFIPSMKDIFGVVGVTSANMLIFILPSSLYLKITTRMEIKELKEFGLPFSWAWGCCSPWSAFPWSSMTGPAHRVMVKATETRREKETSLLSAQSSPHTSAISHHFFCKFTEANRNVQDT

SEQ ID NO: 11157 - protein, 270 aa, Homo sapiens
MATGTRYAGKVVVVTGGGRGIGAGIVRAFVNSGARVVICDKDESGGRALEQELPGAVFILCDVTQEDDVKTLVSETIRRFGRLDCVVNNAGHHPPPQRPEETSAQGFRQLLELNLLGTYTLTKLALPYLRKSQGNVINISSLVGAIGQAQAVPYVATKGAVTAMTKALALDESPYGVRVNCISPGNIWTPLWEELAALMPDPRATIREGMLAQPLGRMGQPAEVGAAAVFLASEANFCTGIELLVTGGAELGYGCKASRSTPVDAPDIPS

SEQ ID NO: 11158 - protein, 406 aa, Homo sapiens
MIHTNLKKKFSCCVLVFLLFAVICVWKEKKKGSYYDSFKLQTKEFQVLKSLGKLAMGSDSQSVSSSSTQDPHRGRQTLGSLRGLAKAKPEASFQVWNKDSSSKNLIPRLQKIWKNYLSMNKYKVSYKGPGPGIKFSAEALRCHLRDHVNVSMVEVTDFPFNTSEWEGYLPKESIRTKAGPWGRCAVVSSAGSLKSSQLGREIDDHDAVLRFNGAPTANFQQDVGTKTTIRLMNSQLVTTEKRFLKDSLYNEGILIVWDPSVYHSDIPKWYQNPDYNFFNNYKTYRKLHPNQPFYILKPQMPWELWDILQEISPEEIQPNPPSSGMLGIIIMMTLCDQVDIYEFLPSKRKTDVCYYYQKFFDSACTMGAYHPLLYEKNLVKHLNQGTDEDIYLLGKATLPGFRTIHC

SEQ ID NO: 11159 - protein, 1257 aa, Homo sapiens [sequence omitted]

SEQ ID NO: 11160 - protein, 1276 aa, Homo sapiens [sequence omitted]

SEQ ID NO: 11161 - protein, 802 aa, Homo sapiens
MPRIMIKGGVWRNTEDEILKAAVMKYGKNQWSRIASLLHRKSAKQCKARWYEWLDPSIKKTEWSREEEEKLLHLAKLMPTQWRTIAPIIGRTAAQCLEHYEFLLDKAAQRDNEEETTDDPRKLKPGEIDPNPETKPARPDPIDMDEDELEMLSEARARLANTQGKKAKRKAREKQLEEARRLAALQKRRELRAAGIEIQKKRKRKRGVDYNAEIPFEKKPALGFYDTSEENYQALDADFRKLRQQDLDGELRSEKEGRDRKKDKQHLKRKKESDLPSAILQTSGVSEFTKKRSKLVLPAPQISDAELQEVVKVGQASEIARQTAEESGITNSASSTLLSEYNVTNNSVALRTPRTPASQDRILQEAQNLMALTNVDTPLKGGLNTPLHESDFSGVTPQRQVVQTPNTVLSTPFRTPSNGAEGLTPRSGTTPKPVINSTPGRTPLRDKLNINPEDGMADYSDPSYVKQMERESREHLRLGLLGLPAPKNDFEIVLPENAEKELEEREIDDTYIEDAADVDARKQAIRDAERVKEMKRMHKAVQKDLPRPSEVNETILRPLNVEPPLTDLQKSEELIKKEMITMLHYDLLHHPYEPSGNKKGKTVGFGTNNSEHITYLEHNPYEKFSKEELKKAQDVLVQEMEVVKQGMSHGELSSEAYNQVWEECYSQVLYLPGQSRYTRANLASKKDRIESLEKRLEINRGHMTTEAKRAAKMEKKMKILLGGYQSRAMGLMKQLNDLWDQIEQAHLELRTFEELKKHEDSAIPRRLECLKEDVQRQQEREKELQHRYADLLLEKETLKSKF

SEQ ID NO: 11162 - protein, 780 aa, Homo sapiens
MSKRGMSSRAKGDKAEALAALQAANEDLRAKLTDIQIELQQEKSKVSKVEREKNQELRQVREHEQHKTAVLLTELKTKLHEEKMKELQAVRETLLRQHEAELLRVIKIKDNENQRLQALLSALRDGGPEKVKTVLLSEAKEEAKKGFEVEKVKMQQEISELKGAKRQVEEALTLVIQADKIKAAEIRSVYHLHQEEITRIMEEIKFKDRAVFVLERELGVQAGHAQRLQLQKEALDEQLSQVREADRHPGSPRRELPHAAGAGDASDHSGSPLDEKDARRFQLKIAELSAIIRKLEDRNALLSEERNELLKRVREAESQYKPLLDKNKRLSRKNEDLSHALRRMENKLKFVTQENIEMRAGIIRRPSSLNDLDQSQDEREVDFLKLQIVEQQNLIDELSKPVVVETFFGYDEEASLESDGSSVSYQTDRTDQTPCTPDDDLEEGMAKEETELRFRQLTMEYQALQRAYALLQEQVGGTLDAEREVKTREQLQAEVQRAQARIEDLEKALAEQGQDMKWIEEKQALYRRNQELVEKIKQMETEEARLRHEVQDARDQNELLEFRILELEERERKSPAISFHHTPFVDGKSPLQVYCEAEGVTDIVVAELMKKLDILGDNANLTNEEQVVVIQARTVLTLAEKWLQQIEETEAALQRKMVDLESEKELFSKQKGYLDEELDYRKQALDQANKHILELEAMLYDALQQEAGAKVAELLSEEEREKLKVAVEQWKRQVMSELRERDAQILRERMELLQLAQQRIKELEERIEAQKRQIKELEEK

SEQ ID NO: 11163 - protein, 981 aa, Homo sapiens
MSKRGMSSRAKGDKAEALAALQAANEDLRAKLTDIQIELQQEKSKVSKVEREKNQELRQVREHEQHKTAVLLTELKTKLHEEKMKELQAVRETLLRQHEAELLRVIKIKDNENQRLQALLSALRDGGPEKVKTVLLSEAKEEAKKGFEVEKVKMQQEISELKGAKRQVEEALTLVIQADKIKAAEIRSVYHLHQEEITRIKKECEREIRRLMEEIKFKDRAVFVLERELGVQAGHAQRLQLQKEALDEQLSQVREADRHPGSPRRELPHAAGAGDASDHSGSPHQLWPCHPPVGPGLITLLLQFMALAGPESGPGLEQQLDEKDARRFQLKIAELSAIIRKLEDRNALLSEERNELLKRVREAESQYKPLLDKNKRLSRKNEDLSHALRRMENKLKFVTQENIEMRQRAGIIRRPSSLNDLDQSQDEREVDFLKLQIVEQQNLIDELSKTLETAGYVKSVLERDKLLRFRKQRKKMAKLPKPVVVETFFGYDEEASLESDGSSVSYQTDRTDQTPCTPDDDLEEVTRVSCRVLGLEEVTRVSCRVLGLEEGMAKEETELRFRQLTMEYQALQRAYALLQEQVGGTLDAEREVKVYVTSTALLVVPMEADQNQGLGIPVLGVGPAWRWPVAASSSVLKLVETREQLQAEVQRAQARIEDLEKALAEQGQDMKWIEEKQALYRRNQELVEKIKQMETEEARLRHEVQDARDQNELLEFRILELEERERKSPAISFHHTPFVDGKSPLQVYCEAEGVTDIVVAELMKKLDILGDNANLTNEEQVVVIQARTVLTLAEKWLQQIEETEAALQRKMVDLESEKELFSKQKGYLDEELDYRKQALDQANKHILELEAMLYDALQQEAGAKVAELLSEEEREKLKVAVEQWKRQVMSELRERDAQILRERMELLQLAQQNTTSEGLVEIHINKCAVCQLAVGIEQCSKGLCPRQEPRAMAMPAALRRSVTKEMNENLEGFGFPEYCDY

SEQ ID NO: 11164 - protein, 1210 aa, Homo sapiens
MTSAAEIKKPPVAPKPKFVVANNKPAPPPIAPKPDIVISSVPQSTKKMKPAIAPKPKVLKTSPVREIGQSPSRKIMLNLEGHKQELAESTDNFNCKYEGNQSNDYISPMCSCSSECIHKLGHRENLCVKQLVLEPLEMNENLENSKIDETLTIKTRSKCDLYGEKAKNQGGVVLKASVLEEELKDALIHQMPPFISAQKHRPTDSPEMNGGCNSNGQFRIEFADLSPSPSSFEKVPDHHSCHLQLPSDECEHFETCQDDSEKSNNCFQSSELEALENGKRSTLISSDGVSKKSEVKDLGPLEIHLVPYTPKFPTPKPRKTRTARLLRQKCVDTPSESTEEPGNSDSSSSCLTENSLKINKISVLHQNVLCKQEQVDKMKLGNKSELNMESNSDAQDLVNSQKAMCNETTSFEKMAPSFDKDSNLSSDSTTVDGSSMSLAVDEGTGFIRCTVSMSLPKQLKLTCNEHLQSGRNLGVSAPQMQKESVIKEENSLRIVPKKPQRHSLPATGVLKKAASEELLEKSSYPSSEEKSSEKSLERNHLQHLCAQNRGVSSSFDMPKRASEKPVWKLPHPILPFSGNPEFLKSVTVSSNSEPSTALTKPRAKSLSAMDVEKCTKPCKDSTKKNSFKKLLSMKLSICFMKSDFQKFWSKSSQLGDTTTGHLSSGEQKGIESDWQGLLVGEEKRSKPIKAYSTENYSLESQKKRKKSRGQTSAANGLRAESLDDQMLSRESSSQAPYKSVTSLCAPEYENIRHYEEIPEYENLPFIMAIRKTQELEWQNSSSMEDADANVYEVEEPYEAPDGQLQLGPRHQHSSSGASQEEQNDLGLGDLPPDEEEIINSSDEDDVSFESSKGEPDPLEDKQDEDNGMKSKVHHIAKEIMSSEKVFVDVLKLLHIDFRDAVAHASRQLGKPVIEDRILNQILYYLPQLYELNRDLLKELEERMLHWTEQQRIADIFVKKGPYLKMYSTYIKEFDKNIALLDEQCKKNPGFAAVVREFEMSPRCANLALKHYLLKPVQRIPQYRLLLTDYLKNLIEDAGDYRDTQDALAVVIEVANHANDTMKQGDNFQKLMQIQYSLNGHHEIVQPGRVFLKEGILMKLSRKVMQPRMFFLFNDVLLYTTPVQSGMYKLNNMLSLAGMKVRKPTQEAYQNELKIESVERSFILSASSATERDEWLEAISRAIEEYAKKRITFCPSRSLDEADSENKKKKK

SEQ ID NO: 11165 - protein, 248 aa, Homo sapiens
MTPRESAPGRGRAAPPRPTPLGVGTSRESPAEARRSSARRGGRSEPGRAAGGGAAEDTRRRAGDMDRGEQGLLRTDPVPEEGEDVAATISATETLSEEEQEELRRELAKVEEEIQTLSQVLAAKEKHLAEIKRKLGINSLQELKQNIAKGWQDVTATSAYKKTSETLSQAGQKASAAFSSVGSVITKKLEDVKNSPTFKSFEEKVENLKSKVGGTKPAGGDFGEVLNSAANASATTTEPLPEKTQESL

SEQ ID NO: 11166 - protein, 2185 aa, Homo sapiens
MFKKLKQKISEEQQQLQQALAPAQASSNSSTPTRMRSRTSSFTEQLDEGTPNRESGDTQSFAQKLQLRVPSVESLFRSPIKESLFRSSSKESLVRTSSRESLNRLDLDSSTASFDPPSDMDSEAEDLVGNSDSLNKEQLIQRLRRMERSLSSYRGKYSELVTAYQMLQREKKKLQGILSQSQDKSLRRIAELREELQMDQQAKKHLQEEFDASLEEKDQYISVLQTQVSLLKQRLRNGPMNVDVLKPLPQLEPQAEVFTKEENPESDGEPVVEDGTSVKTLETLQQRVKRQENLLKRCKETIQSHKEQCTLLTSEKEALQEQLDERLQELEKIKDLHMAEKTKLITQLRDAKNLIEQLEQDKGMVIAETKRQMHETLEMKEEEIAQLRSRIKQMTTQGEELREQKEKSERAAFEELEKALSTAQKTEEARRKLKAEMDEQIKTIEKTSEEERISLQQELSRVKQEVVDVMKKSSEEQIAKLQKLHEKELARKEQELTKKLQTREREFQEQMKVALEKSQSEYLKISQEKEQQESLALEELELQKKAILTESENKLRDLQQEAETYRTRILELESSLEKSLQENKNQSKDLAVHLEAEKNKHNKEITVMVEKHKTELESLKHQQDALWTEKLQVLKQQYQTEMEKLREKCEQEKETLLKDKEIIFQAHIEEMNEKTLEKLDVKQTELESLSSELSEVLKARHKLEEELSVLKDQTDKMKQELEAKMDEQKNHHQQQVDSIIKEHEVSIQRTEKALKDQINQLELLLKERDKHLKEHQAHVENLEADIKRSEGELQQASAKLDVFQSYQSATHEQTKAYEEQLAQLQQKLLDLETERILLTKQVAEVEAQKKDVCTELDAHKIQVQDLMQQLEKQNSEMEQKVKSLTQVYESKLEDGNKEQEQTKQILVEKENMILQMREGQKKEIEILTQKLSAKEDSIHILNEEYETKFKNQEKKMEKVKQKAKEMQETLKKKLLDQEAKLKKELENTALELSQKEKQFNAKMLEMAQANSAGISDAVSRLETNQKEQIESLTEVHRRELNDVISIWEKKLNQQAEELQEIHEIQLQEKEQEVAELKQKILLFGCEKEEMNKEITWLKEEGVKQDTTLNELQEQLKQKSAHVNSLAQDETKLKAHLEKLEVDLNKSLKENTFLQEQLVELKMLAEEDKRKVSELTSKLKTTDEEFQSLKSSHEKSNKSLEDKSLEFKKLSEELAIQLDICCKKTEALLEAKTNELINISSSKTNAILSRISHCQHRTTKVKEALLIKTCTVSELEAQLRQLTEEQNTLNISFQQATHQLEEKENQIKSMKADIESLVTEKEALQKEGGNQQQAASEKESCITQLKKELSENINAVTLMKEELKEKKVEISSLSKQLTDLNVQLQNSISLSEKEAAISSLRKQYDEEKCELLDQVQDLSFKVDTLSKEKISALEQVDDWSNKFSEWKKKAQSRFTQHQNTVKELQIQLELKSKEAYEKDEQINLLKEELDQQNKRFDCLKGEMEDDKSKMEKKESNLETELKSQTARIMELEDHITQKTIEIESLNEVLKNYNQQKDIEHKELVQKLQHFQELGEEKDNRVKEAEEKILTLENQVYSMKAELETKKKELEHVNLSVKSKEEELKALEDRLESESAAKLAELKRKAEQKIAAIKKQLLSQMEEKEEQYKKGTESHLSELNTKLQEREREVHILEEKLKSVESSQSETLIVPRSAKNVAAYTEQEEADSQGCVQKTYEEKISVLQRNLTEKEKLLQRVGQEKEETVSSHFEMRCQYQERLIKLEHAEAKQHEDQSMIGHLQEELEEKNKKYSLIVAQHVEKEGGKNNIQAKQNLENVFDDVQKTLQEKELTCQILEQKIKELDSCLVRQKEVHRVEMEELTSKYEKLQALQQMDGRNKPTELLEENTEEKSKSHLVQPKLLSNMEAQHNDLEFKLAGAEREKQKLGKEIVRLQKDLRMLRKEHQQELEILKKEYDQEREEKIKQEQEDLELKHNSTLKQLMREFNTQLAQKEQELEMTIKETINKAQEVEAELLESHQEETNQLLKKIAEKDDDLKRTAKRYEEILDAREEEMTAKVRDLQTQLEELQKKYQQKLEQEENPGNDNVTIMELQTQLAQKTTLISDSKLKEQEFREQIHNLEDRLKKYEKNVYATTVGHLTKVAICTIRMSHSLENLPNLSICEKCFLSI

SEQ ID NO: 11167 - protein, 2223 aa, Homo sapiens
MFKKLKQKISEEQQQLQQALAPAQASSNSSTPTRMRSRTSSFTEQLDEGTPNRESGDTQSFAQKLQLRVPSVESLFRSPIKESLFRSSSKESLVRTSSRESLNRLDLDSSTASFDPPSDMDSEAEDLVGNSDSLNKEQLIQRLRRMERSLSSYRGKYSELVTAYQMLQREKKKLQGILSQSQDKSLRRIAELREELQMDQQAKKHLQEEFDASLEEKDQYISVLQTQVSLLKQRLRNGPMNVDVLKPLPQLEPQAEVFTKEENPESDGEPVVEDGTSVKTLETLQQRVKRQENLLKRCKETIQSHKEQCTLLTSEKEALQEQLDERLQELEKIKDLHMAEKTKLITQLRDAKNLIEQLEQDKGMVIAETKRQMHETLEMKEEEIAQLRSRIKQMTTQGEELREQKEKSERAAFEELEKALSTAQKTEEARRKLKAEMDEQIKTIEKTSEEERISLQQELSRVKQEVVDVMKKSSEEQIAKLQKLHEKELARKEQELTKKLQTREREFQEQMKVALEKSQSEYLKISQEKEQQESLALEELELQKKAILTESENKLRDLQQEAETYRTRILELESSLEKSLQENKNQSKDLAVHLEAEKNKHNKEITVMVEKHKTELESLKHQQDALWTEKLQVLKQQYQTEMEKLREKCEQEKETLLKDKEIIFQAHIEEMNEKTLEKLDVKQTELESLSSELSEVLKARHKLEEELSVLKDQTDKMKQELEAKMDEQKNHHQQQVDSIIKEHEVSIQRTEKALKDQINQLELLLKERDKHLKEHQAHVENLEADIKRSEGELQQASAKLDVFQSYQSATHEQTKAYEEQLAQLQQKLLDLETERILLTKQVAEVEAQKKDVCTELDAHKIQVQDLMQQLEKQNSEMEQKVKSLTQVYESKLEDGNKEQEQTKQILVEKENMILQMREGQKKEIEILTQKLSAKEDSIHILNEEYETKFKNQEKKMEKVKQKAKEMQETLKKKLLDQEAKLKKELENTALELSQKEKQFNAKMLEMAQANSAGISDAVSRLETNQKEQIESLTEVHRRELNDVISIWEKKLNQQAEELQEIHEIQLQEKEQEVAELKQKILLFGCEKEEMNKEITWLKEEGVKQDTTLNELQEQLKQKSAHVNSLAQDETKLKAHLEKLEVDLNKSLKENTFLQEQLVELKMLAEEDKRKVSELTSKLKTTDEEFQSLKSSHEKSNKSLEDKSLEFKKLSEELAIQLDICCKKTEALLEAKTNELINISSSKTNAILSRISHCQHRTTKVKEALLIKTCTVSELEAQLRQLTEEQNTLNISFQQATHQLEEKENQIKSMKADIESLVTEKEALQKEGGNQQQAASEKESCITQLKKELSENINAVTLMKEELKEKKVEISSLSKQLTDLNVQLQNSISLSEKEAAISSLRKQYDEEKCELLDQVQDLSFKVDTLSKEKISALEQVDDWSNKFSEWKKKAQSRFTQHQNTVKELQIQLELKSKEAYEKDEQINLLKEELDQQNKRFDCLKGEMEDDKSKMEKKESNLETELKSQTARIMELEDHITQKTIEIESLNEVLKNYNQQKDIEHKELVQKLQHFQELGEEKDNRVKEAEEKILTLENQVYSMKAELETKKKELEHVNLSVKSKEEELKALEDRLESESAAKLAELKRKAEQKIAAIKKQLLSQMEEKEEQYKKGTESHLSELNTKLQEREREVHILEEKLKSVESSQSETLIVPRSAKNVAAYTEQEEADSQGCVQKTYEEKISVLQRNLTEKEKLLQRVGQEKEETVSSHFEMRCQYQERLIKLEHAEAKQHEDQSMIGHLQEELEEKNKKYSLIVAQHVEKEGGKNNIQAKQNLENVFDDVQKTLQEKELTCQILEQKIKELDSCLVRQKEVHRVEMEELTSKYEKLQALQQMDGRNKPTELLEENTEEKSKSHLVQPKLLSNMEAQHNDLEFKLAGAEREKQKLGKEIVRLQKDLRMLRKEHQQELEILKKEYDQEREEKIKQEQEDLELKHNSTLKQLMREFNTQLAQKEQELEMTIKETINKAQEVEAELLESHQEETNQLLKKIAEKDDDLKRTAKRYEEILDAREEEMTAKVRDLQTQLEELQKKYQQKLEQEENPGNDNTQLAQKTTLISDSKLKEQEFREQIHNLEDRLKKYEKNVYATTVGTPYKGGNLYHTDVSLFGEPTEFEYLRKVLFEYMMGRETKTMAKVITTVLKFPDDQTQKILEREDARLMFTSPRSGIF

SEQ ID NO: 11168 - protein, 2230 aa, Homo sapiens
MFKKLKQKISEEQQQLQQALAPAQASSNSSTPTRMRSRTSSFTEQLDEGTPNRESGDTQSFAQKLQLRVPSVESLFRSPIKESLFRSSSKESLVRTSSRESLNRLDLDSSTASFDPPSDMDSEAEDLVGNSDSLNKEQLIQRLRRMERSLSSYRGKYSELVTAYQMLQREKKKLQGILSQSQDKSLRRIAELREELQMDQQAKKHLQEEFDASLEEKDQYISVLQTQVSLLKQRLRNGPMNVDVLKPLPQLEPQAEVFTKEENPESDGEPVVEDGTSVKTLETLQQRVKRQENLLKRCKETIQSHKEQCTLLTSEKEALQEQLDERLQELEKIKDLHMAEKTKLITQLRDAKNLIEQLEQDKGMVIAETKRQMHETLEMKEEEIAQLRSRIKQMTTQGEELREQKEKSERAAFEELEKALSTAQKTEEARRKLKAEMDEQIKTIEKTSEEERISLQQELSRVKQEVVDVMKKSSEEQIAKLQKLHEKELARKEQELTKKLQTREREFQEQMKVALEKSQSEYLKISQEKEQQESLALEELELQKKAILTESENKLRDLQQEAETYRTRILELESSLEKSLQENKNQSKDLAVHLEAEKNKHNKEITVMVEKHKTELESLKHQQDALWTEKLQVLKQQYQTEMEKLREKCEQEKETLLKDKEIIFQAHIEEMNEKTLEKLDVKQTELESLSSELSEVLKARHKLEEELSVLKDQTDKMKQELEAKMDEQKNHHQQQVDSIIKEHEVSIQRTEKALKDQINQLELLLKERDKHLKEHQAHVENLEADIKRSEGELQQASAKLDVFQSYQSATHEQTKAYEEQLAQLQQKLLDLETERILLTKQVAEVEAQKKDVCTELDAHKIQVQDLMQQLEKQNSEMEQKVKSLTQVYESKLEDGNKEQEQTKQILVEKENMILQMREGQKKEIEILTQKLSAKEDSIHILNEEYETKFKNQEKKMEKVKQKAKEMQETLKKKLLDQEAKLKKELENTALELSQKEKQFNAKMLEMAQANSAGISDAVSRLETNQKEQIESLTEVHRRELNDVISIWEKKLNQQAEELQEIHEIQLQEKEQEVAELKQKILLFGCEKEEMNKEITWLKEEGVKQDTTLNELQEQLKQKSAHVNSLAQDETKLKAHLEKLEVDLNKSLKENTFLQEQLVELKMLAEEDKRKVSELTSKLKTTDEEFQSLKSSHEKSNKSLEDKSLEFKKLSEELAIQLDICCKKTEALLEAKTNELINISSSKTNAILSRISHCQHRTTKVKEALLIKTCTVSELEAQLRQLTEEQNTLNISFQQATHQLEEKENQIKSMKADIESLVTEKEALQKEGGNQQQAASEKESCITQLKKELSENINAVTLMKEELKEKKVEISSLSKQLTDLNVQLQNSISLSEKEAAISSLRKQYDEEKCELLDQVQDLSFKVDTLSKEKISALEQVDDWSNKFSEWKKKAQSRFTQHQNTVKELQIQLELKSKEAYEKDEQINLLKEELDQQNKRFDCLKGEMEDDKSKMEKKESNLETELKSQTARIMELEDHITQKTIEIESLNEVLKNYNQQKDIEHKELVQKLQHFQELGEEKDNRVKEAEEKILTLENQVYSMKAELETKKKELEHVNLSVKSKEEELKALEDRLESESAAKLAELKRKAEQKIAAIKKQLLSQMEEKEEQYKKGTESHLSELNTKLQEREREVHILEEKLKSVESSQSETLIVPRSAKNVAAYTEQEEADSQGCVQKTYEEKISVLQRNLTEKEKLLQRVGQEKEETVSSHFEMRCQYQERLIKLEHAEAKQHEDQSMIGHLQEELEEKNKKYSLIVAQHVEKEGGKNNIQAKQNLENVFDDVQKTLQEKELTCQILEQKIKELDSCLVRQKEVHRVEMEELTSKYEKLQALQQMDGRNKPTELLEENTEEKSKSHLVQPKLLSNMEAQHNDLEFKLAGAEREKQKLGKEIVRLQKDLRMLRKEHQQELEILKKEYDQEREEKIKQEQEDLELKHNSTLKQLMREFNTQLAQKEQELEMTIKETINKAQEVEAELLESHQEETNQLLKKIAEKDDDLKRTAKRYEEILDAREEEMTAKVRDLQTQLEELQKKYQQKLEQEENPGNDNVTIMELQTQLAQKTTLISDSKLKEQEFREQIHNLEDRLKKYEKNVYATTVGTPYKGGNLYHTDVSLFGEPTEFEYLRKVLFEYMMGRETKTMAKVITTVLKFPDDQTQKILEREDARLMFTSPRSGIF

SEQ ID NO: 11169 - protein, 2228 aa, Homo sapiens
MFKKLKQKISEEQQQLQQALAPAQASSNSSTPTRMRSRTSSFTEQLDEGTPNRESGDTQSFAQKLQLRVPSVESLFRSPIKESLFRSSSKESLVRTSSRESLNRLDLDSSTASFDPPSDMDSEAEDLVGNSDSLNKEQLIQRLRRMERSLSSYRGKYSELVTAYQMLQREKKKLQGILSQSQDKSLRRIAELREELQMDQQAKKHLQEEFDASLEEKDQYISVLQTQVSLLKQRLRNGPMNVDVLKPLPQLEPQAEVFTKEENPESDGEPVVEDGTSVKTLETLQQRVKRQENLLKRCKETIQSHKEQCTLLTSEKEALQEQLDERLQELEKIKDLHMAEKTKLITQLRDAKNLIEQLEQDKGMVIAETKRQMHETLEMKEEEIAQLRSRIKQMTTQGEELREQKEKSERAAFEELEKALSTAQKTEEARRKLKAEMDEQIKTIEKTSEEERISLQQELSRVKQEVVDVMKKSSEEQIAKLQKLHEKELARKEQELTKKLQTREREFQEQMKVALEKSQSEYLKISQEKEQQESLALEELELQKKAILTESENKLRDLQQEAETYRTRILELESSLEKSLQENKNQSKDLAVHLEAEKNKHNKEITVMVEKHKTELESLKHQQDALWTEKLQVLKQQYQTEMEKLREKCEQEKETLLKDKEIIFQAHIEEMNEKTLEKLDVKQTELESLSSELSEVLKARHKLEEELSVLKDQTDKMKQELEAKMDEQKNHHQQQVDSIIKEHEVSIQRTEKALKDQINQLELLLKERDKHLKEHQAHVENLEADIKRSEGELQQASAKLDVFQSYQSATHEQTKAYEEQLAQLQQKLLDLETERILLTKQVAEVEAQKKDVCTELDAHKIQVQDLMQQLEKQNSEMEQKVKSLTQVYESKLEDGNKEQEQTKQILVEKENMILQMREGQKKEIEILTQKLSAKEDSIHILNEEYETKFKNQEKKMEKVKQKAKEMQETLKKKLLDQEAKLKKELENTALELSQKEKQFNAKMLEMAQANSAGISDAVSRLETNQKEQIESLTEVHRRELNDVISIWEKKLNQQAEELQEIHEIQLQEKEQEVAELKQKILLFGCEKEEMNKEITWLKEEGVKQDTTLNELQEQLKQKSAHVNSLAQDETKLKAHLEKLEVDLNKSLKENTFLQEQLVELKMLAEEDKRKVSELTSKLKTTDEEFQSLKSSHEKSNKSLEDKSLEFKKLSEELAIQLDICCKKTEALLEAKTNELINISSSKTNAILSRISHCQHRTTKVKEALLIKTCTVSELEAQLRQLTEEQNTLNISFQQATHQLEEKENQIKSMKADIESLVTEKEALQKEGGNQQQAASEKESCITQLKKELSENINAVTLMKEELKEKKVEISSLSKQLTDLNVQLQNSISLSEKEAAISSLRKQYDEEKCELLDQVQDLSFKVDTLSKEKISALEQVDDWSNKFSEWKKKAQSRFTQHQNTVKELQIQLELKSKEAYEKDEQINLLKEELDQQNKRFDCLKGEMEDDKSKMEKKESNLETELKSQTARIMELEDHITQKTIEIESLNEVLKNYNQQKDIEHKELVQKLQHFQELGEEKDNRVKEAEEKILTLENQVYSMKAELETKKKELEHVNLSVKSKEEELKALEDRLESESAAKLAELKRKAEQKIAAIKKQLLSQMEEKEEQYKKGTESHLSELNTKLQEREREVHILEEKLKSVESSQSETLIVPRSAKNVAAYTEQEEADSQGCVQKTYEEKISVLQRNLTEKEKLLQRVGQEKEETVSSHFEMRCQYQERLIKLEHAEAKQHEDQSMIGHLQEELEEKNKKYSLIVAQHVEKEGGKNNIQAKQNLENVFDDVQKTLQEKELTCQILEQKIKELDSCLVRQKEVHRVEMEELTSKYEKLQALQQMDGRNKPTELLEENTEEKSKSHLVQPKLLSNMEAQHNDLEFKLAGAEREKQKLGKEIVRLQKDLRMLRKEHQQELEILKKEYDQEREEKIKQEQEDLELKHNSTLKQLMREFNTQLAQKEQELEMTIKETINKAQEVEAELLESHQEETNQLLKKIAEKDDDLKRTAKRYEEILDAREEEMTAKVRDLQTQLEELQKKYQQKLEQEENPGNDNVTIMELQTQLAQKTTLISDSKLKEQEFREQIHNLEDRLKKYEKNVYATTVGTPYKGGNLYHTDVSLFGEPTEFEYLRKVLFEYMMGRETKTMAKVITTVLKFPDDQTQKILEREDARLMSWLRSSS

SEQ ID NO: 11170 - protein, 1333 aa, Homo sapiens
GNNISFEEKKKVLIQRQGNGTFVQTDKPLYTPGQQVYFRIVTMDSNFVPVNDKVSTSCSFSIGQDPNSNRIAQWLEVVPEQGIVDLSFQLAPEAMLGTYTVAVAEGKTFGTFSVEEYVLPKFKVEVVEPKELSTVQESFLVKICCRYTYGKPMLGAVQVSVCQKANTYWYREVEREQLPDKCRNLSGQTDKTGCFSAPVDMATFDLIGYAYSHQINIVATVVEEGTGSRVLLGSLRKEKEKGLVPGTDLLQVYKTYPLEGHDDSFLKNHLVFLVIYGTNGTFNQTLVTDNNGLAPFTLETSGWNGTDVSLEGKFQMEDLVYNPEQVPRYYQNAYLHLRPFYSTTRSFLGIHRLNGPLKCGQPQEVLVDYYIDPADASPDQEISFSYYVRPGNGDGNLHHGACTGSVKSTYGLKASFSLSLTFTSRLAPDPSLVIYAIFPSGGVVADKIQFSVEMCFDNQVSLGFSPSQQLPGAEVELQLQAAPGSLCALRAVDESVLLLRPDRELSNRSVSNCLLTEFTINSKRMFCFNSLMVEFLGSSPCSWGRDHLNTYFSDAYQDVGLKILSNAKIKKPVDCSHRSPEYSTAMGVFVFSISSAGGGHPEAFESSTPLHQAEDSQVRQYFPETWLWDLFPIGNSGKEAVHVTVPDAITEWKAMSFCTSQSRGFGLSPTVGLTAFKPFFVDLTLPYSVVRGESFRLTATIFNYLKDCIRVRAGDTGIRCQPWNHTSPISLSLNWKHPNFPWEREEMSASQPPGHINFTISTKILDSNEPCGGQKGFVPQKGRSDTLIKPVLVKPEGVLVEKTHSSLLCPKGKVASESVSLELPVDIVPDSTKAYVTVLGDIMGTALQNLDGLVQMPSGCGEQNMVLFAPIIYVLQYLEKAGLLTEEIRSRAVGFLEIGYQKELMYKHSNGSYSAFGERDGNGNTWLTAFVTKCFGQAQKFIFIDPKNIQDALKWMAGNQLPSGCYANVGNLLHTAMKGGVDDEVSLTAYVTAALLEMGKDVDDPMVSQGLRCLKNSATSTTNLYTQALLAYIFSLAGEMDIRNILLKQLDQQAIISGESIYWSQKPTPSSNASPWSEPAAVDVELTAYALLAQLTKPSLTQKEIAKATSIVAWLAKQHNAYGGFSSTQDTVVALQALAKYATTAYMPSEEINLVVKSTENFQRTFNIQSVNRLVFQQDTLPNVPGMYTLEASGQGCVYVQTVLRYNILPPTNMKTFSLSVEIGKARCEQPTSPRSLTLTIHTSYVGSRSSSNMAIVEVKMLSGFSPMEGTNQQQGSFIPHCIQCNFHFTSKVLFHLSSPQLIKNTQTYTFTISQSVLVTNLKPATIKVYDYY

SEQ ID NO: 11171 - protein, 268 aa, Homo sapiens
MYKHSNGSYSAFGERDGNGNTWLTAFVTKCFGQAQKFIFIDPKNIQDALKWMAGNQLPSGCYANVGNLLHTAMKGGVDDEVSLTAYVTAALLEMGKDVDDPMVSQGLRCLKNSATSTTNLYTQALLAYIFSLAGEMDIRNILLKQLDQQAIISGESIYWSQKPTPSSNASPWSEPAAVDVELTAYALLAQLTKPSLTQKEIAKATSIVAWLAKQHNAYGGFSSTQDTVVALQALAKYATTAYMPSEEINLVVTRWRPQARAVSMCRRC

SEQ ID NO: 11172 - protein, 1558 aa, Homo sapiens
SICEDVISQQLTHKDKKIRMEAHAKFAVLWHLTRDLHINKSSSFVRSFDRSLFIMLDSLNSLDGSTSSVGQAWLNQVLQRHDIARVLEPLLLLLLHPKTQRVSVQRVQAERYWNKSPCYPGEESDKHFMQNFACSNVSQVQLITSKGNGEKPLTMDEIENFSLTVNPLSDRLSLLSTSSETIPMVVSDFDLPDQQIEILQSSDSGCSQSSAGDNLSYEVDPETVNAQEDSQMPKESSPDDDVQQVVFDLICKVVSGLEVESASVTSQLEIEAMPPKCSDIDPDEETIKIEDDSIQQSQNALLSNESSQFLSVSAEGGHECVANGISRNSSSPCISGTTHTLHDSSVASIETKSRQRSHSSIQFSFKEKLSEKVSEKETIVKESGKQPGAKPKVKLARKKDDDKKKSSNEKLKQTSVFFSDGLDLENWYSCGEGDISEIESDMGSPGSRKSPNFNIHPLYQHVLLYLQLYDSSRTLYAFSAIKAILKTNPIAFVNAISTTSVNNAYTPQLSLLQNLLARHRISVMGKDFYSHIPVDSNHNFRSSMYIEILISLCLYYMRSHYPTHVKVTAQDLIGNRNMQMMSIEILTLLFTELAKVIESSAKGFPSFISDMLSKCKVQKVILHCLLSSIFSAQKWHSEKMAGKNLVAVEEGFSEDSLINFSEDEFDNGSTLQSQLLKVLQRLIVLEHRVMTIPEENETGFDFVVSDLEHISPHQPMTSLQYLHAQPITCQGMFLCAVIRALHQHCACKMHPQWIGLITSTLPYMGKVLQRVVVSVTLQLCRNLDNLIQQYKYETGLSDSRPLWMASIIPPDMILTLLEGITAIIHYCLLDPTTQYHQLLVSVDQKHLFEARSGILSILHMIMSSVTLLWSILHQADSSEKMTIAASASLTTINLGATKNLRQQILELLGPISMNHGVHFMAAIAFVWNERRQNKTTTRTKVIPAASEEQLLLVELVRSISVMRAETVIQTVKEVLKQPPAIAKDKKHLSLEVCMLQFFYAYIQRIPVPNLVDSWASLLILLKDSIQLSLPAPGQFLILGVLNEFIMKNPSLENKKDQRDLQDVTHKIVDAIGAIAGSSLEQTTWLRRNLEVKPSPKIMVDGTNLESDVEDMLSPAMETANITPSVYSVHALTLLSEVLAHLLDMVFYSDEKERVIPLLVNIMHYVVPYLRNHSAHNAPSYRACVQLLSSLSGYQYTRRAWKKEAFDLFMDPSFFQMDASCVNHWRAIMDNLMTHDKTTFRDLMTRVAVAQSSSLNLFANRDVELEQRAMLLKRLAFAIFSSEIDQYQKYLPDIQERLVESLRLPQVPTLHSQVFLFFRVLLLRMSPQHLTSLWPTMITELVQVFLLMEQELTADEDISRTSGPSVAGLETTYTGGNGFSTSYNSQRWLNLYLSACKFLDLALALPSENLPQFQMYRWAFIPEASDDSGLEVRRQGIHQREFKPYVVRLAKLLRKRAKKNPEEDNSGRTLGWEPGHLLLTICTVRSMEQLLPFFNVLSQVFNSKVTSRCGGHSGSPILYSNAFPNKDMKLENHKPCSSKARQKIEEMVEKDFLEGMIKT

SEQ ID NO: 11173 - protein, 555 aa, Homo sapiens
MMHINFHRPPAKPKPQKVKEIEYQNLRFPVDLSNPFAVATVLNQEPGKLKIKELREVLDQGTEISKTRQMKEALFEQKVRQDIHEEMENHLKWQVHLGKDPMSFKLKKELTEEWQKACAKYKLDRGDPILDEEFQRLKTEVSHKRVVRNQEEKIKEFHPTFDPLINNTWLSRSRAQKRFQQVARKVMIQGRLFNMLSAVREMDKESILRKIGQAKQSIAQEANFFKFFLRRISQDDYTSRFSVSPKEVLPFAFPDCSPPQDSNELAPDGLGLVPIKSSEVQIKQSYSFFNLQVPQLYKIKRYQPFSVHKSSTSYRPQKLARALKQGAEDEVTTITALPKQDSTTQLSGKTSVLSMKPPEALAMSLDYDPLYVFNPNPGLFAVMHPLTYAETLIDYHLCSHPKYKFTKESRHGSSIPVTQKQFLHHTDIIPGIMHWKSFQSLVLSSLPDPSKMETTKSCDSFNSFMLPIDVPAILDALPEEDRLETVERELCEQNVEVMLTPEMIKVEFPMLNYKDIRKEKEVKDQAQPAEKAGEKLLEEMRNLRGKALNTYLILE

SEQ ID NO: 11174 - protein, 619 aa, Homo sapiens
DKPYKYKKCGNAFKFSSTFTKHKRIHTGETPFRCEECGKAFNQSSNLTDHKRIHTGEKTYKCEECGKAFKGSSNFNAHKVIHTAEKPYKCEDCGKTFNHFSALRKHKIIHTGKKPYKREECGKAFSQSSTLRKHEIIHTGEKPYKCEECGKAFKWSSKLTVHKVVHTGEKPYKCEECGKAFSQFSTLKKHKIIHTGKKPYKCEECGKAFNSSSTLMKHKIIHTGEKPYKCEECGKAFRQSSHLTRHKAIHTGEKPYKCEECGKAFNHFSDLRRHKIIHTGKKPYKCEECGKAFSQSSTLRNHQIIHTGEKPYKCEECECGKAFNNSSILAKHKIIHTGKKPYKCEECGKAFRQSSHLTRHKAIHTGEKPYKCEECGKAFSHFSALRRHKIIHTGKKPYKCEECGKAFSHFSALRRHKIIHTGEKPYKCEECGKAFKWSSKLTVHKVIHTAEKPCKCEECGKSFKHFSALRKHKVIHTGEKPCKCEECGKAFKHFSALRKHKVIHTGKKPYKCEECGKAFSQSSSLRKHEIIHSGEKPYKCEECGKAFKWLSKLTVHKVIHTAEKPCKCEECGKAFKHFSALRKHKIIHTGKKPYKCEECGKAFNDSSTLMKHKIIHTGK

SEQ ID NO: 11175 - protein, 773 aa, Homo sapiens
DVTIEFSLEEWQCLDTVQQNLYRDVMLENYRNLVFLVYSSESSKWNNLLFLFLLVMRSHFTQDLWPDQSTKDSFQEVILRTYARCGHKNLRLRKDCKSANEGKMHKEGYNKLNQCRTATQRKIFQCNKHMKVFHKYSNRNKVRHTKKKTFKCIKCSKSFFMLSCLIRHKRIHIRQNIYKCEEQCGKAFSQSSTLRKHEIIHTGEKPYKCEECGKAFKWSSKLTVHKVVHTGEKPYKCEECGKAFSQFSTLKKHKIIHTGKKPYKCEECGKAFNSSSTLMKHKIIHTGEKPYKCEECGKAFRQSSHLTRHKAIHTGEKPYKCEECGKAFNHFSDLRRHKIIHTGKKPYKCEECGKAFSQSSTLRNHQIIHTGEKPYKCEECGKAFKWSSKLTVHKVIHTGEKPCKCEECGKAFKHFSALRKHKVIHTREKLYKCEECGKAFNNSSILAKHKIIHTGKKPYKCEECGKAFRQSSHLTRHKAIHTGEKPYKCEECGKAFSHFSALRRHKIIHTGKKPYKCEECGKAFSHFSALRRHKIIHTGEKPYKCEECECGKAFKQSSHLTRHKAIHTGEKPYKCEECGKDFNNSSTLKKHKLIHTREKLYKCEECVKAFNNFSALMKHKIIHTGEKPYKCEECGKAFKWSSKLTEHKVIHTGEKPCKCEECDKAFKHFSALRKHKVIHTGKKPYQCDECGKAFNNSSTLTKHKIIHTGEKPYKCEECGKAFSQSSILTKHKIIHSVEKPYKCEECGKAFNQSSHLTRHKTIHTGEKPYKCEE

SEQ ID NO: 11176 - protein, 773 aa, Homo sapiens
VMRSHFTQDLWPDQSTKDSFQEVILRTYARCGHKNLRLRKDCKSANEGKMHKEGYNKLNQCRTATQRKIFQCNKHMKVFHKYSNRNKVRHTKKKTFKCIKCSKSFFMLSCLIRHKRIHIRQNIYKCEERGKAFKSFSTLTKHKIIHTEDKPYKYKKCGNAFKFSSTFTKHKRIHTGETPFRCEECGKAFNQSSNLTDHKRIHTGEKTYKCEECGKAFKGSSNFNAHKVIHTAEKPYKCEDCGKTFNHFSALRKHKIIHTGKKPYKREECGKAFSQSSTLRKHEIIHTGEKPYKCEECGKAFKWSSKLTVHKVVHTGEKPYKCEECGKAFSQFSTLKKHKIIHTGKKPYKCEECGKAFNSSSTLMKHKIIHTGEKPYKCEECGKAFRQSSHLTRHKAIHTGEKPYKCEECGKAFNHFSDLRRHKIIHTGKKPYKCEECGKAFSQSSTLRNHQIIHTGEKPYKCEECGKAFKWSSKLTVHKVIHTGEKPCKCEECGKAFKHFSALRKHKVIHTREKLYKCEECGKAFNNSSILAKHKIIHTGKKPYKCEECGKAFRQSSHLTRHKAIHTGEKPYKCEECGKAFSHFSALRRHKIIHTGKKPYKCEECGKAFSHFSALRRHKIIHTGEKPYKCEECECGKAFNDSSTLMKHKIIHTGKKPYKCAECGKAFKQSSHLTRHKAIHTGEKPYKCEECGKDFNNSSTLKKHKLIHTREKLYKCEECVKAFNNFSALMKHKIIHTGEKPYKCEECGKAFKWSSKLTEHKVIHTGEKPCKCE

SEQ ID NO: 11177 - protein, 705 aa, Homo sapiens
LTFRDVTIEFSLEEWQCLDTVQQNLYRDVMLENYRNLVFLGMAVFKPDLITCLKQGKEPWNMKRHEMVTKPPAFNSSSTLMKHKIIHTGEKPYKCEECGKAFRQSSHLTRHKAIHTGEKPYKCEECGKAFNHFSDLRRHKIIHTGKKPYKCEECGKAFSQSSTLRNHQIIHTGEKPYKCEECGKAFKWSSKLTVHKVIHTGEKPCKCEECGKAFKHFSALRKHKVIHTREKLYKCEECGKAFNNSSILAKHKIIHTGKKPYKCEECGKAFRQSSHLTRHKAIHTGEKPYKCEECGKAFSHFSALRRHKIIHTGKKPYKCEECGKAFSHFSALRRHKIIHTGEKPYKCEECGKAFKWSSKLTVHKVIHTAEKPCKCEECGKSFKHFSALRKHKVIHTREKLYKCEECVKAFNSFSALMKHKVIHTGEKPYKCEECGKAFKWSSKLTVHKVIHTGEKPCKCEECGKAFKHFSALRKHKVIHTGKKPYKCEECGKAFSQSSSLRKHEIIHSGEKPYKCEECGKAFKWLSKLTVHKVIHTAEKPCKCEECGKAFKHFSALRKHKIIHTGKKPYKCEECGKAFNDSSTLMKHKIIHTGKKPYKCAECGKAFKQSSHLTRHKAIHTGEKPYKCEECGKDFNNSSTLKKHKLIHTREKLYKCEECVKAFNNFSALMKHKIIHTGEKPYKCEECGKAFKWSSKLTEHKVIHTG

SEQ ID NO: 11178 - protein, 1401 aa, Homo sapiens
  VARIANT 1384, 1386: Xaa = Any Amino Acid
MQEDSGGPLTFRDVTIEFSLEEWQCLDTVQQNLYRDVMLENYRNLVFLGMAVFKPDLITCLKQGKEPWNMKRHEMVTKPPVMRSHFTQDLWPDQSTKDSFQEVILRTYARCGHKNLRLRKDCKSANEGKMHKEGYNKLNQCRTATQRKIFQCNKHMKVFHKYSNRNKVRHTKKKTFKCIKCSKSFFMLSCLIRHKRIHIRQNIYKCEERGKAFKSFSTLTKHKIIHTEDKPYKYKKCGNAFKFSSTFTKHKRIHTGETPFRCEECGKAFNQSSNLTDHKRIHTGEKTYKCEECGKAFKGSSNFNAHKVIHTAEKPYKCEDCGKTFNHFSALRKHKIIHTGKKPYKREECGKAFSQSSTLRKHEIIHTGEKPYKCEECGKAFKWSSKLTVHKVVHTGEKPYKCEECGKAFSQFSTLKKHKIIHTGKKPYKCEECGKAFNSSSTLMKHKIIHTGEKPYKCEECGKAFRQSSHLTRHKAIHTGEKPYKCEECGKAFNHFSDLRRHKIIHTGKKPYKCEECGKAFSQSSTLRNHQIIHTGEKPYKCEECGKAFKWSSKLTVHKVIHTGEKPCKCEECGKAFKHFSALRKHKVIHTREKLYKCEECGKAFNNSSILAKHKIIHTGKKPYKCEECGKAFRQSSHLTRHKAIHTGEKPYKCEECGKAFSHFSALRRHKIIHTGKKPYKCEECGKAFSHFSALRRHKIIHTGEKPYKCEECGKAFKWSSKLTVHKVIHTAEKPCKCEECGKSFKHFSALRKHKVIHTREKLYKCEECVKAFNSFSALMKHKVIHTGEKPYKCEECGKAFKWSSKLTVHKVIHTGEKPCKCEECGKAFKHFSALRKHKVIHTGKKPYKCEECGKAFSQSSSLRKHEIIHSGEKPYKCEECGKAFKWLSKLTVHKVIHTAEKPCKCEECGKAFKHFSALRKHKIIHTGKKPYKCEECGKAFNDSSTLMKHKIIHTGKKPYKCAECGKAFKQSSHLTRHKAIHTGEKPYKCEECGKDFNNSSTLKKHKLIHTREKLYKCEECVKAFNNFSALMKHKIIHTGEKPYKCEECGKAFKWSSKLTEHKVIHTGEKPCKCEECDKAFKHFSALRKHKVIHTGKKPYQCDECGKAFNNSSTLTKHKIIHTGEKPYKCEECGKAFSQSSILTKHKIIHSVEKPYKCEECGKAFNQSSHLTRHKTIHTGEKPYKCEECGKAFIQCSYLIRHKTIHTREKPTNVKKIIHARDKHYKCEEWAKLLTSSQTLLKIIYSGEERYKFKGFGKTFKCFSKLTEHKIIHIREILYKCEECGKASNGFSNLTECEIIYIREKPYKCEECGKASNGFSNLTECEIIYIREKPYKCEECGKAFNWSLNLTEHKIINTKGNPKHIKNVTKLLTALWEAEADGSXGXEFETSLANMVKPHLY

SEQ ID NO: 11179 - protein, 499 aa, Homo sapiens
MSTPSGISTWLSLPVSTPASITSIRVTQKSSGPWAFSSCTYVSGPGVCISSLSCSRVGSSSFRGGLGGGYGGASGMGGIIAIMVNQSLLSPLNLEVDPNIQAVCTQEKEQIKTLNNKFASFIDKVWFLEQQNKVLETKWSLLQQQKMARSNMDNMLESYINNLRRQLETLGQEKLKLEAELGNMQGLGEDFKNKYEDEINKHTEVENEFVLIKKDVDEAYMNKAELESLLEGLTDEINFLRQLYEEEIRELQSQISDMSMVLSMDYSCSRDMDSIIPEVKVQYEEIANCSRAEAESMYQIKYEELQTLAGKYGDDLSRTKTEISEMNRNISWLQAETEGLKGQRASLEAAITDAEQRGELAVKDANAKLSELEAALQRAKQDMMGQLREYQELMNVGLTLDIEIATYRKLLEGEESRLESGMQNVSIHTKTTSSYAGGLSSAYGGLTSPGIIYRLGSSFGSAAGSSSFSRTSSTRAVVVRKIETHDGKLESESSDVLSK

SEQ ID NO: 11180 - protein, 315 aa, Homo sapiens
MDLRQFLMCLSLCTAFALSKPTEKKDRVHHEPQLSDKVHNDAQSFDYDHDAFLGAEEAKTFDQLTPEESKERLGMIVDKIDADKDGFVTEGELKSWIKHAQKKYIYDNVENQWQEFDMNQDGLISWDEYRNVTYGTYLDDPDPDDGFNYKQMMVRDERRFKMADKDGDLIATKEEFTAFLHPEEYDYMKDIVVQETMEDIDKNADGFIDLEEYIGDMYSHDGNTDEPEWVKTEREQFVEFRDKNRDGKMDKEETKDWILPSDYDHAEAEARHLVYESDQNKDGKLTKEEIVDKYDLFVGSQATDFGEALVRHDEF

SEQ ID NO: 11181 - protein, 619 aa, Homo sapiens
MRGLLCWPVLLLLLQPWETQLQLTGPRCHTGPLDLVFVIDSSRSVRPFEFETMRQFLMGLLRGLNVGPNATRVGVIQYSSQVQSVFPLRAFSRREDMERAIRDLVPLAQGTMTGLAIQYAMNVAFSVAEGARPPEERVPRVAVIVTDGRPQDRVAEVAAQARARGIEIYAVGVQRADVGSLRAMASPPLDEHVFLVESFDLIQEFGLQFQSRLCGKDQCAEGGHGCQHQCVNAWAMFHCTCNPGYKLAADNKSSIDLCAEGTHGCEHHCVNSPGSYFCHCQVGFVLQQDQRSCRAIDYCSFGNHSCQHECVSTPGGPRCHCREGHDLQPDGRSCQVRDLCNGVDHGCEFQCVSEGLSYRCLCPEGRQLQADGKSCNRCREGHVDLVLLVDGSKSVRPQNFELVKRFVNQIVDFLDVSPEGTRVGLVQFSSRVRTEFPLGRYGTAAEVKQAVLAVEYMERGTMTGLALRHMVEHSFSEAQGARPRALNVPRVGLVFTDGRSQDDISVWAARAKEEGIVMYAVGVGKAVEAELREIASEPAELHVSYAPDFGTMTHLLENLRGSICPEEGISAGTELRSPCECESLVEFQGRTLGALESLTLMAQLTARLEDLENQLANQK

SEQ ID NO: 11182 - protein, 914 aa, Homo sapiens
MASESSPLLAYRLLGEEGVALPANGAGGPGGASARKLSTFLGVVVPTVLSMFSIVVFLRIGFVVGHAGLLQALAMLLVAYFILALTVLSVCAIATNGAVQGGGAYFMISRTLGPEVGGSIGLMFYLANVCGCAVSLLGLVESVLDVFGADATGPSGLRVLPQGYGWNLLYGSLLLGLVGGVCTLGAGLYARASFLTFLLVSGSLASVLISFVAVGPRDIRLTPRPGPNGSSLPPRFGHFTGFNSSTLKDNLGAGYAEDYTTGAVMNFASVFAVLFNGCTGIMAGANMSGELKDPSRAIPLGTIVAVAYTFFVYVLLFFLSSFTCDRTLLQEDYGFFRAISLWPPLVLIGIYATALSASMSSLIGASRILHALARDDLFGVILAPAKVVSRGGNPWAAVLYSWGLVQLVLLAGKLNTLAAVVTVFYLVAYAAVDLSCLSLEWASAPNFRPTFSLFSWHTCLLGVASCLLMMFLISPGAAGGSLLLMGLLAALLTARGGPSSWGYVSQALLFHQVRKYLLRLDVRKDHVKFWRPQLLLLVGNPRGALPLLRLANQLKKGGLYVLGHVTLGDLDSLPSDPVQPQYGAWLSLVDRAQVKAFVDLTLSPSVRQGAQHLLRISGLGGMKPNTLVLGFYDDAPPQDHFLTDPAFSEPADSTREGSSPALSTLFPPPRAPGSPRALNPQDYVATVADALKMNKNVVLARASGALPPERLSRGSGGTSQLHHVDVWPLNLLRPRGGPGYVDVCGLFLLQMATILGMVPAWHSARLRIFLCLGPREAPGAAEGRLRALLSQLRIRAEVQEVVWGEGAGAGEPEAEEEGDFVNSGRGDAEAEALARSANALVRAQQGRGTGGGPGGPEGGDAEGPITALTFLYLPRPPADPARYPRYLALLETLTRDLGPTLLVHGVTPVTCTDL

SEQ ID NO: 11183 - protein, 914 aa, Homo sapiens [sequence omitted]

SEQ ID NO: 11184 - protein, 538 aa, Homo sapiens
MASESSPLLAYRLLGEEGVALPANGAGGPGGASARKLSTFLGVVVPTVLSMFSIVVFLRIDATGPSGLRVLPQGYGWNLLYGSLLLGLVGGVCTLGAGLYARASFLTFLLVSGSLASVLISFVAVGPRDIRLTPRPGPNGSSLPPRFGHFTGFNSSTLKDNLGAGYAEDYTTGAVMNFASVFAVLFNGCTGIMAGANMSGELKDPSRAIPLGTIVAVAYTFFVYVLLFFLSSFTCDRTLLQEDYGFFRAISLWPPLVLIGIYATALSASMSSLIGASRILHALARDDLFGVILAPAKVVSRGGNPWAAVLYSWGLVQLVLLAGKLNTLAAVVTVFYLVAYAAVDLSCLSLEWASAPNFRPTFSLFSWHTCLLGVASCLLMMFLISPGAAGGSLLLMGLLAALLTARGGPSSWGYVSQALLFHQVRKYLLRLDVRKDHVKFWRPQLLLLVGNPRGALPLLRLANQLKKGGLYVLGHVTLGDLDSLPSDPVQPQYGAWLSLVDRAQVKAFVDLTLSPSVRQGAQHLLRISGLESNSHPLP

SEQ ID NO: 11185 - protein, 319 aa, Homo sapiens
MAGLAARLVLLAGAAALASGSQGDREPVYRDCVLQCEEQNCSGGALNHFRSRQPIYMSLAGWTCRDDCKYECMWVTVGLYLQEGHKVPQFHGKWPFSRFLFFQEPASAVASFLNGLASLVMLCRYRTFVPASSPMYHTCVAFAWVSLNAWFWSTVFHTRDTDLQRKWTTSVPPVSYTQSTCAASGPWGCSTQLWSSAFRALLLLMLTVHVSYLSLIRFDYGYNLVANVAIGLVNVVWWLAWCLWNQRRLPHVRKCVVVVLLLQGLSLLELLDFPPLFWVLDAHAIWHISTIPVHVLFFSFLEDDSLYLLKESEDKFKLD

SEQ ID NO: 11186 - protein, 269 aa, Homo sapiens [sequence omitted]

SEQ ID NO: 11187 - protein, 198 aa, Homo sapiens [sequence omitted]

SEQ ID NO: 11188 - protein, 388 aa, Homo sapiens
MEALGKLKQFDAYPKTLEDFRVKTCGGATVTIVSGLLMLLLFLSELQYYLTTEVHPELYVDKSRGDKLKINIDVLFPHMPCAYLSIDAMDVAGEQQLDVEHNLFKQRLDKDGIPVSSEAERHELGKVEVTVFDPDSLDPDRCESCYGAEAEDIKCCNTCEDVREAYRRRGWAFKNPDTIEQCRREGFSQKMQEQKNEGCQVYGFLEVNKVAGNFHFAPGKSFQQSHVHVHAVEIHDLQSFGLDNINMTHYIQHLSFGEDYPGIVNPLDHTNVTAPQASMMFQYFVKVVPTVYMKVDGEVLRTNQFSVTRHEKVANGLLGDQGLPGVFVLYELSPMMVKLTEKHRSFTHFLTGVCAIIGGMFTVAGLIDSLIYHSARAIQKKIDLGKTT

SEQ ID NO: 11189 - protein, 383 aa, Homo sapiens
MEALGKLKQFDAYPKTLEDFRVKTCGGATVTIVSGLLMLLLFLSELQYYLTTEVHPELYVDKSRGDKLKINIDVLFPHMPCAYLSIDAMDVAGEQQLDVEHNLFKQRLDKDGIPVSSEAERHELGKVEVTVFDPDSLDPDRCESCYGAEAEDIKCCNTCEDVREAYRRRGWAFKNPDTIEQCRREGFSQKMQEQKNEGCQVYGFLEVNKVAGNFHFAPGKSFQQSHVHVHDLQSFGLDNINMTHYIQHLSFGEDYPGIVNPLDHTNVTAPQASMMFQYFVKVVPTVYMKVDGEVLRTNQFSVTRHEKVANGLLGDQGLPGVFVLYELSPMMVKLTEKHRSFTHFLTGVCAIIGGMFTVAGLIDSLIYHSARAIQKKIDLGKTT

SEQ ID NO: 11190 - protein, 228 aa, Homo sapiens
GEAEAVRCLPQDFGGLPGQDLRGRHRDHCQWPSHAAMVLRQKISRCCNTCEDVREAYRRRGWAFKNPDTIEQCRREGFSQKMQEQKNEGCQVYGFLEVNKVAGNFHFAPGKSFQQSHVHVHDLQSFGLDNINMTHYIQHLSFGEDYPGIVNPLDHTNVTAPQASMMFQYFVKVVPTVYMKVDGEVLRTNQFSVTRHEKVANGLLGDQGLPGVFGSSTTQHEPSRRKLI

SEQ ID NO: 11191 - protein, 503 aa, Homo sapiens
MAGLSDLELRRELQALGFQPGPITDTTRDVYRNKLRRLRGEARLRDEERLREEARPRGEERLREEARLREDAPLRARPAAASPRAEPWLSQPASGSAYATPGAYGDIRPSAASWVGSRGLAYPARPAQLRRRASVRGSSEEDEDARTPDRATQGPGLAARRWWAASPAPARLPSSLLGPDPRPGLRATRAGPAGAARARPEVGRRLERWLSRLLLWASLGLLLVFLGILWVKMGKPSAPQEAEDNMKLLPVDCERKTDEFCQAKQKAALLELLHELYNFLAIQAGNFECGNPENLKSKCIPVMEAQEYIANVTSSSSAKFEAALTWILSSNKDVGIWLKGEDQSELVTTVDKVVCLESAHPRMGVGCRLSRALLTAVTNVLIFFWCLAFLWGLLILLKYRWRKLEEEEQAMYEMVKKIIDVVQDHYVDWEQDMERYPYVGILHVRDSLIPPQSRRRMKRVWDRAVEFLASNESRIQTESHRVAGEDMLVWRWTKPSSFSDSER

SEQ ID NO: 11192 - protein, 352 aa, Homo sapiens
MRDPFQKGADSSGVTKDQRCHRQHVWCLQGERVLGCLGLPWAKLEKVLTAKLSSTCSSSGIRRRLLPETKPSISTGTATFGNHSSGDFDDGFLRRKQRRNRTTFTLQQLEALEAVFAQTHYPDVFTREELAMKINLTEARVQLANSCLKTELQIEINDTIIEHSEVEDHNFSLKGARVWFQNRRAKWRKTERGASDQEPGAKEPMAEVTPPPVRNINSPPPGDQARSKKEALEAQQSLGRTVGPAGPFFPSCLPGTLLNTATYAQALSHVASLKDPMGLSFLPTYGCQSNRTASVATLRMKAREHSEAVLQSANLLPSTSSSPGPVAKPAPPDGSQEKTSPTKEQSEAEKSV

SEQ ID NO: 11193 - protein, 400 aa, Homo sapiens
MTSYSYRQSSATSSFGGLGGGSVRFGPGVAFRAPSIHGGSGGRGVSVSSARFVSSSSSGAYGGGYGGVLTASDGLLAGNEKLTMQNLNDRLASYLDKVRALEAANGELEVKIRDWYQKQGPGPSRDYSHYYTTIQDLRDKILGATIENSRIVLQIDNARLAADDFRTKFETEQALRMSVEADINGLRRVLDELTLARTDLEMQIEGLKEELAYLKKNHEEEISTLRGQVGGQVSVEVDSAPGTDLAKILSDMRSQYEVMAEQNRKDAEAWFTSRTEELNREVAGHTEQLQMSRSEVTDLRRTLQGLEIELQSQLSMKAALEDTLAETEARFGAQLAHIQALISGIEAQLGDVRADSERQNQEYQRLMDIKSRLEQEIATYRSLLEGQEDHYNNLSASKVL

SEQ ID NO: 11194 - protein, 400 aa, Homo sapiens
MTSYSYRQSSATSSFGGLGGGSVRFGPGVAFRAPSIHGGSGGRGVSVSSARFVSSSSSGGYGGGYGGVLTASDGLLAGNEKLTMQNLNDRLASYLDKVRALEAANGELEVKIRDWYQKQGPGPSRDYSHYYTTIQDLRDKILGATIENSRIVLQIDNARLAADDFRTKFETEQALRMSVEADINGLRRVLDELTLARTDLEMQIEGLKEELAYLKKNHEEEISTLRGQVGGQVSVEVDSAPGTDLAKILSDMRSQYEVMAEQNRKDAEAWFTSRTEELNREVAGHTEQLQMSRSEVTDLRRTLQGLEIELQSQLSMKAALEDTLAETEARFGAQLAHIQALISGIEAQLADVRADSERQNQEYQRLMDIKSRLEQEIATYRSLLEGQEDHYNNLSASKVL

SEQ ID NO: 11195 - protein, 411 aa, Homo sapiens
MVCEQPEVFASACALARAFPLFTHRSGASRRLEKKTVTVEFFLVGQDNGPVEVSTLQCLANATDGVRLAARIVDTPCNEMNTDTFLEEINKVGKELGIIPTIIRDEELKTRGFGGIYGVGKAALHPPALAVLSHTPDGATQTIAWVGKGIVYDTGGLSIKGKTTMPGMKRDCGGAAAVLGAFRAAIKQGFKDNLHAVFCLAENSVGPNATRPDDIHLLYSGKTVEINNTDAEGRLVLADGVSYACKDLGADIILDMATLTGAQGIATGKYHAAVLTNSAEWEAACVKAGRKCGDLVHPLVYCPELHFSEFTSAVADMKNSVADRDNSPSSCAGLFIASHIGFDWPGVWVHLDIAAPVHAGERATGFGVALLLALFGRASEDPLLNLVSPLGCEVDVEEGDLGRDSKRRRLV

SEQ ID NO: 11196 - protein, 300 aa, Homo sapiens
MVCEQPEVFASACALARAFPLFTHRSGASRRLEKKTVTVEFFLVGQDNGPVEVSTLQCLANATDGVRLAARIVDTPCNEMNTDTFLEEINKVGKELGIIPTIIRDEELKTRGFGGIYGVGKAALHPPALAVLSHTPDGATQTIAWVGKGIVYDTGGLSIKGKTTMPGMKRDCGGAAAVLGAFRAAIKQGFKDNLHAVFCLAENSVGPNATRPDDIHLLYSGKTVEINNTDAEGRLVLADGVSYACKDLGADIILDMATLTGAQVSAPWIHPLAVVPGNPTPLLTSRWGRQRVGAAVRKFS

SEQ ID NO: 11197 - protein, 382 aa, Homo sapiens
MGSGEPNPAGKKKKYLKAALYVGDLDPDVTEDMLYKKFRPAGPLRFTRICRDPVTRSPLGYGYVNFRFPADAEWALNTMNFDLINGKPFRLMWSQPDDRLRKSGVGNIFIKNLDKSIDNRALFYLFSAFGNILSCKVVCDDNGSKGYAYVHFDSLAAANRAIWHMNGVRLNNRQVYVGRFKFPEERAAEVRTRDRATFTNVFVKNIGDDIDDEKLKELFCEYGPTESVKVIRDASGKSKGFGFVRYETHEAAQKAVLDLHGKSIDGKVLYVGRAQKKIERLAELRRRFERLRLKEKSRPPGVPIYIKNLDETINDEKLKEEFSSFGSISRAKVMMEVGQGKGFGVVCFSSFEEATKAVDEMNGRIVGSKPLHVTLGQARRRC

SEQ ID NO: 11198 - protein, 360 aa, Homo sapiens
STEGGRTAQLTAVLRKLLDPRLISTEENTQAAETMGPLSAPPCTQRITWKGVLLTASLLNFWNPPTTAQVTIEAQPPKVSEGKDVLLLVHNLPQNLAGYIWYKGQMTYLYHYITSYVVDGQRIIYGPAYSGRERVYSNASLLIQNVTQEDAGSYTLHIIKRRDGTGGVTGHFTFTLHLETPKPSISSSNLNPREAMEAVILTCDPATPAASYQWWMNGQSLPMTHRLQLSKTNRTLFIFGVTKYIAGPYECEIRNPVSASRSDPVTLNLLHGPDLPSIYPSFTYYRSGENLYLSCFAESNPRAQYSWTINGKFQLSGQKLSIPQITTKHSGLYACSVRNSATGKESSKSITVKVSDWILP

SEQ ID NO: 11199 - protein, 453 aa, Homo sapiens
STEGGRTAQLTAVLRKLLDPRLISTEENTQAAETMGPLSAPPCTQRITWKGVLLTASLLNFWNPPTTAQVTIEAQPPKVSEGKDVLLLVHNLPQNLAGYIWYKGQMTYLYHYITSYVVDGQRIIYGPAYSGRERVYSNASLLIQNVTQEDAGSYTLHIIKRRDGTGGVTGHFTFTLHLETPKPSISSSNLNPREAMEAVILTCDPATPAASYQWWMNGQSLPMTHRLQLSKTNRTLFIFGVTKYIAGPYECEIRNPVSASRSDPVTLNLLPKLSKPYITINNLNPRENKDVLTFTCEPKSKNYTYIWWLNGQSLPVSPRVKRPIENRILILPNVTRNETGPYQCEIRDRYGGIRSDPVTLNVLYGPDLPSIYPSFTYYRSGENLYLSCFAESNPRAQYSWTINGKFQLSGQKLSIPQITTKHSGLYACSVRNSATGKESSKSITVKVSDWILP

SEQ ID NO: 11200 - protein, 170 aa, Homo sapiens
MTEYKLVVVGAGGVGKSALTIQLIQNHFVDEYDPTIEDSYRKQVVIDGETCLLDILDTAGQEEYSAMRDQYMRTGEGFLCVFAINNTKSFEDIHQYREQIKRVKDSDDVPMVLVGNKCDLAARTVESRQAQDLARSYGIPYIETSAKTRQGSRSGSSSSSGTLWDPPGPM

SEQ ID NO: 11201 - protein, 188 aa, Homo sapiens [sequence omitted]

SEQ ID NO: 11202 - protein, 189 aa, Homo sapiens
MTEYKLVVVGAGGVGKSALTIQLIQNHFVDEYDPTIEDSYRKQVVIDGETCLLDILDTAGQEEYSAMRDQYMRTGEGFLCVFAINNTKSFEDIHQYREQIKRVKDSDDVPMVLVGNKCDLAARTVESRQAQDLARSYGIPYIETSAKTRQGVEDAFYTLVREIRQHKLRKLNPPDESGPGCMSCKCVLS

SEQ ID NO: 11203 - protein, 189 aa, Homo sapiens [sequence omitted]

SEQ ID NO: 11204 - protein, 338 aa, Homo sapiens
MDQYCILGRIGEGAHGIVFKAKHVEPRVGWQCLPSILQTGEIVALKKVALRRLEDGFPNQALREIKALQEMEDNQYVVQLKAVFPHGGGFVLAFEFMLSDLAEVVRHAQRPLAQAQVKSYLQMLLKGVAFCHANNIVHRDLKPANLLISASGQLKIADFGLARVFSPDGSRLYTHQVATRSVGCIMGELLNGSPLFPGKNDIEQLCYVLRILGTPNPQVWPELTELPDYNKISFKEQVPMPLEEVLPDVSPQALDLLGQFLLYPPHQRIAASKALLHQYFFTAPLPAHPSELPIPQRLGGPAPKAHPGPPHIHDFHVDRPLEESLLNPELIRPFILEG

SEQ ID NO: 11205 - protein, 452 aa, Homo sapiens [sequence omitted]

SEQ ID NO: 11206 - protein, 275 aa, Homo sapiens
MDQYCILGRIGEGAHGIVFKAKHVETGEIVALKKVALRRLEDGFPNQALREIKALQEMEDNQYVVQLKAVFPHGGGFVLAFEFMLSDLAEVVRHAQRPLAQAQVKSYLQMLLKGVAFCHANNIVHRDLKPANLLISASGQLKIADFGLARVFSPDGSRLYTHQVATRSVGCIMGELLNGSPLFPGKNDIEQLCYVLRILGTPNPQVWPELTELPDYNKISFKEQVPMPLEEVLPDVSPQALDLLGQFLLYPPHQRIAASKLPCLPIHLSCRFLSV

SEQ ID NO: 11207 - protein, 584 aa, Homo sapiens
MVAEVCSMPTASTVKKPFDLRSKMGKWCHHRFPCCRGSGKSNMGTSGDHDDSFMKMLRSKMGKCCRHCFPCCRGSGTSNVGTSGDHENSFMKMLRSKMGKWCCHCFPCCRGSSKSNVGAWGDYDHSAFMEPRYHVRREDLDKLHRAAWWGKVPRKDLIVMLRDTDMNKRDKEKRTALHLASANGNSEVVQLLLDRRCQLNVLDNKKRTALIKAIQCQEDECVLMLLEHGADRNIPDEYGNTALHYAIYNEDKLMAKALLLYGADIESKNKCGLTPLLLGVHEQKQQVVKFLIKKKANLNVLDRYGRTALILAVCCGSASIVNLLLEQNVDVSSQDLSGQTAREYAVSSHHHVICELLSDYKEKQMLKISSENSNPEQDLKLTSEEESQRLKVSENSQPEKMSQEPEINKDCDREVEEEIKKHGSNPVGLPENLTNGASAGNGDDGLIPQRRSRKPENQQFPDTENEEYHSDEQNDTRKQLSEEQNTGISQDEILTNKQKQIEVAEQKMNSELSLSHKKEEDLLRENSVLQEEIAVLRLELDETKHQNQLRENKILEEIESVKEKTDKLLRAMQLNEEALTKTNI

SEQ ID NO: 11208 - protein, 576 aa, Homo sapiens
MELENIVANTVLLKAREGGGGNRKGKSKKWRQMLQFPHISQCEELRLSLERDYHSLCERQPIGRLLFREFCATRPELSRCVAFLDGVAEYEVTPDDKRKACGRQLTQNFLSHTGPDLIPEVPRQLVTNCTQRLEQGPCKDLFQELTRLTHEYLSVAPFADYLDSIYFNRFLQWKWLERQPVTKNTFRQYRVLGKGGFGEVCACQVRATGKMYACKKLEKKRIKKRKGEAMALNEKQILEKVNSRFVVSLAYAYETKDALCLVLTLMNGGDLKFHIYHMGQAGFPEARAVFYAAEICCGLEDLHRERIVYRDLKPENILLDDHGHIRISDLGLAVHVPEGQTIKGRVGTVGYMAPEVVKNERYTFSPDWWALGCLLYEMIAGQSPFQQRKKKIKREEVERLVKEVPEEYSERFSPQARSLCSQLLCKDPAERLGCRGGSAREVKEHPLFKKLNFKRLGAGMLEPPFKPDPQAIYCKDVLDIEQFSTVKGVELEPTDQDFYQKFATGSVPIPWQNEMVETECFQELNVFGLDGSVPPDLDWKGQPPAPPKKGLLQRLFSRQDCCGNCSDSEEELPTRL

SEQ ID NO: 11209 - protein, 845 aa, Homo sapiens [sequence omitted]

SEQ ID NO: 11210 - protein, 860 aa, Homo sapiens [sequence omitted]

SEQ ID NO: 11211 - protein, 1125 aa, Homo sapiens
MASEEASLRALESLMTEFFHDCTTNERKREIEELLNNFAQQIGAWRFCLYFLSSTRNDYVMMYSLTVFENLINKMWLGVPSQDKMEIRSCLPKLLLAHHKTLPYFIRNKLCKVIVDIGRQDWPMFYHDFFTNILQLIQSPVTTPLGLIMLKTTSEELACPREDLSVARKEELRKLLLDQVQTVLGLLTGILETVWDKHSVTAATPPPSPTSGESGDLLSNLLQSPSSAKLLNQPIPILDVESEYICSLALECLAHLFSWIPLSASITPSLLTTIFHFARFGCDIRARKMASVNGSSQNCVSGQERGRLGVLAMSCINELMSKNCVPMEFEEYLLRMFQQTFYLLQKITKDNNAHTVKSRLEELDESYIEKFTDFLRLFVSVHLRRIESYSQFPVVEFLTLLFKYTFHQPTHEGYFSCLDIWTLFLDYLTSKIKSRLGDKEAVLNRYEDALVLLLTEVLNRIQFRYNQAQLEELDDETLDDDQQTEWQRYLRQSLEVVAKVMELLPTHAFSTLFPVLQDNLEVYLGLQQFIVTSGSGHRLNITAENDCRRLHCSLRDLSSLLQAVGRLAEYFIGDVFAARFNDALTVVERLVKVTLYGSQIKLYNIETAVPSVLKPDLIDVHAQSLAALQAYSHWLAQYCSEVHRQNTQQFVTLISTTMDAITPLISTKVQDKLLLSACHLLVSLATTVRPVFLISIPAVQKVFNRITDASALRLVDKAQVLVCRALSNILLLPWPNLPENEQQWPVRSINHASLISALSRDYRNLKPSAVAPQRKMPLDDTKLIIHQTLSVLEDIVENISGESTKSRQICYQSLQESVQVSLALFPAFIHQSDVTDEMLSFFLTLFRGLRVQMGVPFTEQIIQTFLNMFTREQLAESILHEGSTGCRVVEKFLKILQVVVQEPGQVFKPFLPSIIALCMEQVYPIIAERPSPDVKAELFELLFRTLHHNWRYFFKSTVLASVQRGIAEEQMENEPQFSAIMQAFGQSFLQPDIHLFKQNLFYLETLNTKQKLYHKKIFRTAMLFQFVNVLLQVLVHKSHDLLQEEIGIAIYNMASVDFDGFFAAFLPEFLTSCDGVDANQKSVLGRNFKMDRDLPSFTQNVHRLVNDLRYYRLCNDSLPPGTVKL

SEQ ID NO: 11212 - protein, 161 aa, Homo sapiens [sequence omitted]

SEQ ID NO: 11213 - protein, 296 aa, Homo sapiens
MANVLCNRARLVSYLPGFCSLVKRVVNPKAFSTAGSSGSDESHVAAAPPDICSRTVWPDETMGPFGPQDQRFQLPGNIGFDCHLNGTASQKKSLVHKTLPDVLAEPLSSERHEFVMAQYVNEFQGNDAPVEQEINSAETYFESARVECAIQTCPELLRKDFESLFPEVANGKLMILTVTQKTKNDMTVWSEEVEIEREVLLEKFINGAKEICYALRAEGYWADFIDPSSGLAFFGPYTNNTLFETDERYRHLGFSVDDLGCCKVIRHSLWGTHVVVGSIFTNATPDSHIMKKLSGN

SEQ ID NO: 11214 - protein, 751 aa, Homo sapiens
MGQTGKKSEKGPVCWRKRVKSEYMRLRQLKRFRRADEVKSMFSSNRQKILERTEILNQEWKQRRIQPVHILTSVSSLRGTRECSVTSDLDFPTQVIPLKTLNAVASVPIMYSWSPLQQNFMVEDETVLHNIPYMGDEVLDQDGTFIEELIKNYDGKVHGDRECGFINDEIFVELVNALGQYNDDDDDDDGDDPEEREEKQKDLEDHRDDKESRPPRKFPSDKIFEAISSMFPDKGTAEELKEKYKELTEQQLPGALPPECTPNIDGPNAKSVQREQSLHSFHTLFCRRCFKYDCFLHRKCNYSFHATPNTYKRKNTETALDNKPCGPQCYQHLEGAKEFAAALTAERIKTPPKRPGGRRRGRLPNNSSRPSTPTINVLESKDTDSDREAGTETGGENNDKEEEEKKDETSSSSEANSRCQTPIKMKPNIEPPENVEWSGAEASMFRVLIGTYYDNFCAIARLIGTKTCRQVYEFRVKESSIIAPAPAEDVDTPPRKKKRKHRLWAAHCRKIQLKKDGSSNHVYNYQPCDHPRQPCDSSCPCVIAQNFCEKFCQCSSECQNRFPGCRCKAQCNTKQCPCYLAVRECDPDLCLTCGAADHWDSKNVSCKNCSIQRGSKKHLLLAPSDVAGWGIFIKDPVQKNEFISEYCGEIISQDEADRRGKVYDKYMCSFLFNLNNDFVVDATRKGNKIRFANHSVNPNCYAKVMMVNGDHRIGIFAKRAIQTGEELFFDYRYSQADALKYVGIEREMEIP

SEQ ID NO: 11215 - protein, 746 aa, Homo sapiens
MGQTGKKSEKGPVCWRKRVKSEYMRLRQLKRFRRADEVKSMFSSNRQKILERTEILNQEWKQRRIQPVHILTSVSSLRGTRECSVTSDLDFPTQVIPLKTLNAVASVPIMYSWSPLQQNFMVEDETVLHNIPYMGDEVLDQDGTFIEELIKNYDGKVHGDRECGFINDEIFVELVNALGQYNDDDDDDDGDDPEEREEKQKDLEDHRDDKESRPPRKFPSDKIFEAISSMFPDKGTAEELKEKYKELTEQQLPGALPPECTPNIDGPNAKSVQREQSLHSFHTLFCRRCFKYDCFLHPFHATPNTYKRKNTETALDNKPCGPQCYQHLEGAKEFAAALTAERIKTPPKRPGGRRRGRLPNNSSRPSTPTINVLESKDTDSDREAGTETGGENNDKEEEEKKDETSSSSEANSRCQTPIKMKPNIEPPENVEWSGAEASMFRVLIGTYYDNFCAIARLIGTKTCRQVYEFRVKESSIIAPAPAEDVDTPPRKKKRKHRLWAAHCRKIQLKKDGSSNHVYNYQPCDHPRQPCDSSCPCVIAQNFCEKFCQCSSECQNRFPGCRCKAQCNTKQCPCYLAVRECDPDLCLTCGAADHWDSKNVSCKNCSIQRGSKKHLLLAPSDVAGWGIFIKDPVQKNEFISEYCGEIISQDEADRRGKVYDKYMCSFLFNLNNDFVVDATRKGNKIRFANHSVNPNCYAKVMMVNGDHRIGIFAKRAIQTGEELFFDYRYSQADALKYVGIEREMEIP

SEQ ID NO: 11216 - protein, 707 aa, Homo sapiens
MGQTGKKSEKGPVCWRKRVKSEYMRLRQLKRFRRADEVKSMFSSNRQKILERTEILNQEWKQRRIQPVHILTSVSSLRGTREVEDETVLHNIPYMGDEVLDQDGTFIEELIKNYDGKVHGDRECGFINDEIFVELVNALGQYNDDDDDDDGDDPEEREEKQKDLEDHRDDKESRPPRKFPSDKIFEAISSMFPDKGTAEELKEKYKELTEQQLPGALPPECTPNIDGPNAKSVQREQSLHSFHTLFCRRCFKYDCFLHPFHATPNTYKRKNTETALDNKPCGPQCYQHLEGAKEFAAALTAERIKTPPKRPGGRRRGRLPNNSSRPSTPTINVLESKDTDSDREAGTETGGENNDKEEEEKKDETSSSSEANSRCQTPIKMKPNIEPPENVEWSGAEASMFRVLIGTYYDNFCAIARLIGTKTCRQVYEFRVKESSIIAPAPAEDVDTPPRKKKRKHRLWAAHCRKIQLKKDGSSNHVYNYQPCDHPRQPCDSSCPCVIAQNFCEKFCQCSSECQNRFPGCRCKAQCNTKQCPCYLAVRECDPDLCLTCGAADHWDSKNVSCKNCSIQRGSKKHLLLAPSDVAGWGIFIKDPVQKNEFISEYCGEIISQDEADRRGKVYDKYMCSFLFNLNNDFVVDATRKGNKIRFANHSVNPNCYAKVMMVNGDHRIGIFAKRAIQTGEELFFDYRYSQADALKYVGIEREMEIP

SEQ ID NO: 11217 - protein, 576 aa, Homo sapiens
MAHLRSPSGFGDPGKKDQKESEEELEEEEEEEEELEAPETFSEEYLWKVTDIGDYDDDFPDVRPRLASIVSPSLTSTFVPSQSATSTETPSASPPSSTSSHKSFPKIFQTFRKDMSEMSIDRNIHRNLSPGIPVSVQTEESWLQDLSDKVQSRKKASKEKAEPECLASKLREKWVINPEESKLNILYELEFKEDFITLFEPSLRTLPSIGPPSILAYKEESSNLGINFKDEEEETSPKCEFCGSDLRAFFSNVDVSSEPKGHASCCIAFQNLIDYIYEEQIKTKPPKAELIAIDPHAAHGSEVDRLKAKEKALQRKQEQRMARHFAIISREQTHFSEDDSKRLKTISYQLSVDIPEKQIIDDIVFDFQLRNSNMSIICCDSRIACGKVVRNELLEKHYKHGSKFLTSFPDGTTQIFYPSGNLAIIRVPNKVNGFTCIVQEDMPTNPAILAVLDSSGRSSCYHPNGNVWVYINILGGQYSDQAGNRIRAWNWSNSITSSPFVSFKPVFLALNRYIGVRILEQDKISITFLAMGQQARISVGTKVKLPNPEEIPILRYVSGDDLLLLASLIKIRRLFH

SEQ ID NO: 11218 - protein, 663 aa, Homo sapiens
MAHLRSPSGFGDPGKKDQKESEEELEEEEEEEEVEEEEEEVEEEEEEVEEEEEEVVEEELVGEEQELEAPETFSEEYLWKVTDIGDYDDDFPDVRPRLASIVSPSLTSTFVPSQSATSTETPSASPPSSTSSHKSFPKIFQTFRKDMSEMSIDRNIHRNLSPGIPVSVQTEESWLQDLSDKVQSRKKASKEKAEPECLASKLREKWVINPEESKLNILYELEFKEDFITLFEPSLRTLPSIGPPSILAYKEESSNLGINFKDEEEETSPKCEFCGSDLRAFFSNVDVSSEPKGHASCCIAFQNLIDYIYEEQIKTKPPKAELIAIDPHAAHGSEVDRLKAKEKALQRKQEQRMARHFAIISREQTHFSEDDSKRLKTISYQLSVDIPEKQIIDDIVFDFQLRNSNMSIICCDSRIACGKVVRNELLEKHYKHGSKFLTSFPDGTTQIFYPSGNLAIIRVPNKVNGFTCIVQEDMPTNPAILAVLDSSGRSSCYHPNGNVWVYINILGGQYSDQAGNRIRAWNWSNSITSSPFVSFKPVFLALNRYIGVRILEQDKISITFLAMGQQARISVGTKVKLPNPEEIPILRYVSGDDLLLLASLIKIRRLFHKLEGCVNFPSSQVWEKLKQPSYLSSLSLKLIALCHSSGIKQDIMKTIRNIINEEI

SEQ ID NO: 11219 - protein, 189 aa, Homo sapiens
MTDKTEKVAVDPETVFKRPRECDSPSYQKRQRMALLARKQGAGDSLIAGSAMSKEKKLMTGHAIPPSQLDSQIDDFTGFSKDRMMQKPGSNAPVGGNVTSSFSGDDLECRETASSPKSQREINADIKRKLVKELRCVGQKYEKIFEMLEGVQGPTAVRKRFFESIIKEAARCMRRDFVKHLKKKLKRMI

SEQ ID NO: 11220 - protein, 189 aa, Homo sapiens
MTDKTEKVAVDPETVFKRPRECDSPSYQKRQRMALLARKQGAGDSLIAGSAMSKAKKLMTGHAIPPSQLDSQIDDFTGFSKDRMMQKPGSNAPVGGNVTSSFSGDDLECRETASSPKSQQEINADIKRKLVKELRCVGQKYEKIFEMLEGVQGPTAVRKRFFESIIKEAARCMRRDFVKHLKKKLKRMI

SEQ ID NO: 11221 - protein, 189 aa, Homo sapiens
MTDKTEKVAVDPETVFKRPRECDSPSYQKRQRMALLARKQGAGDSLIAGSAMSKEKKLMTGHAIPPSQLDSQIDDFTGFSKDRMMQKPGSNAPVGGNVTSSFSGDDLECRETASSPKSQQEINADIKRKLVKELRCVGQKYEKIFEMLEGVQGPTAVRKRFFESIIKEAARCMRRDFVKHLKKKLKRMI

SEQ ID NO: 11222 - protein, 247 aa, Homo sapiens
MIRRCFQVAARLGHHRGLLEAPRILPRLNPASAFGSSTDSMFSRFLPEKTDLKDYALPNASWCSDMLSLYQEFLEKTKSSGWIKLPSFKSNRDHIRGLKLPSGLAVSSDKGDCRIFTRCIQVEGQGFEYVIFFQPTQKKSVCLFQPGSYLEGPPGFAHGGSLAAMMDETFSKTAFLAGEGLFTLSLNIRFKNLIPVDSLVVMDVEVDKIEDQKLYMSCIAHSRDQQTVYAKSSGVFLQLQLEEESPQ

SEQ ID NO: 11223 - protein, 153 aa, Homo sapiens
MPSSPLRVAVVCSSNQNRSMEAHNILSKRGFSVRSFGTGTHVKLPGPAPDKPNVYDFKTTYDQMYNDLLRKDKELYPSGLPFKNPPCGPPWKVLRVARAQEACHPVQCTHWLLCLCESLVSIPGARRIVHGLVPVPPMAVGVVRRTDTVWGSP

SEQ ID NO: 11224 - protein, 194 aa, Homo sapiens
MPSSPLRVAVVCSSNQNRSMEAHNILSKRGFSVRSFGTGTHVKLPGPAPDKPNVYDFKTTYDQMYNDLLRKDKELYTQNGILHMLDRNKRIKPRPERFQNCKDLFDLILTCEERVYDQVVEDLNSREQETCQPVHVVNVDIQDNHEEATLGAFLICELCQCIQHTEDMENEIDELLQEFEEKSGRTFLHTVCFY

SEQ ID NO: 11225 - protein, 847 aa, Homo sapiens
MSFSEMNRRTLAFRGGGLVTASGGGSTNNNAGGEASAWPPQPQPRQPPPTAPPALQPPNGRGADEEVELEGLEPQDLEASAGPAAGAAEEAKELLLPQDAGGPTSLGGGAGGPLLAERNRRTLAFRGGGGGGLGNNGSSRGRPETSVWPLRHFNGRGPATVDLELDALEGKELIQDGASLSDSTEDEEEGASLGDGSGAEGGSCSSSRRSGGDGGDEVEGSGVGAGEGETVQHFPLARPKSLMQKLQCSFQTSWLKDFPWLRYSKDTGLMSCGWCQKTPADGGSVDLPPVGHDELSRGTRNYKKTLLLRHHVSTEHKLHEANAPESEIPSEEGYWDFNRRPNENSYCYQLLRQLNEQRKKGILCDVSIVVSGKIFKAHKNILVAGSRFFKTLYCFSNKESPNQNNTTHLDIAAVQGFSVILDFLYSGNLVLTSQNAIEVMTVASYLQMSEVVQTCRNFIKDALNISIKSEAPESVVVDYNNRKPVNRDGLSSSRDQKIASFWATRNLTNLASNVKIENDGCNVDEGQIENYQMNDSSWVQDGSPEMAENESEGQTKVFIWNNMGSQGIQETGKTRRKNQTTKRFIYNIPPNNETNLEDCSVMQPPVAYPEENTLLIKEEPDLDGALLSGPDGDRNVNANLLAEAGTSQDGGDAGTSHDFKYGLMPGPSNDFKYGLLPESWPKQETWENGESSLIMNKLKCPHCSYVAKYRRTLKRHLLIHTGVRSFSCDICGKLFTRREHVKRHSLVHKKDKKYKCMVCKKIFMLAASVGIRHGSRRYGVCVDCADKSQPGGQEGVDQGQDTEFPRDEEYEENEVGEADEELVDDGEDQNDPSRWDESGEVCMSLDD

SEQ ID NO: 11226 - protein, 510 aa, Homo sapiens
MMAAAPIQQNGTHTGVPIDLDPPDSRKRPLEAPPEAGSTKRTNTGEDGQYFLKVLIPSYAAGSIIGKGGQTIVQLQKETGATIKLSKLSKSKDFYPGTTERVCLIQGTVEALNAVHGFIAEKIREMPQNVAKTEPVSILQPQTTVNPDRIKQTLPSSPTTTKSSPSDPMTTSRANQVKIIVPNSTAGLIIGKGGATVKAVMEQSGAWVQLSQKPDGINLQERVVTVSGEPEQNRKAVELIIQKIQEDPQSGSCLNISYANVTGPVANSNPTGSPYANTAEVLPTAAAAAGLLGHANLAGVAAFPAVLSGFTGNDLVAITSALNTLASYGYNLNTLGLGLSQAAATGALAAAAASANPAAAAANLLATYASEASASGSTAGGTAGTFALGSLAAATAATNGYFGAASPLAASAILGTEKSTDGSKDVVEIAVPENLVGAILGKGGKTLVEYQELTGARIQISKKGEFVPGTRNRKVTITGTPAATQAAQYLITQRITYEQGVRAANPQKVG

SEQ ID NO: 11227 - protein, 486 aa, Homo sapiens
MMAAAPIQQNGTHTGVPIDLDPPDSRKRPLEAPPEAGSTKRTNTGEDGQYFLKVLIPSYAAGSIIGKGGQTIVQLQKETGATIKLSKLSKSKDFYPGTTERVCLIQGTVEALNAVHGFIAEKIREMPQNVAKTEPVSILQPQTTVNPDRIKQVKIIVPNSTAGLIIGKGGATVKAVMEQSGAWVQLSQKPDGINLQERVVTVSGEPEQNRKAVELIIQKIQEDPQSGSCLNISYANVTGPVANSNPTGSPYANTAEVLPTAAAAAGLLGHANLAGVAAFPAVLSGFTGNDLVAITSALNTLASYGYNLNTLGLGLSQAAATGALAAAAASANPAAAAANLLATYASEASASGSTAGGTAGTFALGSLAAATAATNGYFGAASPLAASAILGTEKSTDGSKDVVEIAVPENLVGAILGKGGKTLVEYQELTGARIQISKKGEFVPGTRNRKVTITGTPAATQAAQYLITQRITYEQGVRAANPQKVG

SEQ ID NO: 11228 - protein, 181 aa, Homo sapiens
MMAAAPIQQNGTHTGVPIDLDPPDSRKRPLEAPPEAGSTKRTNTGEDGQYFLKVLIPSYAAGSIIGKGGQTIVQLQKETGATIKLSKSKDFYPGTTERVCLIQGTVEALNAVHGFIAEKIREMPQNVAKTEPVSILQPQTTVNPDRIKQTLPSSPTTTKSSPSDPMTTSRANQKHNISWIS

SEQ ID NO: 11229 - protein, 876 aa, Homo sapiens
MAEEEGRLHSVQGLLSLQDLQNVNTPLMRKLARLKLGLVEMALDMLQFIWEEAHGQQSEQGSLEKLLADYLQNTSDYTSVGLQWFTLKRTLAHGALAQLGSLQPLSVGCVEIRARLLGLAGRALHLLAMQADPVHPTCYWEAGPSVGAKLSGLKSLELEVEEEGATKSSRDPPASRAAPEEHCRRGEDLKRRMVLAQQYLAQASEVLLQCLQVALGSGLLDVAAAASLEMVECVGTLDPATTCQFLALSQSCSASETMRDVLLAATANTSSSQLAALLQLQHQLRCQDRTTTSLGARVEQRLAAVSKAWQNLCVTEQHFNLLNEMPPTFWILFLHLSGDRSRLYGAAYEKPKFITAAKGKVQAVGGSCKVMRLAISPTAFSHLLACAQQFRKQTQAQVYSEDMALNIGSEPEGLQVEEKERPVQRLSSVLGPLEELLQPLFPLLSLSKARVQTPAVVADSGKSKGKDKERKTSTGQHSTVQPEVADKIVLVTDRHLLELPLEGLSVFDEGTISSVSREFSLQMLWNRLHKEETEGGVKKEGRSRDPKKRSLAKKGRKGSIPRTIPPDCIIVDSDNFKFVVDPYEEAQGPEMLTPVSITQDILERFQDTFTSRWAGHLGSKHFPSQAQWEQALGSCSGFFFYGMESFLSHILVERLVAMNLQECQVAVLLDLARSYQSLKRHMESVEHRRSVGRWEANWRNGASPSEDEWRRGGEPRRGFSDLEGQAAAAPKLRAPSHHAQLGPVWAAAPSHRVVQAWTCLPSAAGAPALASALGSAPLPTHPHLPAPIPSSQLALPFLGLSPALGAASARDPPPATSRKAAAWTSSSACLCAPWGLRRGWSCVSSRGQDKGGLPLAALVLSCLDQKTIQTVSLFLI

SEQ ID NO: 11230 - protein, 824 aa, Homo sapiens [sequence omitted]

SEQ ID NO: 11231 - protein, 700 aa, Homo sapiens
MNKDYQKFWSSPSDPVHFEVDTSHEKVESMSESDTMNVSNLSQGVMLSHSPICMETTGTTCDLPQNEIKNFERENEYESTLCEDAYGTLDNLLNDNNIENYSTNALIQPVDTISISSLRQFETVCKFHWVEAFDDEMTEKPEFQSQVYNYAKDNNIKQDSFKEENPMETSVSANTDQLGNEYFRQPPPRSPPLIHCSGEMLKFTEKSLAKSIAKESALNPSQPPSFLCKTAVPSKEIQNYGEIPEMSVSYEKEVTAEGVERPEIVSTWSSAGISWRSEACRENCEMPDWEQSAESLQPVQEDMALNEVLQKLKHTNRKQEVRIQELQCSNLYLEKRVKELQMKITKQQVFIDVINKLKENVEELIEDKYKIILEKNDTKKTLQNLEEVLANTQKHLQESRNDKEMLQLQFKKIKANYVCLQERYMTEMQQKNKSVSQYLEMDKTLSKKEEEVERLQQLKKELEKATASALDLLKREKEAQEQEFLSLQEEFQKLEKENLEERQKLKSRLEKLLTQVRNLQFMSENERTKNIKLQQQINEVKNENAKLKQQVARSEEQNYVPKFETAQLKDQLEEVLKSDITKDTKTTHSNLLPDCSPCEERLNPADIKRASQLASKMHSLLALMVGLLTCQDIINSDAEHFKESEKVSDIMLQKLKSLHLKKKTLDKELLKHKDRITTFRELIAKEKAFQDHAIKVFQGV

SEQ ID NO: 11232 - protein, 193 aa, Homo sapiens
MSDDDSRASTSSSSSSSSNQQTEKETNTPKKKESKVSMSKNSKLLSTSAKRIQKELADITLDPPPNCSAGPKGDNIYEWRSTILGPPGSVYEGGVFFLDITFTPEYPFKPPKVTFRTRIYHCNINSQGVICLDILKDNWSPALTISKVLLSICSLLTDCNPADPLVGSIATQYMTNRAEHDRMARQWTKRYAT

SEQ ID NO: 11233 - protein, 212 aa, Homo sapiens
MEISMPPPQIYVEKTLAIIKPDIVDKEEEIQDIILRSGFTIVQRRKLRLSPEQCSNFYVEKYGKMFFPNLTAYMSSGPLVAMILARHKAISYWLELLGPNNSLVAKETHPDSLRAIYGTDDLRNALHGSNDFAAAEREIRFMFPEVIVEPIPIGQAAKDYLNLHIMPTLLEGLTELCKQKPADPLIWLADWLLKNNPNKPKLCHHPIVEEPY

SEQ ID NO: 11234 - protein, 329 aa, Homo sapiens
MTHFNKGPSYGLSAEVKNKIASKYDHQAEEDLRNWIEEVTGMSIGPNFQLGLKDGIILCELINKLQPGSVKKVNESSLNWPQLENIGNFIKAIQAYGMKPHDIFEANDLFENGNMTQVQTTLVALAGLAKTKGFHTTIDIGVKYAEKQTRRFDEGKLKAGQSVIGLQMGTNKCASQAGMTAYGTRRHLYDPKMQTDKPFDQTTISLQMGTNKGASQAGMLAPGTRRDIYDQKLTLQPVDNSTISLQMGTNKVASQKGMSVYGLGRQVYDPKYCAAPTEPVIHNGSQGTGTNGSEISDSDYQAEYPDEYHGEYQDDYPRDYQYSDQGIDY

SEQ ID NO: 11235 - protein, 889 aa, Homo sapiens
MSREEKQKLGNQVLEMFDHAYGNYMEHAYPADELMPLTCRGRVRGQEPSRGDVDDALGKFSLTLIDSLDTLVVLNKTKEFEDAVRKVLRDVNLDNDVVVSVFETNIRVLGGLLGGHSLAIMLKEKGEYMQWYNDELLQMAKQLGYKLLPAFNTTSGLPYPRINLKFGIRKPEARTGTETDTCTACAGTLILEFAALSRFTGATIFEEYARKALDFLWEKRQRSSNLVGVTINIHTGDWVRKDSGVGAGIDSYYEYLLKAYVLLGDDSFLERFNTHYDAIMRYISQPPLLLDVHIHKPMLNARTWMDALLAFFPGLQVLKGDIRPAIETHEMLYQVIKKHNFLPEAFTTDFRVHWAQHPLRPEFAESTYFLYKATGDPYYLEVGKTLIENLNKYARVPCGFAAMKDVRTGSHEDRMDSFFLAEMFKYLYLLFADKEDIIFDIEDYIFTTEAHLLPLWLSTTNQSISKKNTTSEYTELDDSNFDWTCPNTQILFPNDPLYAQSIREPLKNVVDKSCPRGIIRVEESFRSGAKPPLRARDFMATNPEHLEILKKMGVSLIHLKDGRVQLVQHAIQAASSIDAEDGLRFMQEMIELSSQQQKEQQLPPRAVQIVSHPFFGRVVLTAGPAQFGLDLSKHKETRGFVASSKPSNGCSELTNPEAVMGKIALIQRGQCMFAEKARNIQNAGAIGGIVIDDNEGSSSDTAPLFQMAGDGKDTDDIKIPMLFLFSKEGSIILDAIREYEEVEVLLSDKAKDRDPEMENEEQPSSENDSQNQSGEQISSSSQEVDLVDQESSEENSLNSHPESLSLADMDNAASISPSEQTSNPTENHETTNLNGECTDLDNQLQEQSETEEDSNPNVSWGKKVQPIDSILADWNEDIEAFEMMEKDEL

SEQ ID NO: 11236 - protein, 432 aa, Homo sapiens
MLFEQGQQALELPECTMQKAAYYENPGLFGGYGYSKTTDTYGYSTPHQPYPPPAAASSLDTDYPGSACSIQSSAPLRAPAHKGAELNGSCMRPGTGNSQGGGGGSQPPGLNSEQQPPQPPPPPPTLPPSSPTNPGGGVPAKKPKGGPNASSSSATISKQIFPWMKESRQNSKQKNSCATAGESCEDKSPPGPASKRVRTAYTSAQLVELEKEFHFNRYLCRPRRVEMANLLNLTERQIKIWFQNRRMKYKKDQKAKGILHSPASQSPERSPPLGGAAGHVAYSGQLPPVPGLAYDAPSPPAFAKSQPNMYGLAAYTAPLSSCLPQQKRYAAPEFEPHPMASNGGGFASANLQGSPVYVGGNFVESMAPASGPVFNLGHLSHPSSASVDYSCAAQIPGNHHHGPCDPHPTYTDLSAHHSSQGRLPEAPKLTHL

SEQ ID NO: 11237 - protein, 439 aa, Homo sapiens
MYNKKAKMEPNASESAIPARRQRQPRAKKKSKPLNLKIHSSVGSCENIPSQQRSPLLSERSLRSFFVGHAPFLPSTPPVHTEANFSANTLSVPRWSPQIPRRDLGNSIKHRFSTKYWMSQTCTVCGKGMLFGLKCKNCKLKCHNKCTKEAPPCHLLIIHRGDPARLVRTESVPCDINNPLRKPPRYSDLHISQTLPKTNKINKDHIPVPYQPDSSSNPSSTTSSTPSSPAPPLPPSATPPSPLHPSPQCTRQQKNFNLPASHYYKYKQQFIFPDVVPVPETPTRAPQVILHPVTSNPILEGNPLLQIEVEPTSENEEVHDEAEESEDDFEEMNLSLLSARSFPRKASQTSIFLQEWDIPFEQLEIGELIGKGRFGQVYHGRWHGEVAIRLIDIERDNEDQLKAFKREVMAYRQTRHENVVLFMGACMSPPHLAIITRPV

SEQ ID NO: 11238 - protein, 360 aa, Homo sapiens
MVTQILGAMESQVGGGPAGPALPNGPLLGTNGATDDSKTNLIVNYLPQNMTQDEFKSLFGSIGDIESCKLVRDKITGQSLGYGFVNYSDPNDADKAINTLNGLKLQTKTIKVSYARPSSASIRDANLYVSGLPKTMSQKEMEQLFSQYGRIITSRILVDQVTGVSRGVGFIRFDKRIEAEEAIKGLNGQKPLGAAEPITVKFANNPSQKTGQALLTHLYQSSARRYAGPLHHQTQRFRLDNLLNMAYGVKRFSPIAIDGMSGLAGVGLSGGAAGAGWCIFVYNLSPEADESVLWQLFGPFGAVTNVKVIRDFTTNKCKGFGFVTMTNYDEAAMAIASLNGYRLGERVLQVSFKTSKQHKA

SEQ ID NO: 11239 - protein, 367 aa, Homo sapiens
MVTQILGAMESQVGGGPAGPALPNGPLLGTNGATDDSKTNLIVNYLPQNMTQDEFKSLFGSIGDIESCKLVRDKITGQSLGYGFVNYSDPNDADKAINTLNGLKLQTKTIKVSYARPSSASIRDANLYVSGLPKTMSQKEMEQLFSQYGRIITSRILVDQVTGVSRGVGFIRFDKRIEAEEAIKGLNGQKPLGAAEPITVKFANNPSQKTGQALLTHLYQSSARRYAGPLHHQTQRFRLDNLLNMAYGVKSPLSLIARFSPIAIDGMSGLAGVGLSGGAAGAGWCIFVYNLSPEADESVLWQLFGPFGAVTNVKVIRDFTTNKCKGFGFVTMTNYDEAAMAIASLNGYRLGERVLQVSFKTSKQHKA

SEQ ID NO: 11240 - protein, 340 aa, Homo sapiens
MGKDYYQTLGLARGASDEEIKRAYRRQALRYHPDKNKEPGAEEKFKEIAEAYDVLSDPRKREIFDRYGEEGLKGSGPSGGSGGGANGTSFSYTFHGDPHAMFAEFFGGRNPFDTFFGQRNGEEGMDIDDPFSGFPMGMGGFTNVNFGRSRSAQEPARKKQDPPVTHDLRVSLEEIYSGCTKKMKISHKRLNPDGKSIRNEDKILTIEVKKGWKEGTKITFPKEGDQTSNNIPADIVFVLKDKPHNIFKRDGSDVIYPARISLREALCGCTVNVPTLDGRTIPVVFKDVIRPGMRRKVPGEGLPLPKTPEKRGDLIIEFEVIFPERIPQTSRTVLEQVLPI

SEQ ID NO: 11241 - protein, 360 aa, Homo sapiens
MFVARSIAADHKDLIHDVSFDFHGRRMATCSSDQSVKVWDKSESGDWHCTASWKTHSGSVWRVTWAHPEFGQVLASCSFDRTAAVWEEIVGESNDKLRGQSHWVKRTTLVDSRTSVTDVKFAPKHMGLMLATCSADGIVRIYEAPDVMNLSQWSLQHEISCKLSCSCISWNPSSSRAHSPMIAVGSDDSSPNAMAKVQIFEYNENTRKYAKAETLMTVTDPVHDIAFAPNLGRSFHILAIATKDVRIFTLKPVRKELTSSGGPTKFEIHIVAQFDNHNSQVWRVSWNITGTVLASSGDDGCVRLWKANYMDNWKCTGILKGNGSPVNGSSQQGTSNPSLGSNIPSLQNSLNGSSAGRKHS

SEQ ID NO: 11242 - protein, 657 aa, Homo sapiens
MIESQEPVTFEDVAVDFTQEEWQQLNPAQKTLHRDVMLETYNHLVSVGCSGIKPDVIFKLEHGKDPWIIESELSRWIYPDRVKGLESSQQIISGELLFQREILERAPKDNSLYSVLKIWHIDNQMDRYQGNQDRVLRQVTVISRETLTDEMGSKYSAFGKMFNRCTDLAPLSQKFHKFDSCENSLKSNSDLLNYNRSYARKNPTKRFRCGRPPKYNASCSVPEKEGFIHTGMEPYGDSQCEKVLSHKQAHVQYKKFQAREKPNVCSMCGKAFIKKSQLIIHQRIHTGEKPYVCGDCRKAFSEKSHLIVHQRIHTGEKPYECTKYGRAFSRKSPFTVHQRVHTGEKPYECFECPKAFSQKSHLIIHQRVHTREKPFECSECRKAFCEMSHLFIHQITHTGKKPYECTECGKTFPRKTQLIIHQRTHTGEKPYKCGECGKTFCQQSHLIGHQRIHTGEKPYVCTDCGKAFSQKSHLTGHQRLHTGEKPYMCTECGKSFSQKSPLIIHQRIHTGEKPYQCGECGKTFSQKSLLIIHLRVHTGEKPYECTECGRAFSLKSHLILHQRGHTGEKPYECSECGKAFCGKSPLIIHQKTHPREKTPECAESGMTFFWKSQMITYQRRHTGEKPSRCSDCGKAFCQHVYFTGHQNPYRKDTLYIC

SEQ ID NO: 11243 - protein, 157 aa, Homo sapiens
MSAPFEERSGVVPCGTPWGQWYQTLEEVFIEVQVPPGTRAQDIQCGLQSRHVALSVGGREILKGKLFDSTIADEGTWTLEDRKMVRIVLTKTKRDAANCWTSLLESEYAADPWVQDQMQRKLTLERFQKENPGFDFSGAEISGNYTKGGPDFSNLEK

SEQ ID NO: 11244 - protein, 519 aa, Homo sapiens
MALAPWGPVKVKKEEEEEENFPGQASSQQVHSENIKVWAPVQGLQTGLDGSEEEEKGQNISWDMAVVLKATQEAPAASTLGSYSLPGTLAKSEILETHGTMNFLGAETKNLQLLVPKTEICEEAEKPLIISERIQKADPQGPELGEACEKGNMLKRQRIKREKKDFRQVIVNDCHLPESFKEEENQKCKKSGGKYSLNSGAVKNPKTQLGQKPFTCSVCGKGFSQSANLVVHQRIHTGEKPFECHECGKAFIQSANLVVHQRIHTGQKPYVCSKCGKAFTQSSNLTVHQKIHSLEKTFKCNECEKAFSYSSQLARHQKVHITEKCYECNECGKTFTRSSNLIVHQRIHTGEKPFACNDCGKAFTQSANLIVHQRSHTGEKPYECKECGKAFSCFSHLIVHQRIHTAEKPYDCSECGKAFSQLSSLIVHQRIHSGDLPYVCNECGKAFTCSSYLLIHQRIHNGEKPYTCNECGKAFRQRSSLTVHQRTHTGEKPYECEKCGAAFISNSHLMRHHRTHLVE

SEQ ID NO: 11245 - protein, 634 aa, Homo sapiens
METPSQRRATRSGAQASSTPLSPTRITRLQEKEDLQELNDRLAVYIDRVRSLETENAGLRLRITESEEVVSREVSGIKAAYEAELGDARKTLDSVAKERARLQLELSKVREEFKELKARNTKKEGDLIAAQARLKDLEALLNSKEAALSTALSEKRTLEGELHDLRGQVAKLEAALGEAKKQLQDEMLRRVDAENRLQTMKEELDFQKNIYSEELRETKRRHETRLVEIDNGKQREFESRLADALQELRAQHEDQVEQYKKELEKTYSAKLDNARQSAERNSNLVGAAHEELQQSRIRIDSLSAQLSQLQKQLAAKEAKLRDLEDSLARERDTSRRLLAEKEREMAEMRARMQQQLDEYQELLDIKLALDMEIHAYRKLLEGEEERLRLSPSPTSQRSRGRASSHSSQTQGGGSVTKKRKLESTESRSSFSQHARTSGRVAVEEVDEEGKFVRLRNKSNEDQSMGNWQIKRQNGDDPLLTYRFPPKFTLKAGQVVTIWAAGAGATHSPPTDLVWKAQNTWGCGNSLRTALINSTGEGSHCSSSGDPAEYNLRSRTVLCGTCGQPADKASASGSGAQVGGPISSGSSASSVTVTRSYRSVGGSGGGSFGDNLVTRSYLLGNSSPRTQSPQNCSIM

SEQ ID NO: 11246 - protein, 122 aa, Homo sapiens
MEAARARPLGSGILAKAGQKALWPGDLNGSGSGWATPIRPHEGHRESTLGLRLRGVRCLGHVTLRQGMPSLNLALHLGPHFTSSLRFTREKLRPCLLLGKPRIREAQGCAWRRALCPSNQRM

SEQ ID NO: 11247 - protein, 499 aa, Homo sapiens
MSLADELLADLEEAAEEEEGGSYGEEEEEPAIEDVQEETQLDLSGDSVKTIAKLWDSKMFAEIMMKIEEYISKQAKASEVMGPVEAAPEYRVIVDANNLTVEIENELNIIHKFIRDKYSKRFPELESLVPNALDYIRTVKELGNSLDKCKNNENLQQILTNATIMVVSVTASTTQGQQLSEEELERLDEACDMALELNASKHRIYEYVESRMSFIAPNLSIIIGASTAAKIMGVAGGLTNLSKMPACNIMLLGAQRKTLSGFSSTSVLPHTGYIYHSDIVQSLPPDLRRKAARLVAAKCTLAARVDSFHESTEGKVGYELKDEIERKFDKWQEPPPVKQVKPLPAPLDGQRKKRGGRRYRKMKERLGLTEIRKQANRMSFGEIEEDAYQEDLGFSLGHLGKSGSGRVRQTQVNEATKARISKTLQRTLQKQSVVYGGKSTIRDRSSGTASSVAFTPLQGLEIVNPQAAEKKVAEANQKYFSSMAEFLKVKGEKSGLMST

SEQ ID NO: 11248 - protein, 364 aa, Homo sapiens
MSLADELLADLEEAAEEEEGGSYGEEEEEPAIEDVQEETQLDLSGDSVKTIAKLWDSKMFAEIMMKIEEYISKQAKASEVMGPVEAAPEYRVIVDANNLTVEIENELNIIHKFIRDKYSKRFPELESLVPNALDYIRTVKELGNSLDKCKNNENLQQILTNATIMVVSVTASTTQGQQLSEEELERLEEACDMALELNASKHRIYEYVESRMSFIAPNLSIIIGASTAAKIMGVAGGLTNLSKMPACNIMLLGAQRKTLSGFSSTSVLPHTGYIYHSDIVQSLPPDLRRKAARLVAAKCTLAARVDSFHESTEGKVGYELKDEIERKFDKWQRRRWLRPTRSISPAWLSSSRSRARRVALCPPE

SEQ ID NO: 11249 - protein, 142 aa, Homo sapiens
MAAGGSDPRAGDVEEDASQLIFPKEFETAETLLNSEVHMLLEHRKQQNESAEDEQELSEVFMKTLNYTARFSRFKNRETIASVRSLLLQKKLHKFELACLANLCPETAEESKALIPSLEGRFEDEELQQILDDIQTKRSFQY

SEQ ID NO: 11250 - protein, 840 aa, Homo sapiens
MSVVGIDLGFQSCYVAVARAGGIETIANEYSDRCTPACISFGPKNRSIGAAAKSQVISNAKNTVQGFKRFHGRAFSDPFVEAEKSNLAYDIVQLPTGLTGIKVTYMEEERNFTTEQVTAMLLSKLKETAESVLKKPVVDCVVSVPCFYTDAERRSVMDATQIAGLNCLRLMNETTAVALAYGIYKQDLPALEEKPRNVVFVDMGHSAYQVSVCAFNRGKLKVLATAFDTTLGGRKFDEVLVNHFCEEFGKKYKLDIKSKIRALLRLSQECEKLKKLMSANASDLPLSIECFMNDVDVSGTMNRGKFLEMCNDLLARVEPPLRSVLEQTKLKKEDIYAVEIVGGATRIPAVKEKISKFFGKELSTTLNADEAVTRGCALQCAILSPAFKVREFSITDVVPYPISLRWNSPAEEGSSDCEVFSKNHAAPFSKVLTFYRKEPFTLEAYYSSPQDLPYPDPAIAQFSVQKVTPQSDGSSSKVKVKVRVNVHGIFSVSSASLVEVHKSEENEEPMETDQNAKEEEKMQVDQEEPHVEEQQQQTPAENKAESEEMETSQAGSKDKKMDQPPQAKKAKVKTSTVDLPIENQLLWQIDREMLNLYIENEGKMIMQDKLEKERNDAKNAVREYVYEMRDKLSGEYEKFVSEDGRNSFTLKLEDTENWLYEDGEDQPKQVYVDKLAELKNLGQPIKIRFQESEERPKLFEELGKQIQQYMKIISSFKNKEDQYDHLDAADMTKVEKSTNEAMEWMNNKLNLQNKQSLTMDPVVKSKEIEAKIKELTSTCSPIISKPKPKVEPPKEEQKNAEQNGPVDGQGDNPGPQAAEQGTDTAVPSDSDKKLPEMDID

SEQ ID NO: 11251 - protein, 148 aa, Homo sapiens
MSVVGIDLGFQSCYVAVARAGGIETIANEYSDRCTPACISFGPKNRSIGAAAKSQVISNAKNTVQGFKRFHGRAFSDPFVEAEKSNLAYDIVQLPTGLTGIKVTYMEEEQNGPVDGQGDNPGPQAAEQGTDTAVPSDSDKKLPEMDID

SEQ ID NO: 11252 - protein, 1327 aa, Homo sapiens
MEIEEESAEKIQFLKSSGTSLLSTDSLETNELVVSELNHSSLGVGLDTLEEQEEKEQFFARLEKGLTSSIDYSRLNKELDSNDSTHFKALHINQANAELTDDEHENESKHEELAENYSDDFEDEYVGAPLTTKDEEMPSKENSKSEKISVPKQEEEKTGMLANVVLLDSLDSVAEVNLDEQDKITPKPRCLPEMTENEMTGTGVSYGQSSSDVEALHQAYCHIAHSLGDEDKQKIESNTVEDIKSSVKGHPQENEENSKNISTMESDLPTVEELMKPIRIDSFGISGFDLQPVSSEKVAERKETEFFSSLPLKMNPNILSQDSQHVNLFFDKNDENVILQKTTNESMENSCPQVTEVTATEEHVDKMYLNILRKKITVNSSSLSQDDKINKTYRSQLSSEEEGAVMGKQVPYKKARSAPPLLKRKPQSGLYASVRSSGYGKPSSPLKMFSTLEKKTSEDIIKSKNLRSISTSNQPRKKEILSGTKLIKPAALDKPAHKTESCLSTRKKSENPTETDSCIQFQTDSLGYCGENKEKKLLMFKRVQEAEDKWRGAQALIEQIKATFSEKEKELENKLEELKKQQEKELFKLNQDNYILQAKLSSFEETNKKQRWLHFGEAADPVTGEKLKQIQKEIQEQETLLQGYQQENERLYNQVKDLQEQNKKNEERMFKENQSLFSEVASLKEQMHKSRFLSQVVEDSEPTRNQNFTDLLAELRMAQKEKDSLLEDIKRLKQDKQALEVDFEKMKKERDQAKDQIAYVTGEKLYEIKILEETHKQEISRLQKRLQWYAENQELLDKDALRLREANEEIEKLKLEIEKLKAESGNPSIRQKIRLKDKAADAKKIQDLERQVKEMEGILKRRYPNSLPALILAASAAGDTVDKNTVEFMEKRIKKLEADLEGKDEDAKKSLRTMEQQFQKMKIQYEQRLEQQEQLLACKLNQHDSPRIKALEKELDDIKEAHQITVRNLEAEIDVLKHQNAELDVKKNDKDDEDFQSIEFQVEQAHAKAKLVRLNEELAAKKREIQDLSKTVERLQKDRRMMLSNQNSKGREEMSAKRAKKDVLHSSKGNANSFPGTLDSKLYQPHTFTDSHVSEVLQENYRLKNELEGLISEKNELKMKSEAVMNQFENSMRRVKEDTAAHIASLKASHQREIEKLLCQNAVENSSSKVAELNRKIATQEVLIRHFQSQVNELQSKQESLVVSEVREEILQKEITKLLEELREAKENHTPEMKHFVGLEKKIKQMEMRHAQREQELQQIIQQTHQVVETEQNKEVEKWKRLAQLKNRELEKFRTELDSILDVLRELHRQGVVVPVAFADEMNAPEY

SEQ ID NO: 11253 - protein, 879 aa, Homo sapiens
MAGGGGDLSTRRLNECISPVANEMNHLPAHSHDLQRMFTEDQGVDDRLLYDIVFKHFKRNKVEISNAIKKTFPFLEGLRDRDLITNKMFEDSQDSCRNLVPVQRVVYNVLSELEKTFNLPVLEALFSDVNMQEYPDLIHIYKGFENVIHDKLPLQESEEEEREERSGLQLSLEQGTGENSFRSLTWPPSGSPSHAGTTPPENGLSEHPCETEQINAKRKDTTSDKDDSLGSQQTNEQCAQKAEPTESCEQIAVQVNNGDAGREMPCPLPCDEESPEAELHNHGIQINSCSVRLVDIKKEKPFSNSKVECQAQARTHHNQASDIIVISSEDSEGSTDVDEPLEVFISAPRSEPVINNDNPLESNDEKEGQEATCSRPQIVPEPMDFRKLSTFRESFKKRVIGQDHDFSESSEEEAPAEASSGALRSKHGEKAPMTSRSTSTWRIPSRKRRFSSSDFSDLSNGEELQETCSSSLRRGSGSQPQEPENKKCSCVMCFPKGVPRSQEARTESSQASDMMDTMDVENNSTLEKHSGKRRKKRRHRSKVNGLQRGRKKDRPRKHLTLNNKVQKKRWQQRGRKANTRPLKRRRKRGPRIPKDENINFKQSELPVTCGEVKGTLYKERFKQGTSKKCIQSEDKKWFTPREFEIEGDRGASKNWKLSIRCGGYTLKVLMENKFLPEPPSTRKKRILESHNNTLVDPCEEHKKKNPDASVKFSEFLKKCSETWKTIFAKEKGKFEDMAKADKAHYEREMKTYIPPKGEKKKKFKDPNAPKRPPLAFFLFCSEYRPKIKGEHPGLSIDDVVKKLAGMWNNTAAADKQFYEKKAAKLKEKYKKDIAAYRAKGKPNSAKKRVVKAEKSKKKKEEEEDEEDEQEEENEEDDDK

SEQ ID NO: 11254 - protein, 886 aa, Homo sapiens
MAGGGGDLSTRRLNECISPVANEMNHLPAHSHDLQRMFTEDQGVDDRLLYDIVFKHFKRNKVEISNAIKKTFPFLEGLRDRDLITNKMFEDSQDSCRNLVPVQRVVYNVLSELEKTFNLPVLEALFSDVNMQEYPDLIHIYKGFENVIHDKLPLQESEEEEREERSGLQLSLEQGTGENSFRSLTWPPSGSPSHAGTTPPENGLSEHPCETEQINAKRKDTTSDKDDSLGSQQTNEQCAQKAEPTESCEQIAVQVNNGDAGREMPCPLPCDEESPEAELHNHGIQINSCSVRLVDIKKEKPFSNSKVECQAQARTHHNQASDIIVISSEDSEGSTDVDEPLEVFISAPRSEPVINNDNPLESNDEKEGQEATCSRPQIVPEPMDFRKLSTFRESFKKRVIGQDHDFSESSEEEAPAEASSGALRSKHGEKAPMTSRSTSTWRIPSRKRRFSSSDFSDLSNGEELQETCSSSLRRGSGSQPQEPENKKCSCVMCFPKGVPRSQEARTESSQASDMMDTMDVENNSTLEKHSGKRRKKRRHRSKVNGLQRGRKKDRPRKHLTLNNKVQKKRWQQRGRKANTRPLKRRRKRGPRIPKDENINFKQSELPVTCGEVKGTLYKERFKQGTSKKCIQSEDKKWFTPREFEIEGDRGASKNWKLSIRCGGYTLKVLMENKFLPEPPSTRKKRILESHNNTLVDPCPENSNICEVCNKWGRLFCCDTCPRSFHEHCHIPSVEANKNPWSCIFCRIKTIQERCPESQSGHQESEVLMRQMLPEEQLKCEFLLLKVYCDSKSCFFASEPYYNREGSQGPQKPMWLNKVKTSLNEQTYTRVEGFVQDMRLIFHNHKEFYREDKFTRLGIQVQDIFEKNFRNIFAIQETSKNIIMFIK

SEQ ID NO: 11255 - protein, 688 aa, Homo sapiens [sequence omitted]

SEQ ID NO: 11256 - protein, 360 aa, Homo sapiens
MNAPLGGIWLWLPLLLTWLTPEVNSSWWYMRATGGSSRVMCDNVPGLVSSQRQLCHRHPDVMRAISQGVAEWTAECQHQFRQHRWNCNTLDRDHSLFGRVLLRSSRESAFVYAISSAGVVFAITRACSQGEVKSCSCDPKKMGSAKDSKGIFDWGGCSDNIDYGIKFARAFVDAKERKGKDARALMNLHNNRAGRKAVKRFLKQECKCHGVSGSCTLRTCWLAMADFRKTGDYLWRKYNGAIQVVMNQDGTGFTVANERFKKPTKNDLVYFENSPDYCIRDREAGSLGTAGRVCNLTSRGMDSCEVMCCGRGYDTSHVTRMTKCGCKFHWCCAVRCQDCLEALDVHTCKAPKNADWTTAT

SEQ ID NO: 11257 - protein, 508 aa, Homo sapiens
MNCQQLWLGFLLPMTVSGRVLGLAEVAPVDYLSQYGYLQKPLEGSNNFKPEDITEALRAFQEASELPVSGQLDDATRARMRQPRCGLEDPFNQKTLKYLLLGRWRKKHLTFRILNLPSTLPPHTARAALRQAFQDWSNVAPLTFQEVQAGAADIRLSFHGRQSSYCSNTFDGPGRVLAHADIPELGSVHFDEDEFWTEGTYRGVNLRIIAAHEVGHALGLGHSRYSQALMAPVYEGYRPHFKLHPDDVAGIQALYGKKSPVIRDEEEEETELPTVPPVPTEPSPMPDPCSSELDAMMLGPRGKTYAFKGDYVWTVSDSGPGPLFRVSALWEGLPGNLDAAVYSPRTQWIHFFKGDKVWRYINFKMSPGFPKKLNRVEPNLDAALYWPLNQKVFLFKGSGYWQWDELARTDFSSYPKPIKGLFTGVPNQPSAAMSWQDGRVYFFKGKVYWRLNQQLRVEKGYPRNISHNWMHCRPRTIDTTPSGGNTTPSGTGITLDTTLSATETTFEY

SEQ ID NO: 11258 - protein, 429 aa, Homo sapiens
MRQPRCGLEDPFNQKTLKYLLLGRWRKKHLTFRILNLPSTLPPHTARAALRQAFQDWSNVAPLTFQEVQAGAADIRLSFHGRQSSYCSNTFDGPGRVLAHADIPELGSVHFDEDEFWTEGTYRGVNLRIIAAHEVGHALGLGHSRYSQALMAPVYEGYRPHFKLHPDDVAGIQALYGKKSPVIRDEEEEETELPTVPPVPTEPSPMPDPCSSELDAMMLGPRGKTYAFKGDYVWTVSDSGPGPLFRVSALWEGLPGNLDAAVYSPRTQWIHFFKGDKVWRYINFKMSPGFPKKLNRVEPNLDAALYWPLNQKVFLFKGSGYWQWDELARTDFSSYPKPIKGLFTGVPNQPSAAMSWQDGRVYFFKGKVYWRLNQQLRVEKGYPRNISHNWMHCRPRTIDTTPSGGNTTPSGTGITLDTTLSATETTFEY

SEQ ID NO: 11259 - protein, 222 aa, Homo sapiens
MGVTWDFSMSNGGPRGKTYAFKGDYVWTVSDSGPGPLFRVSALWEGLPGNLDAAVYSPRTQWIHFFKGDKVWRYINFKMSPGFPKKLNRVEPNLDAALYWPLNQKVFLFKGSGYWQWDELARTDFSSYPKPIKGLFTGVPNQPSAAMSWQDGRVYFFKGKVYWRLNQQLRVEKGYPRNISHNWMHCRPRTIDTTPSGGNTTPSGTGITLDTTLSATETTFEY

SEQ ID NO: 11260 - protein, 529 aa, Homo sapiens
MGRLLRAARLPPLLSPLLLLLVGGAFLGACVAGSDEPGPEGLTSTSLLDLLLPTGLEPLDSEEPSETMGLGAGLGAPGSGFPSEENEESRILQPPQYFWEEEEELNDSSLDLGPTADYVFPDLTEKAGSIEDTSQAQELPNLPSPLPKMNLVEPPWHMPPREEEEEEEEEEEREKEEVEKQEEEEEEELLPVNGSQEEAKPQVRDFSLTSSSQTPGATKSRHEDSGDQASSGVEVESSMGPSLLLPSVTPTTVTPGDQDSTSQEAEATVLPAAGLGVEFEAPQEASEEATAGAAGLSGQHEEVPALPSFPQTTAPSGAEHPDEDPLGSRTSASSPQLLALVEEVLPRHGSGHHGAWHISLSKPSEKEQHLLMTLVGEQGVVPTQDVLSMLGDIRRSLEEIGIQNYSTTSSCQARASQVRSDYGTLFVVLVVIGAICIIIIALGLLYNCWQRRLPKLKHVSHGEELRFVENGCHDNPTLDVASDSQSEMQEKHPSLNGGGALNGPGSWGALMGGKRDPEDSDVFEEDTHL

SEQ ID NO: 11261 - protein, 461 aa, Homo sapiens
MAPQSLPSSRMAPLGMLLGLLMAACFTFCLSHQNLKEFALTNPEKSSTKETERKETKAEEELDAEVLEVFHPTHEWQALQPGQAVPAGSHVRLNLQTGEREAKLQYEDKFRNNLKGKRLDINTNTYTSQDLKSALAKFKEGAEMESSKEDKARQAEVKRLFRPIEELKKDFDELNVVIETDMQIMVRLINKFNSSSSSLEEKIAALFDLEYYVHQMDNAQDLLSFGGLQVVINGLNSTEPLVKEYAAFVLGAAFSSNPKVQVEAIEGGALQKLLVILATEQPLTAKKKVLFALCSLLRHFPYAQRQFLKLGGLQVLRTLVQEKGTEVLAVRVVTLLYDLVTEKMFAEEEAELTQEMSPEKLQQYRQVHLLPGLWEQGWCEITAHLLALPEHDAREKVLQTLGVLLTTCRDRYRQDPQLGRTLASLQAEYQVLASLELQDGEDEGYFQELLGSVNSLLKELR

SEQ ID NO: 11262 - protein, 461 aa, Homo sapiens [sequence omitted]

SEQ ID NO: 11263 - protein, 276 aa, Homo sapiens
MLAWRDGELEAETSSSLFLLAMQVWMCGGRMEDIPCSRVGHIYRKYVPYKVPAGVSLARVRTLKRVAEVWMDEYAEYIYQRRPEYRHLSAGDVAVQKKLRSSLNCKSFKWFMTKIAWDLPKFYPPVEPPAAAWGEIRNVGTGLCADTKHGALGSPLRLEGCVRGRGEAAWNNMQVFTFTWREDIRPGDPQHTKKFCFDAISHTSPVTLYDCHSMKGNQLWKYRKDKTLYHPVSGSCMDCSESDHRIFMNTCNPSSLTQQWLFEHTNSTVLEKFNRN

SEQ ID NO: 11264 - protein, 603 aa, Homo sapiens
MRRKEKRLLQAVALVLAALVLLPNVGLWALYRERQPDGTPGGSGAAVAPAAGQGSHSRQKKTFFLGDGQKLKDWHDKEAIRRDAQRVGNGEQGRPYPMTDAERVDQAYRENGFNIYVSDKISLNRSLPDIRHPNCNSKRYLETLPNTSIIIPFHNEGWSSLLRTVHSVLNRSPPELVAEIVLVDDFSDREHLKKPLEDYMALFPSVRILRTKKREGLIRTRMLGASVATGDVITFLDSHCEANVNWLPPLLDRIARNRKTIVCPMIDVIDHDDFRYETQAGDAMRGAFDWEMYYKRIPIPPELQKADPSDPFESPVMAGGLFAVDRKWFWELGGYDPGLEIWGGEQYEISFKVWMCGGRMEDIPCSRVGHIYRKYVPYKVPAGVSLARNLKRVAEVWMDEYAEYIYQRRPEYRHLSAGDVAVQKKLRSSLNCKSFKWFMTKIAWDLPKFYPPVEPPAAAWGEIRNVGTGLCADTKHGALGSPLRLEGCVRGRGEAAWNNMQVFTFTWREDIRPGDPQHTKKFCFDAISHTSPVTLYDCHSMKGNQLWKYRKDKTLYHPVSGSCMDCSESDHRIFMNTCNPSSLTQQWLFEHTNSTVLEKFNRN

SEQ ID NO: 11265 - protein, 603 aa, Homo sapiens [sequence omitted]

SEQ ID NO: 11266 - protein, 515 aa, Homo sapiens
MATSTGRWLLLRLALFGFLWEASGGLDSGASRDDDLLLPYPRARARLPRDCTRVRAGNREHESWPPPPATPGAGGLAVRTFVSHFRDRAVAGHLTRAVEPLRTFSVLEPGGPGGCAARRRATVEETARAADCRVAQNGGFFRMNSGECLGNVVSDERRVSSSGGLQNAQFGIRRDGTLVTGYLSEEEVLDTENPFVQLLSGVVWLIRNGSIYINESQATECDETQETGSFSKFVNVISARTAIGHDRKGQLVLFHADGHTEQRGINLWEMAEFLLKQDVVNAINLDGGGSATFVLNGTLASYPSDHCQDNMWRCPRQVSTVVCVHEPRCQPPDCHGHGTCVDGHCQCTGHFWRGPGCDELDCGPSNCSQHGLCTETGCRCDAGWTGSNCSEECPLGWHGPGCQRRCKCEHHCPCDPKTGNCSVSRVKQCLQPPEATLRAGELSFFTRTAWLALTLALAFLLLISIAANLSLLLSRAERNRRLHGDYAYHPLQEMNGEPLAAEKEQPGGAHNPFKD

SEQ ID NO: 11267 - protein, 813 aa, Homo sapiens
MGWRPRRARGTPLLLLLLLLLLWPVPGAGVLQGHIPGQPVTPHWVLDGQPWRTVSLEEPVSKPDMGLVALEAEGQELLLELEKNHRLLAPGYIETHYGPDGQPVVLAPNHTDHCHYQGRVRGFPDSWVVLCTCSGMSGLITLSRNASYYLRPWPPRGSKDFSTHEIFRMEQLLTWKGTCGHRDPGNKAGMTSLPGGPQSRGRREARRTRKYLELYIVADHTLFLTRHRNLNHTKQRLLEVANYVDQLLRTLDIQVALTGLEVWTERDRSRVTQDANATLWAFLQWRRGLWAQRPHDSAQLLTGRAFQGATVGLAPVEGMCRAESSGGVSTDHSELPIGAAATMAHEIGHSLGLSHDPDGCCVEAAAESGGCVMAAATGHPFPRVFSACSRRQLRAFFRKGGGACLSNAPDPGLPVPPALCGNGFVEAGEECDCGPGQECRDLCCFAHNCSLRPGAQCAHGDCCVRCLLKPAGALCRQAMGDCDLPEFCTGTSSHCPPDVYLLDGSPCARGSGYCWDGACPTLEQQCQQLWGPGSHPAPEACFQVVNSAGDAHGNCGQDSEGHFLPCAGRDALCGKLQCQGGKPSLLAPHMVPVDSTVHLDGQEVTCRGALALPSAQLDLLGLGLVEPGTQCGPRMVCQSRRCRKNAFQELQRCLTACHSHGVCNSNHNCHCAPGWAPPFCDKPGFGGSMDSGPVQAENHDTFLLAMLLSVLLPLLPGAGLAWCCYRLPGAHLQRCSWGCRRDPACSGPKDGPHRDHPLGGVHPMELGPTATGQPWPLDPENSHEPSSHPEKPLPAVSPDPQADQVQMPRSCLW

SEQ ID NO: 11268 - protein, 787 aa, Homo sapiens
MGWRPRRARGTPLLLLLLLLLLWPVPGAGVLQGHIPGQPVTPHWVLDGQPWRTVSLEEPVSKPDMGLVALEAEGQELLLELEKNHRLLAPGYIETHYGPDGQPVVLAPNHTDHCHYQGRVRGFPDSWVVLCTCSGMSGLITLSRNASYYLRPWPPRGSKDFSTHEIFRMEQLLTWKGTCGHRDPGNKAGMTSLPGGPQSRGRREARRTRKYLELYIVADHTLFLTRHRNLNHTKQRLLEVANYVDQLLRTLDIQVALTGLEVWTERDRSRVTQDANATLWAFLQWRRGLWAQRPHDSAQLLTGRAFQGATVGLAPVEGMCRAESSGGVSTDHSELPIGAAATMAHEIGHSLGLSHDPDGCCVEAAAESGGCVMAAATGHPFPRVFSACSRRQLRAFFRKGGGACLSNAPDPGLPVPPALCGNGFVEAGEECDCGPGQECRDLCCFAHNCSLRPGAQCAHGDCCVRCLLKPAGALCRQAMGDCDLPEFCTGTSSHCPPDVYLLDGSPCARGSGYCWDGACPTLEQQCQQLWGPGSHPAPEACFQVVNSAGDAHGNCGQDSEGHFLPCAGRDALCGKLQCQGGKPSLLAPHMVPVDSTVHLDGQEVTCRGALALPSAQLDLLGLGLVEPGTQCGPRMVCNSNHNCHCAPGWAPPFCDKPGFGGSMDSGPVQAENHDTFLLAMLLSVLLPLLPGAGLAWCCYRLPGAHLQRCSWGCRRDPACSGPKDGPHRDHPLGGVHPMELGPTATGQPWPLDPENSHEPSSHPEKPLPAVSPDPQADQVQMPRSCLW

SEQ ID NO: 11269 - protein, 353 aa, Homo sapiens
MRLPRRAALGLLPLLLLLPPAPEAAKKPTPCHRCRGLVDKFNQGMVDTAKKNFGGGNTAWEEKTLSKYESSEIRLLEILEGLCESSDFECNQMLEAQEEHLEAWWLQLKSEYPDLFEWFCVKTLKVCCSPGTYGPDCLACQGGSQRPCSGNGHCSGDGSRQGDGSCRCHMGYQGPLCTDCMDGYFSSLRNETHSICTACDESCKTCSGLTNRDCGECEVGWVLDEGACVDVDECAAEPPPCSAAQFCKNANGSYTCEECDSSCVGCTGEGPGNCKECISGYAREHGQCADVDECALAEKTCVRKNENCYNTPGSYVCVCPDGFEGTEDACVPPAEAEATEGESPTQLPSREDL

SEQ ID NO: 11270 - protein, 540 aa, Homo sapiens
MALARPVRLFSLVTRLLLAPRRGLTVRSPDEPLPVVRIPVALQRQLEQRQSRRRNLPRPVLVRPGPLLVSARRPELNQPARLTLGRWERAPLASQGWKSRRARRDHFSIERAQQEAPAVRKLSSKGSFADLGLEPRVLHALQEAAPEVVQPTTVQSSTIPSLLRGRHVVCAAETGSGKTLSYLLPLLQRLLGQPSLDSLPIPAPRGLVLVPSRELAQQVRAVAQPLGRSLGLLVRDLEGGHGMRRIRLQLSRQPSADVLVATPGALWKALKSRLISLEQLSFLVLDEADTLLDESFLELVDYILEKSHIAEGPADLEDPFNPKAQLVLVGATFPEGVGQLLNKVASPDAVTTITSSKLHCIMPHVKQTFLRLKGADKVAELVHILKHRDRAERTGPSGTVLVFCNSSSTVNWLGYILDDHKIQHLRLQGQMPALMRVGIFQSFQKSSRDILLCTDIASRGLDSTGVELVVNYDFPPTLQDYIHRAGRVGRVGSEVPGTVISFVTHPWDVSLVQKIELAARRRRSLPGLASSVKEPLPQAT

SEQ ID NO: 11271 - protein, 177 aa, Homo sapiens
MVGFGANRRAGRLPSLVLVVLLVVIVVLAFNYWSISSRHVLLQEEVAELQGQVQRTEVARGRLEKRNSDLLLLVDTHKKQIDQKEADYGRLSSRLQAREGLGKRCEDDKVKLQNNISYQMADIHHLKEQLAELRQEFLRQEDQLQDYRKNNTYLVKRLEYESKRPKRFNQMMERNWI

SEQ ID NO: 11272 - protein, 380 aa, Homo sapiens
MVGFGANRRAGRLPSLVLVVLLVVIVVLAFNYWSISSRHVLLQEEVAELQGQVQRTEVARGRLEKRNSDLLLLVDTHKKQIDQKEADYGRLSSRLQAREGLGKRCEDDKVKLQNNISYQMADIHHLKEQLAELRQEFLRQEDQLQDYRKNNTYLVKRLEYESFQCGQQMKELRAQHEENIKKLADQFLEEQKQETQKIQSNDGKELDINNQVVPKNIPKVAENVADKNEEPSSNHIPHGKEQIKRGGDAGMPGIEENDLAKVDDLPPALRKPPISVSQHESHQAISHLPTGQPLSPNMPPDSHINHNGNPGTSKQNPSSPLQRLIPGSNLDSEPRIQTDILKQATKDRVSDFHKLKQNDEERELQMDPADYGKQHFNDVL

SEQ ID NO: 11273 - protein, 436 aa, Homo sapiens [sequence omitted]

SEQ ID NO: 11274 - protein, 803 aa, Homo sapiens
MAGPRGLLPLCLLAFCLAGFSFVRGQVLFKGCDVKTTFVTHVPCTSCAAIKKQTCPSGWLRELPDQITQDCRYEVQLGGSMVSMSGCRRKCRKQVVQKACCPGYWGSRCHECPGGAETPCNGHGTCLDGMDRNGTCVCQENFRGSACQECQDPNRFGPDCQSVCSCVHGVCNHGPRGDGSCLCFAGYTGPHCDQELPVCQELRCPQNTQCSAEAPSCRCLPGYTQQGSECRAPNPCWPSPCSLLAQCSVSPKGQAQCHCPENYHGDGMVCLPKDPCTDNLGGCPSNSTLCVYQKPGQAFCTCRPGLVSINSNASAGCFAFCSPFSCDRSATCQVTADGKTSCVCRESEVGDGRACYGHLLHEVQKATQTGRVFLQLRVAVAMMDQGCREILTTAGPFTVLVPSVSSFSSRTMNASLAQQLCRQHIIAGQHILEDTRTQQTRRWWTLAGQEITVTFNQFTKYSYKYKDQPQQTFNIYKANNIAANGVFHVVTGLRWQAPSGTPGDPKRTIGQILASTEAFSRFETILENCGLPSILDGPGPFTVFAPSNEAVDSLRDGRLIYLFTAGLSKLQELVRYHIYNHGQLTVEKLISKGRILTMANQVLAVNISEEGRILLGPEGVPLQRVDVMAANGVIHMLDGILLPPTILPILPKHCSEEQHKIVAGSCVDCQALNTSTCPPNSVKLDIFPKECVYIHDPTGLNVLKKGCASYCNQTIMEQGCCKGFFGPDCTQCPGGFSNPCYGKGNVSPILSWGEVWGTQGLLHRLASDWLCVWAKPATLALGFSYLCSGKLDQIISHILIKNN

SEQ ID NO: 11275 - protein, 458 aa, Homo sapiens
MAWASRLGLLLALLLPVVGASTPGTVVRLNKAALSYVSEIGKAPLQRALQVTVPHFLDWSGEALQPTRIRILNVHVPRLHLKFIAGFGVRLLAAANFTFKVFRAPEPLELTLPVELLADTRVTQSSIRTPVVSISACSLFSGHANEFDGSNSTSHALLVLVQKHIKAVLSNKLCLSISNLVQGVNVHLGTLIGLNPVGPESQIRYSMVSVPTVTSDYISLEVNAVLFLLGKPIILPTDATPFVLPRHVGTEGSMATGGLSQQLFDSALLLLQKAGALNLDITGQLRSDDNLLNTSALGRLIPEVARQFPEPMPVVLKVRLGATPVAMLHTNNATLRLQPFVEVLATASNSAFQSLFSLDVVVNLRLQLSVSKVKLQGTTSVLGDVQLTVASSNVGFIDTDQVRTLMGTVFEKPLLDHLNALLAMGIALPGVVNLHYVAPEIFVYEGYVVISSGLFYQS

SEQ ID NO: 11276 - protein, 809 aa, Homo sapiens [sequence omitted]

SEQ ID NO: 11277 - protein, 785 aa, Homo sapiens [sequence omitted]

SEQ ID NO: 11278 - protein, 414 aa, Homo sapiens [sequence omitted]

SEQ ID NO: 11279 - protein, 414 aa, Homo sapiens
MTKARLFRLWLVLGSVFMILLIIVYWDSAGAAHFYLHTSFSRPHTGPPLPTPGPDRDRELTADSDVDEFLDKFLSAGVKQSDLPRKETEQPPAPGSMEESVRGYDWSPRDARRSPDQGRQQAERRSVLRGFCANSSLAFPTKERAFDDIPNSELSHLIVDDRHGAIYCYVPKVACTNWKRVMIVLSGSLLHRGAPYRDPLRIPREHVHNASAHLTFNKFWRRYGKLSRHLMKVKLKKYTKFLFVRDPFVRLISAFRSKFELENEEFYRKFAVPMLRLYANHTSLPASAREAFRAGLKVSFANFIQYLLDPHTEKLAPFNEHWRQVYRLCHPCQIDYDFVGKLETLDEDAAQLLQLLQVDRQLRFPPSYRNRTASSWEEDWFAKIPLAWRQQLYKLYEADFVLFGYPKPENLLRD

SEQ ID NO: 11280 - protein, 263 aa, Homo sapiens
MALVLILQLLTLWPLCHTDITPSVPPASYHPKPWLGAQPATVVTPGVNVTLRCRAPQPAWRFGLFKPGEIAPLLFRDVSSELAEFFLEEVTPAQGGIYRCCYRRPDWGPGVWSQPSDVLELLVTEELPRPSLVALPGPVVGPGANVSLRCAGRLRNMSFVLYREGVAAPLQYRHSAQPWADFTLLGARAPGTYSCYYHTPSAPYVLSQRSEVLVISWEDSGSSDYTRGNLVRLGLAGLVLISLGALVTFDWRSQNRAPAGIRP

SEQ ID NO: 11281 - protein, 282 aa, Homo sapiens
MALVLILQLLTLWPLCHTDITPSVPPASYHPKPWLGAQPATVVTPGVNVTLRCRAPQPAWRFGLFKPGEIAPLLFRDVSSELAEFFLEEVTPAQGGSYRCCYRRPDWGPGVWSQPSDVLELLVTEELPRPSLVALPGPVVGPGANVSLRCAGRLRNMSFVLYREGVAAPLQYRHSAQPWADFTLLGARAPGTYSCYYHTPSAPYVLSQRSEVLVISWEGEGPEARPASSAPGMQAPGPPPSDPGAQAPSLSSFRPRGLVLQPLLPQTQDSWDPAPPPSDPGV

SEQ ID NO: 11282 - protein, 252 aa, Homo sapiens
MALVLILQLLTLFPPASYHPKPWLGAQPATVVTPGVNVTLRCRAPQPAWRFGLFKPGEIAPLLFRDVSSELAEFFLEEVTPAQGGIYRCCYRRPDWGPGVWSQPSDVLELLVTEELPRPSLVALPGPVVGPGANVSLRCAGRLRNMSFVLYREGVAAPLQYRHSAQPWADFTLLGARAPGTYSCYYHTPSAPYVLSQRSEVLVISWEDSGSSDYTRGNLVRLGLAGLVLISLGALVTFDWRSQNRAPAGIRP

SEQ ID NO: 11283 - protein, 269 aa, Homo sapiens
MALVLILQLLTLWPLCHTDITPSGSPVYSVPPASYHPKPWLGAQPATVVTPGVNVTLRCRAPQPAWRFGLFKPGEIAPLLFRDVSSELAEFFLEEVTPAQGGIYRCCYRRPDWGPGVWSQPSDVLELLVTEELPRPSLVALPGPVVGPGANVSLRCAGRLRNMSFVLYREGVAAPLQYRHSAQPWADFTLLGARAPGTYSCYYHTPSAPYVLSQRSEVLVISWEDSGSSDYTRGNLVRLGLAGLVLISLGALVTFDWRSQNRAPAGIRP

SEQ ID NO: 11284 - protein, 242 aa, Homo sapiens
MAAALWGFFPVLLLLLLSGDVQSSEVPGAAAEGSGGSGVGIGDRFKIEGRAVVPGVKPQDWISAARVLVDGEEHVGFLKTDGSFVVHDIPSGSYVVEVVSPAYRFDPVRVDITSKGKMRARYVNYIKTSEVVRLPYPLQMKSSGPPSYFIKRESWGWTDFLMNPMVMMMVLPLLIFVLLPKVVNTSDPDMRREMEQSMNMLNSNHELPDVSEFMTRLFSSKSSGKSSSGSSKTGKSGAGKRR

SEQ ID NO: 11285 - protein, 499 aa, Homo sapiens
MAAAPGLLVWLLVLRLPWRVPGQLDPSTGRRFSEHKLCADDECSMMYRGEALEDFTGPDCRFVNFKKGDPVYVYYKLARGWPEVWAGSVGRTFGYFPKDLIQVVHEYTKEELQVPTDETDFVCFDGGRDDFHNYNVEELLGFLELYNSAATDSEKAVEKTLQDMEKNPELSKEREPEPEPVEANSEESDSVFSENTEDLQEQFTTQKHHSHANSQANHAQGEQASFESFEEMLQDKLKVPESENNKTSNSSQVSNEQDKIDAYKLLKKEMTLDLKTKFGSTADALVSDDETTRLVTSLEDDFDEELDTEYYAVGKEDEENQEDFDELPLLTFTDGEDMKTPAKSGVEKYPTDKEQNSNEEDKVQLTVPPGIKNDDKNILTTWGDTIFSIVTGGEETRDTMDLESSSSEEEKEDDDDALVPDSKQGKPQSATDYSDPDNVDDGLFIVDIPKTNNDKEVNAEHHIKGKGRGVQESKRGLVQDETELEDENQEGFKTEPIKL

SEQ ID NO: 11286 - protein, 212 aa, Homo sapiens
MAAAAAGAGSGPSAAQEKQFLPALLSFFIYNPRFWPREGEQEENKILFYHPNEVEKNEKIRNVGLCEAIVQFTRTFSPSKPAKSLHTQKNRQFFNEPEENFWMVMVVRNPIIEKQSKDGKPVIEYQEEELLDKVYSSVLQQCYSMYKKSQGIQNCSQSLLGCSCPCAWSRCWGTCSSSWPSALTPTSTPPCTSSSPTCPCLTSVSPPPRSPR

SEQ ID NO: 11287 - protein, 479 aa, Homo sapiens
MARAAALLPSRSPPTPLLWPLLLLLLLETGAQDVRVQVLPEVRGQLGGTVELPCHLLPPVPGLYISLVTWQRPDAPANHQNVAAFHPKMGPSFPSPKPGSERLSFVSAKQSTGQDTEAELQDATLALHGLTVEDEGNYTCEFATFPKGSVRGMTWLRVIAKPKNQAEAQKVTFSQDPTTVALCISKEGRPPARISWLSSLDWEAKETQVSGTLAGTVTVTSRFTLVPSGRADGVTVTCKVEHESFEEPALIPVTLSVRYPPEVSISGYDDNWYLGRTDATLSCDVRSNPEPTGYDWSTTSGTFPTSAVAQGSQLVIHAVDSLFNTTFVCTVTNAVGMGRAEQVIFVRETPRASPRDVGPLVWGAVGGTLLVLLLLAGGSLAFILLRVRRRRKSPGGAGGGASGDGGFYDPKAQVLGNGDPVFWTPVVPGPMEPDGKDEEEEEEEEKAEKGLMLPPPPALEDDMESQLDGSLISRRAVYV

SEQ ID NO: 11288 - protein, 538 aa, Homo sapiens
MARAAALLPSRSPPTPLLWPLLLLLLLETGAQDVRVQVLPEVRGQLGGTVELPCHLLPPVPGLYISLVTWQRPDAPANHQNVAAFHPKMGPSFPSPKPGSERLSFVSAKQSTGQDTEAELQDATLALHGLTVEDEGNYTCEFATFPKGSVRGMTWLRVIAKPKNQAEAQKVTFSQDPTTVALCISKEGRPPARISWLSSLDWEAKETQVSGTLAGTVTVTSRFTLVPSGRADGVTVTCKVEHESFEEPALIPVTLSVRYPPEVSISGYDDNWYLGRTDATLSCDVRSNPEPTGYDWSTTSGTFPTSAVAQGSQLVIHAVDSLFNTTFVCTVTNAVGMGRAEQVIFVRETPNTAGAGATGGIIGGIIAAIIATAVAATGILICRQQRKEQTLQGAEEDEDLEGPPSYKPPTPKAKLEAQEMPSQLFTLGASEHSPLKTPYFDAGASCTEQEMPRYHELPTLEERSGPLHPGATSLGSPIPVPPGPPAVEDVSLDLEDEEGEEEEEYLDKINPIYDALSYSSPSDSYQGKGFVMSRAMYV

SEQ ID NO: 11289 - protein, 412 aa, Homo sapiens [sequence omitted]

SEQ ID NO: 11290 - protein, 448 aa, Homo sapiens
MKSLSLLLAVALGLATAVSAGPAVIECWFVEDASGKGLAKRPGALLLRQGPGEPPPRPDLDPELYLSVHDPAGALQAAFRRYPRGAPAPHCEMSRFVPLPASAKWASGLTPAQNCPRALDGAWLMVSISSPVLSLSSLLRPQPEPQQEPVLITMATVVLTVLTHTPAPRVRLGQDALLDLSFAYMPPTSEAASSLAPGPPPFGLEWRRQHLGKGHLLLAATPGLNGQMPAAQEGAVAFAAWDDDEPWGPWTGNGTFWLPRVQPFQEGTYLATIHLPYLQGQVTLELAVYKPPKVSLMPATLARAAPGEAPPELLCLVSHFYPSGGLEVEWELRGGPGGRSQKAEGQRWLSALRHHSDGSVSLSGHLQPPPVTTEQHGARYACRIHHPSLPASGRSAEVTLEVAGLSGPSLEDSVGLFLSAFLLLGLFKALGWAAVYLSTCKDSKKKAE

SEQ ID NO: 11291 - protein, 489 aa, Homo sapiens
MVPSSPAVEKQVPVEPGPDPELRSWRRLVCYLCFYGFMAQIRPGESFITPYLLGPDKNFTREQVTNEITPVLSYSYLAVLVPVFLLTDYLRYTPVLLLQGLSFVSVWLLLLLGHSVAHMQLMELFYSVTMAARIAYSSYIFSLVRPARYQRVAGYSRAAVLLGVFTSSVLGQLLVTVGRVSFSTLNYISLAFLTFSVVLALFLKRPKRSLFFNRDDRGRCETSASELERMNPGPGGKLGHALRVACGDSVLARMLRELGDSLRRPQLRLWSLWWVFNSAGYYLVVYYVHILWNEVDPTTNSARVYNGAADAASTLLGAITSFAAGFVKIRWARWSKLLIAGVTATQAGLVFLLAHTRHPSSIWLCYAAFVLFRGSYQFLVPIATFQIASSLSKELCALVFGVNTFFATIVKTIITFIVSDVRGLGLPVRKQNEELHVASLSLWKSHLRLAADTLSSEGSSGSGPRSWFLSPTLRAALHGPVCPSEVCPS

SEQ ID NO: 11292 - protein, 592 aa, Homo sapiens
MVPSSPAVEKQVPVEPGPDPELRSWRHLVCYLCFYGFMAQIRPGESFITPYLLGPDKNFTREQACTNEITPVLSYSYLAVLVPVFLLTDYLRYTPVLLLQGLSFVSVWLLLLLGHSVAHMQLMELFYSVTMAARIAYSSYIFSLVRPARYQRVAGYSRAAVLLGVFTSSVLGQLLVTVGRVSFSTLNYISLAFLTFSVVLALFLKRPKRSLFFNRDDRGRCETSASELERMNPGPGGKLGHALRVACGDSVLARMLRELGDSLRRPQLRLWSLWWVFNSAGYYLVVYYVHILWNEVDPTTNSARVYNGAADAASTLLGAITSFAAGFVKIRWARWSKLLIAGVTATQAGLVFLLAHTRHPSSIWLCYAAFVLFRGSYQFLVPIATFQIASSLSKELCALVFGVNTFFATIVKTIITFIVSDVRGLGLPVRKQFQLYSVYFLILSIIYFLGAMLDGLRHCQRGHHPRQPPAQGLRSAAEEKAAQALSVQDKGLGGLQPAQSPPLSPEDSLGAVGPASLEQRQSDPYLAQAPAPQAAEFLSPVTTPSPCTLCSAQASGPEAADETCPQLAVHPPGVSKLGLQCLPSDGVQNVNQ

SEQ ID NO: 11293 - protein, 826 aa, Homo sapiens
MAEPSAPESKHKSSLNSSPWSGLMALGNSRHGHHGPGAQCAHKAAGGAAPPKPAPAGLSGGLSQPAGWQSLLSFTILFLAWLAGFSSRLFAVIRFESIIHEFDPWFNYRSTHHLASHGFYEFLNWFDERAWYPLGRIVGGTVYPGLMITAGLIHWILNTLNITVHIRDVCVFLAPTFSGLTSISTFLLTRELWNQGAGLLAACFIAIVPGYISRSVAGSFDNEGIAIFALQFTYYLWVKSVKTGSVFWTMCCCLSYFYMVSAWGGYVFIINLIPLHVFVLLLMQRYSKRVYIAYSTFYIVGLILSMQIPFVGFQPIRTSEHMAAAGVFALLQAYAFLQYLRDRLTKQEFQTLFFLGVSLAAGAVFLSVIYLTYTGYIAPWSGRFYSLWDTGYAKIHIPIIASVSEHQPTTWVSFFFDLHILVCTFPAGLWFCIKNINDERVFVALYAISAVYFAGVMVRLMLTLTPVVCMLSAIAFSNVFEHYLGDDMKRENPPVEDSSDEDDKRNQGNLYDKAGKVRKHATEQEKTEEGLGPNIKSIVTMLMLMLLMMFAVHCTWVTSNAYSSPSVVLASYNHDGTRNILDDFREAYFWLRQNTDEHARVMSWWDYGYQIAGMANRTTLVDNNTWNNSHIALVGKAMSSNETAAYKIMRTLDVDYVLVIFGGVIGYSGDDINKFLWMVRIAEGEHPKDIRESDYFTPQGEFRVDKAGSPTLLNCLMYKMSYYRFGEMQLDFRTPPGFDRTRNAEIGNKDIKFKHLEEAFTSEHWLVRIYKVKAPDNRETLDHKPRVTNIFPKQKYLSKKTTKRKRGYIKNKLVFKKGKKISKKTV

SEQ ID NO: 11294 - protein, 430 aa, Homo sapiens
GGLRVVSPFPLCQPAGEPSRGKMRSSCVLLTALVALATYYVYIPLPGSVSDPWKLMLLDATFRGAQQVSNLIHYLGLSHHLLALNFIIVSFGKKSAWSSAQVKVTDTDFDGVEVRVFEGPPKPEEPLKRSVVYIHGGGWALASAKIRYYDELCTAMAEELNAVIVSIEYRLVPKVYFPEQIHDVVRATKYFLKPEVLQKYMVDPGRICISGDSAGGNLAAALGQQFTQDASLKNKLKLQALIYPVLQALDFNTPSYQQNVNTPILPRYVMVKYWVDYFKGNYDFVQAMIVNNHTSLDVEEAAAVRARLNWTSLLPASFTKNYKPVVQTTGNARIVQELPQLLDARSAPLIADQAVLQLLPKTYILTCEHDVLRDDGIMYAKRLESAGVEVTLDHFEDGFHGCMIFTSWPTNFSVGIRTRNSYIKWLDQNL

SEQ ID NO: 11295 - protein, 430 aa, Homo sapiens
GGLRVVSPFPLCQPAGEPSQGKMRSSCVLLTALVALAAYYVYIPLPGSVSDPWKLMLLDATFRGAQQVSNLIHYLGLSHHLLALNFIIVSFGKKSAWSSAQVKVTDTDFDGVEVRVFEGPPKPEEPLKRSVVYIHGGGWALASAKIRYYDELCTAMAEELNAVIVSIEYRLVPKVYFPEQIHDVVRATKYFLKPEVLQKYMVDPGRICISGDSAGGNLAAALGQQFTQDASLKNKLKLQALIYPVLQALDFNTPSYQQNVNTPILPRYVMVKYWVDYFKGNYDFVQAMIVNNHTSLDVEEAAAVRARLNWTSLLPASFTKNYKPVVQTTGNARIVQELPQLLDARSAPLIADQAVLQLLPKTYILTCEHDVLRDDGIMYAKRLESAGVEVTLDHFEDGFHGCMIFTSWPTNFSVGIRTRNSYIKWLDQNL

SEQ ID NO: 11296 - protein, 238 aa, Homo sapiens
VAAGMAAAMPLALLVLLLLGPGGWCLAEPPRDSLREELVITPLPSGDVAATFQFRTRWDSELQREGDTDHYFLRYAVLPREVVCTENLTPWKKLLPCSSKAGLSVLLKADRLFHTSYHSQAVHIRPVCRNARCTSISWELRQTLSVVFDAFITGQGKKDWSLFRMFSRTLTEPCPLASESRVYVDITTYNQDNETLEVHPPPTTTYQDVILGTRKTYAIYDLLDTAMINNSRNLNIQL

SEQ ID NO: 11297 - protein, 578 aa, Homo sapiens
MAAAMPLALLVLLLLGPGGWCLAEPPRDSLREELVITPLPSGDVAATFQFRTRWDSELQREGVSHYRLFPKALGQLISKYSLRELHLSFTQGFWRTRYWGPPFLQAPSGAELWVWFQDTVTDVDKSWKELSNVLSGIFCASLNFIDSTNTVTPTASFKPLGLANDTDHYFLRYAVLPREVVCTENLTPWKKLLPCSSKAGLSVLLKADRLFHTSYHSQAVHIRPVCRNARCTSISWELRQTLSVVFDAFITGQGKKDWSLFRMFSRTLTEPCPLASESRVYVDITTYNQDNETLEVHPPPTTTYQDVILGTRKTYAIYDLLDTAMINNSRNLNIQLKWKRPPENEAPPVPFLHAQRYVSGYGLQKGELSTLLYNTHPYRAFPVLLLDTVPWYLRLYVHTLTITSKGKENKPSYIHYQPAQDRLQPHLLEMLIQLPANSVTKVSIQFERALLKWTEYTPDPNHGFYVSPSVLSALVPSMVAAKPVDWEESPLFNSLFPVSDGSNYFVRLYTEPLLVNLPTPDFSMPYNVICLTCTVVAVCYGSFYNLLTRTFHIEEPRTGGLAKRLANLIRRARGVPPL

SEQ ID NO: 11298 - protein, 367 aa, Homo sapiens
MWIPRGQSPRPTPDRPLSPSDTDHYFLRYAVLPREVVCTENLTPWKKLLPCSSKAGLSVLLKADRLFHTSYHSQAVHIRPVCRNARCTSISWELRQTLSVVFDAFITGQGKKDWSLFRMFSRTLTEPCPLASESRVYVDITTYNQDNETLEVHPPPTTTYQDVILGTRKTYAIYDLLDTAMINNSRNLNIQLKWKRPPENGYIHYQPAQDRLQPHLLEMLIQLPANSVTKVSIQFERALLKWTEYTPDPNHGFYVSPSVLSALVPSMVAAKPVDWEESPLFNSLFPVSDGSNYFVRLYTEPLLVNLPTPDFSMPYNVICLTCTVVAVCYGSFYNLLTRTFHIEEPRTGGLAKRLANLIRRARGVPPL

SEQ ID NO: 11299 - protein, 529 aa, Homo sapiens
MSLNSSLSCRKELSNLTEEEGGEGGVIITQFIAIIVITIFVCLGNLVIVVTLYKKSYLLTLSNKFVFSLTLSNFLLSVLVLPFVVTSSIRREWIFGVVWCNFSALLYLLISSASMLTLGVIAIDRYYAVLYPMVYPMKITGNRAVMALVYIWLHSLIGCLPPLFGWSSVEFDEFKWMCVAAWHREPGYTAFWQIWCALFPFLVMLVCYGFIFRVARVKARKVHCGTVVIVEEDAQRTGRKNSSTSTSSSGSRRNAFQGVVYSANQCKALITILVVLGAFMVTWGPYMVVIASEALWGKSSVSPSLETWATWLSFASAVCHPLIYGLWNKTVRKELLGMCFGDRYYREPFVQRQRTSRLFSISNRITDLGLSPHLTALMAGGQPLGHSSSTGDTGFSCSQDSGTDMMLLEDYTSDDNPPSHCTCPPKRRSSVTFEDEVEQIKEAAKNSILHVKAEVHKSLDSYAASLAKAIEAEAKINLFGEEALPGVLVTARTVPGGGFGGRRGSRTLVSQRLQLQSIEEGDVLAAEQR

SEQ ID NO: 11300 - protein, 407 aa, Homo sapiens
MSLNSSLSCRKELSNLTEEEGGEGGVIITQFIAIIVITIFVCLGNLVIVVTLYKKSYLLTLSNKFVFSLTLSNFLLSVLVLPFVVTSSIRREWIFGVVWCNFSALLYLLISSASMLTLGVIAIDRYYAVLYPMVYPMKITGNRAVMALVYIWLHSLIGCLPPLFGWSSVEFDEFKWMCVAAWHREPGYTAFWQIWCALFPFLVMLVCYGFIFRVARVKARKVHCGTVVIVEEDAQRTGRKNSSTSTSSSGSRRNAFQGVVYSANQCKALITILVVLGAFMVTWGPYMVVIASEALWGKSSVSPSLETWATWLSFASAVCHPLIYGLWNKTVRKELLGMCFGDRYYREPFVQRQRTSRLFSISNRITDLGLSPHLTALMAGGQPLGHSSSTGDTGFSCSQDSGNLRAL

SEQ ID NO: 11301 - protein, 1875 aa, Homo sapiens
MEPSSPQDEGLRKKQPKKPVPEILPRPPRALFCLTLENPLRKACISIVEWKPFETIILLTIFANCVALAVYLPMPEDDNNSLNLGLEKLEYFFLIVFSIEAAMKIIAYGFLFHQDAYLRSGWNVLDFTIVFLGVFTVILEQVNVIQSHTAPMSSKGAGLDVKALRAFRVLRPLRLVSGVPSLQVVLNSIFKAMLPLFHIALLVLFMVIIYAIIGLELFKGKMHKTCYFIGTDIVATVENEEPSPCARTGSGRRCTINGSECRGGWPGPNHGITHFDNFGFSMLTVYQCITMEGWTDVLYWVNDAIGNEWPWIYFVTLILLGSFFILNLVLGVLSGEFTKEREKAKSRGTFQKLREKQQLDEDLRGYMSWITQGEVMDVEDFREGKLSLDEGGSDTESLYEIAGLNKIIQFIRHWRQWNRIFRWKCHDIVKSKVFYWLVILIVALNTLSIASEHHNQPLWLTRLQDIANRVLLSLFTTEMLMKMYGLGLRQYFMSIFNRFDCFVVCSGILEILLVESGAMTPLGISVLRCIRLLRIFKITKYWTSLSNLVASLLNSIRSIASLLLLLFLFIVIFALLGMQLFGGRYDFEDTEVRRSNFDNFPQALISVFQVLTGEDWTSMMYNGIMAYGGPSYPGMLVCIYFIILFVCGNYILLNVFLAIAVDNLAEAESLTSAQKAKAEEKKRRKMSKGLPDKSEEEKSTMAKKLEQKPKGEGIPTTAKLKIDEFESNVNEVKDPYPSADFPGDDEEDEPEIPLSPRPRPLAELQLKEKAVPIPEASSFFIFSPTNKIRVLCHRIVNATWFTNFILLFILLSSAALAAEDPIRADSMRNQILKHFDIGFTSVFTVEIVLKMTTYGAFLHKGSFCRNYFNMLDLLVVAVSLISMGLESSAISVVKILRVLRVLRPLRAINRAKGLKHVVQCMFVAISTIGNIVLVTTLLQFMFACIGVQLFKGKFFRCTDLSKMTEEECRGYYYVYKDGDPMQIELRHREWVHSDFHFDNVLSAMMSLFTVSTFEGWPQLLYKAIDSNAEDVGPIYNNRVEMAIFFIIYIILIAFFMMNIFVGFVIVTFQEQGETEYKNCELDKNQRQCVQYALKARPLRCYIPKNPYQYQVWYIVTSSYFEYLMFALIMLNTICLGMQHYNQSEQMNHISDILNVAFTIIFTLEMILKLMAFKARGYFGDPWNVFDFLIVIGSIIDVILSEIDTFLASSGGLYCLGGGCGNVDPDESARISSAFFRLFRVMRLIKLLSRAEGVRTLLWTFIKSFQALPYVALLIVMLFFIYAVIGMQMFGKIALVDGTQINRNNNFQTFPQAVLLLFRHACATGEAWQEILLACSYGKLCDPESDYAPGEEYTCGTNFAYYYFISFYMLCAFLVINLFVAVIMDNFDYLTRDWSILGPHHLDEFKAIWAEYDPEAKGRIKHLDVVTLLRRIQPPLGFGKFCPHRVACKRLVGMNMPLNSDGTVTFNATLFALVRTALKIKTEGNFEQANEELRAIIKKIWKRTSMKLLDQVIPPIGDDEVTVGKFYATFLIQEHFRKFMKRQEEYYGYRPKKDIVQIQAGLRTIEEEAAPEICRTVSGDLAAEEELERAMVEAAMEEGIFRRTGGLFGQVDNFLERTNSLPPVMANQRPLQFAEIEMEEMESPVFLEDFPQDPRTNPLARANTNNANANVAYGNSNHSNSHVFSSVHYEREFPEETETPATRGRALGQPCRVLGPHSKPCVEMLKGLLTQRAMPRGQAPPAPCQCPRVESSMPEDRKSSTPGSLHEETPHSRSTRENTSRCSAPATALLIQKALVRGGLGTLAADANFIMATGQALADACQMEPEEVEIMATELLKGREAPEGMASSLGCLNLGSSLGSLDQHQGSQETLIPPRL

SEQ ID NO: 11302 - protein, 1356 aa, Homo sapiens
MDLKEKHLGEPPSALGLSTRKALSVLKEQLEAVLEGHLRERKKCLTWKEVWRSSFLHHSNRCSCFHWPGASLMLLAVLLLLGCCGGQPAGSRGVGLVNASALFLLLLLNLVLIGRQDRLKRREVERRLRGIIDQIQDALRDGREIQWPSAMYPDLHMPFAPSWSLHWAYRDGHLVNLPVSLLVEGDIIALRPGQESFASLRGIKDDEHIVLEPGDLFPPFSPPPSPRGEVERGPQSPQQHRLFRVLETPVIDNIRWCLDMALSRPVTALDNERFTVQSVMLHYAVPVVLAGFLITNALRFIFSAPGVTSWQYTLLQLQVNGVLPILPLLFPVLWVLATACGEARVLAQMSKASPSSLLAKFSEDTLSSYTEAVSSQEMLRCIWGHFLRVLGGTSPTLSHSSSLLHSLGSVTVLCCVDKQGILSWPNPSPETVLFFSGKVEPPHSSHEDLTDGLSTRSFCHPEPHERDALLAGSLNNTLHLSNEQERGDWPGEAPKPPEPYSHHKAHGRSKHPSGSNVSFSRDTEGGEEEPSKTQPGMESDPYEAEDFVCDYHLEMLSLSQDQQNPSCIQFDDSNWQLHLTSLKPLGLNVLLNLCDASVTERLCRFSDHLCNIALQESHSAVLPVHVPWGLCELARLIGFTPGAKELFKQENHLALYRLPSAETMKETSLGRLSCVTKRRPPLSHMISLFIKDTTTSTEQMLSHGTADVVLEACTDFWDGADIYPLSGSDRKKVLDFYQRACLSGYCSAFAYKPMNCALSSQLNGKCIELVQVPGQSSIFTMCELPSTIPIKQNARRSSWSSDEGIGEVLEKEDCMQALSGQIFMGMVSSQYQARLDIVRLIDGLVNACIRFVYFSLEDELKSKVFAEKMGLETGWNCHISLTPNGDMPGSEIPPSSPSHAGSLHDDLNQVSRDDAEGLLLMEEEGHSDLISFQPTDSDIPSFLEDSNRAKLPRGIHQVRPHLQNIDNVPLLVPLFTDCTPETMCEMIKIMQEYGEVTCCLGSSANLRNSCLFLQSDISIALDPLYPSRCSWETFGYATSISMAQASDGLSPLQLSGQLNSLPCSLTFRQEETISIIRLIEQARHATYGIRKCFLFLLQCQLTLVVIQFLSCLVQLPPLLSTTDILWLSCFCYPLLSISLLGKPPHSSIMSMATGKNLQSIPKKTQHYFLLCFLLKFSLTISSCLICFGFTLQSFCDSSRDRNLTNCSSVMLPSNDDRAPAWFEDFANGLLSAQKLTAALIVLHTVFISITHVHRTKPLWRKSPLTNLWWAVTVPVVLLGQVVQTAVDLQLWTHRDSHVHFGLEDVPLLTWLLGCLSLVLVVVTNEIVKLHEIRVRVRYQKRQKLQFETKLGMNSPF

SEQ ID NO: 11303 - protein, 398 aa, Homo sapiens
MHLGMVGEEGGVPSPVGDTAEVCVSPTLSSIALDPLYPSRCSWETFGYATSISMAQASDGLSPLQLSGQLNSLPCSLTFRQEETISIIRLIEQARHATYGIRKCFLFLLQCQLTLVVIQFLSCLVQLPPLLSTTDILWLSCFCYPLLSISLLGKPPHSSIMSMATGKNLQSIPKKTQHYFLLCFLLKFSLTISSCLICFGFTLQSFCDSSRDRNLTNCSSVMLPSNDDRAPAWFEDFANGLLSAQKLTAALIVLHTGERAPWEGVDDGGRGAPLWKSDPHIAPPSPVFISITHVHRTKPLWRKSPLTNLWWAVTVPVVLLGQVVQTAVDLQLWTHRDSHVHFGLEDVPLLTWLLGCLSLVLVVVTNEIVKLHEIRVRVRYQKRQKLQFETKLGMNSPF

SEQ ID NO: 11304 - protein, 957 aa, Homo sapiens
MNFAEREGSKRYCIQTKHVAILCAVVVGVGLIVGLAVGLTRSCDSSGDGGPGTAPAPSHLPSSTASPSGPPAQDQDICPASEDESGQWKNFRLPDFVNPVHYDLHVKPLLEEDTYTGTVSISINLSAPTRYLWLHLRETRITRLPELKRPSGDQVQVRRCFEYKKQEYVVVEAEEELTPSSGDGLYLLTMEFAGWLNGSLVGFYRTTYTENGRVKSIAATDHEPTDARKSFPCFDEPNKKATYTISITHPKEYGALSNMPVAKEESVDDKWTRTTFEKSVPMSTYLVCFAVHQFDSVKRISNSGKPLTIYVQPEQKHTAEYAANITKSVFDYFEEYFAMNYSLPKLDKIAIPDFGTGAMENWGLITYRETNLLYDPKESASSNQQRVATVVAHELVHQWFGNIVTMDWWEDLWLNEGFASFFEFLGVNHAETDWQMRDQMLLEDVLPVQEDDSLMSSHPIIVTVTTPDEITSVFDGISYSKGSSILRMLEDWIKPENFQKGCQMYLEKYQFKNAKTSDFWAALEEASRLPVKEVMDTWTRQMGYPVLNVNGVKNITQKRFLLDPRANPSQPPSDLGYTWNIPVKWTEDNITSSVLFNRSEKEGITLNSSNPSGNAFLKINPDHIGFYRVNYEVATWDSIATALSLNHKTFSSADRASLIDDAFALARAQLLDYKVALNLTKYLKREENFLPWQRVISAVTYIISMFEDDKELYPMIEEYFQGQVKPIADSLGWNDAGDHVTKLLRSSVLGFACKMGDREALNNASSLFEQWLNGTVSLPVNLRLLVYRYGMQNSGNEISWNYTLEQYQKTSLAQEKEKLLYGLASVKNVTLLSRYLDLLKDTNLIKTQDVFTVIRYISYNSYGKNMAWNWIQLNWDYLVNRYTLNNRNLGRIVTIAEPFNTELQLWQMESFFAKYPQAGAGEKPREQVLETVKNNIEWLKQHRNTIREWFFNLLESG

SEQ ID NO: 11305 - protein, 563 aa, Homo sapiens
MRLDLASLMSAPKSLGSAFKSWRLDKAPSPQHTFPSTSIPGMAFALLASVPPVFGLYTSFFPVLIYSLLGTGRHLSTGTFAILSLMTGSAVERLVPEPLVGNLSGIEKEQLDAQRVGVAAAVAFGSGALMLGMFVLQLGVLSTFLSEPVVKALTSGAALHVLLSQLPSLLGLSLPRQIGCFSLFKTLASLLTALPRSSPAELTISALSLALLVPVKELNVRFRDRLPTPIPGEVVLVLLASVLCFTSSVDTRYQVQIVGLLPGGFPQPLLPNLAELPRILADSLPIALVSFAVSASLASIHADKYSYTIDSNQEFLAHGASNLISSLFSCFPNSATLATTNLLVDAGGKTQLAGLFSCTVVLSVLLWLGPFFYYLPKAVLACINISSMRQVFCQMQELPQLWHISRVDFLLQVPGLCILSYPTPLYFGTRGQFRCNLEWHLGLGEGEKETSKPDGPMVAVAEPVRVVVLDFSGVTFADAAGAREVVQVRERLASRCRDARIRLLLAQCNALVQGTLTRVGLLDRVTPDQLFVSVQDAAAYALGSLLRGSSTRSGSQEALGCGK

SEQ ID NO: 11306 - protein, 838 aa, Homo sapiens
MSSWIRWHGPAMARLWGFCWLVVGFWRAAFACPTSCKCSASRIWCSDPSPGIVAFPRLEPNSVDPENITEIFIANQKRLEIINEDDVEAYVGLRNLTIVDSGLKFVAHKAFLKNSNLQHINFTRNKLTSLSRKHFRHLDLSELILVGNPFTCSCDIMWIKTLQEAKSSPDTQDLYCLNESSKNIPLANLQIPNCGLPSANLAAPNLTVEEGKSITLSCSVAGDPVPNMYWDVGNLVSKHMNETSHTQGSLRITNISSDDSGKQISCVAENLVGEDQDSVNLTVHFAPTITFLESPTSDHHWCIPFTVKGNPKPALQWFYNGAILNESKYICTKIHVTNHTEYHGCLQLDNPTHMNNGDYTLIAKNEYGKDEKQISAHFMGWPGIDDGANPNYPDVIYEDYGTAANDIGDTTNRSNEIPSTDVTDKTGREHLSVYAVVVIASVVGFCLLVMLFLLKLARHSKFGMKDFSWFGFGKVKSRQGVGPASVISNDDDSASPLHHISNGSNTPSSSEGGPDAVIIGMTKIPVIENPQYFGITNSQLKPDTFVQHIKRHNIVLKRELGEGAFGKVFLAECYNLCPEQDKILVAVKTLKDASDNARKDFHREAELLTNLQHEHIVKFYGVCVEGDPLIMVFEYMKHGDLNKFLRAHGPDAVLMAEGNPPTELTQSQMLHIAQQIAAGMVYLASQHFVHRDLATRNCLVGENLLVKIGDFGMSRDVYSTDYYRVGGHTMLPIRWMPPESIMYRKFTTESDVWSLGVVLWEIFTYGKQPWYQLSNNEVIECITQGRVLQRPRTCPQEVYELMLGCWQREPHMRKNIKGIHTLLQNLAKASPVYLDILG

SEQ ID NO: 11307 - protein, 553 aa, Homo sapiens
MSSWIRWHGPAMARLWGFCWLVVGFWRAAFACPTSCKCSASRIWCSDPSPGIVAFPRLEPNSVDPENITEIFIANQKRLEIINEDDVEAYVGLRNLTIVDSGLKFVAHKAFLKNSNLQHINFTRNKLTSLSRKHFRHLDLSELILVGNPFTCSCDIMWIKTLQEAKSSPDTQDLYCLNESSKNIPLANLQIPNCGLPSANLAAPNLTVEEGKSITLSCSVAGDPVPNMYWDVGNLVSKHMNETSHTQGSLRITNISSDDSGKQISCVAENLVGEDQDSVNLTVHFAPTITFLESPTSDHHWCIPFTVKGNPKPALQWFYNGAILNESKYICTKIHVTNHTEYHGCLQLDNPTHMNNGDYTLIAKNEYGKDEKQISAHFMGWPGIDDGANPNYPDVIYEDYGTAANDIGDTTNRSNEIPSTDVTDKTGREHLSVYAVVVIASVVGFCLLVMLFLLKLARHSKFGMKDFSWFGFGKVKSRQGVGPASVISNDDDSASPLHHISNGSNTPSSSEGGPDAVIIGMTKIPVIENPQYFGITNSQLKPDTWPRGSPKTA

SEQ ID NO: 11308 - protein, 822 aa, Homo sapiens
MSSWIRWHGPAMARLWGFCWLVVGFWRAAFACPTSCKCSASRIWCSDPSPGIVAFPRLEPNSVDPENITEIFIANQKRLEIINEDDVEAYVGLRNLTIVDSGLKFVAHKAFLKNSNLQHINFTRNKLTSLSRKHFRHLDLSELILVGNPFTCSCDIMWIKTLQEAKSSPDTQDLYCLNESSKNIPLANLQIPNCGLPSANLAAPNLTVEEGKSITLSCSVAGDPVPNMYWDVGNLVSKHMNETSHTQGSLRITNISSDDSGKQISCVAENLVGEDQDSVNLTVHFAPTITFLESPTSDHHWCIPFTVKGNPKPALQWFYNGAILNESKYICTKIHVTNHTEYHGCLQLDNPTHMNNGDYTLIAKNEYGKDEKQISAHFMGWPGIDDGANPNYPDVIYEDYGTAANDIGDTTNRSNEIPSTDVTDKTGREHLSVYAVVVIASVVGFCLLVMLFLLKLARHSKFGMKGPASVISNDDDSASPLHHISNGSNTPSSSEGGPDAVIIGMTKIPVIENPQYFGITNSQLKPDTFVQHIKRHNIVLKRELGEGAFGKVFLAECYNLCPEQDKILVAVKTLKDASDNARKDFHREAELLTNLQHEHIVKFYGVCVEGDPLIMVFEYMKHGDLNKFLRAHGPDAVLMAEGNPPTELTQSQMLHIAQQIAAGMVYLASQHFVHRDLATRNCLVGENLLVKIGDFGMSRDVYSTDYYRVGGHTMLPIRWMPPESIMYRKFTTESDVWSLGVVLWEIFTYGKQPWYQLSNNEVIECITQGRVLQRPRTCPQEVYELMLGCWQREPHMRKNIKGIHTLLQNLAKASPVYLDILG

SEQ ID NO: 11309 - protein, 461 aa, Homo sapiens
MAKKSVDIVSSHWDLNHTHPSACQERHQAVEAVLFQTLLKGSTKIMLSVPSAARVDARAIPQGQRLFEKLLQLTSQNIEIKLVSDVTADSKVLEALKLKGNGWRTEIGGISSDSMTQREAGRGRTLIGDGGIGLALCKRLLAEDDELHLCLACRNMSKAEAVCAALLASHPTAEVTIVQVDVSNLQSFFRASKELKQSCRFQRLDRIYLNAGIMPNPQLNIKALLFGLFSRKVIHMFSTAEGLLTQGDKITADGLQEVFETDVFGHFILIRELEPLLCHSDNPSQLIWTSSRNARKSNFSLEDFQHSKGKEPYSSSKYATDLLSVALNRNFQPAGTALTNLTYGILPPFIWTLLMPAILLAMDYKAKHRTLGVKFASLTSTMALGTMTVWLFHQKPESVNPLIKYLSATTGFGRNYIMTQKMDLDEDTAEKFYQKLLELEKHIRVTIQKTDNQARLSGSCL

SEQ ID NO: 11310 - protein, 341 aa, Homo sapiens
MRKVVLITGASSGIGLALCKRLLAEDDELHLCLACRNMSKAEAVCAALLASHPTAEVTIVQVDVSNLQSVFRASKELKQRFQRLDCIYLNAGIMPNPQLNIKALFFGLFSRKVIHMFSTAEGLLTQGDKITADGLQEVFETNVFGHFILIRELEPLLCHSDNPSQLIWTSSRSARKSNFSLEDFQHSKGKEPYSSSKYATDLLSVALNRNFNQQGLYSNVACPGTALTNLTYGILPPFIWTLLMPAILLLRFFANAFTLTPYNGTEALVWLFHQKPESLNPLIKYLSATTGFGRNYIMTQKMDLDEDTAEKFYQKLLELEKHIRVTIQKTDNQARLSGSCL

SEQ ID NO: 11311 - protein, 223 aa, Homo sapiens
MRKVVLITGASSGIGLALCKRLLAEDDELHLCLACRNMSKAEAVCAALLASHPTAEVTIVQVDVSNLQSFFRASKELKQRFQRLDRIYLNAGIMPNPQLNIKALLFGLFSRKVIHMFSTAEGLLTQGDKITADGLQEVFETDVFGHFILIRELEPLLCHSDNPSQLIWTSSRNARKSNFSLEDFQHSKGKEPYSSSKYATDLLSVALNRNFQPAGAVFVCVCH

SEQ ID NO: 11312 - protein, 333 aa, Homo sapiens
MRKVVLITGASSGIGLALCKRLLAEDDELHLCLACRNMSKAEAVCAALLASHPTAEVTIVQVDVSNLQSVFRASKELKQRFQRLDCIYLNAGIMPNPQLNIKALFFGLFSRAEGLLTQGDKITADGLQEVFETNVFGHFILIRELEPLLCHSDNPSQLIWTSSRSARKSNFSLEDFQHSKGKEPYSSSKYATDLLSVALNRNFNQQGLYSNVACPGTALTNLTYGILPPFIWTLLMPAILLLRFFANAFTLTPYNGTEALVWLFHQKPESLNPLIKYLSATTGFGRNYIMTQKMDLDEDTAEKFYQKLLELEKHIRVTIQKTDNQARLSGSCL

SEQ ID NO: 11313 - protein, 229 aa, Homo sapiens
KVIHMFSTAEGLLTQGDKITADGLQEVFETDVFGHFILIRELEPLLCHSDNPSQLIWTSSRNARKSNFSLEDFQHSKGKEPYSSSKYATDLLSVALNRNFQPAGSLFQCGLSRYSIDQFDIWNSASVYMDTVDAGNILRFFANAFTLTPYNGTEALVWLFHQKPESVNPLIKYLSATTGFGRNYIMTQKMDLDEDTAEKFYQKLLELEKHIRVTIQKTDNQARLSGSCL

SEQ ID NO: 11314 - protein, 1091 aa, Homo sapiens
  VARIANT 205: Xaa = Any Amino Acid
MWQEAMRRRRYLRDRSEEAAGGGDGLPRSRDWLYESYYCMSQQHPLIVFLLLIVMGSCLALLAVFFALGLEVEDHVAFLITVPTALAIFFAIFILVCIESVFKKLLRLFSLVIWICLVAMGYLFMCFGGTVSPWDQVSFFLFIIFVVYTMLPFNMRDAIIASVLTSSSHTIVLSVCLSATPGGKEHLGLADPGQCDHFHLWEPGXTNHKHLMELALQQTYQDTCNCIKSRIKLEFEKRQQERLLLSLLPAHIAMEMKAEIIQRLQGPKAGQMENTNNFHNLYVKRHTNVSILYADIVGFTRLASDCSPGELVHMLNELFGKFDQIAKENECMRIKILGDCYYCVSGLPISLPNHAKNCVKMGLDMCEAIKKVRDATGVDINMRVGVHSGNVLCGVIGLQKWQYDVWSHDVTLANHMEAGGVPGRVHISSVTLEHLNGAYKVEEGDGDIRDPYLKQHLVKTYFVINPKGERRSPQHLFRPRHTLDGAKMRASVRMTRYLESWGAAKPFAHLHHRDSMTTENGKISTTDVPMGQHNFQNRTLRTKSQKKRFEEELNERMIQAIDGINAQKQWLKSEDIQRISLLFYNKVLEKEYRATALPAFKYYVTCACLIFFCIFIVQILVLPKTSVLGISFGAAFLLLAFILFVCFAGQLLQCSKKASPLLMWLLKSSGIIANRPWPRISLTIITTAIILMMAVFNMFFLSDSEETIPPTANTTNTSFSASNNQVAILRAQNLFFLPYFIYSCILGLISCSVFLRVNYELKMLIMMVALVGYNTILLHTHAHVLGDYSQVLFERPGIWKDLKTMGSVSLSIFFITLLVLGRQNEYYCRLDFLWKNKFKKEREEIETMENLNRVLLENVLPAHVAEHFLARSLKNEELYHQSYDCVCVMFASIPDFKEFYTESDVNKEGLECLRLLNEIIADFDDLLSKPKFSGVEKIKTIGSTYMAATGLSAVPSQEHSQEPERQYMHIGTMVEFAFALVGKLDAINKHSFNDFKLRVGINHGPVIAGVIGAQKPQYDIWGNTVNVASRMDSTGVLDKIQVTEETSLVLQTLGYTCTCRGIINVKGKGDLKTYFVNTEMSRSLSQSNVAS

SEQ ID NO: 11315 - protein, 242 aa, Homo sapiens
MAKHEQILVLDPPTDLKFKGPFTDVVTTNLKLRNPSDRKVCFKVKTTAPRRYCVRPNSGIIDPGSTVTVSVMLQPFDYDPNEKSKHKFMVQTIFAPPNTSDMEAVWKEAKPDELMDSKLRCVFEMPNENDKLNDMEPSKAVPLNASKQDGPMPKPHSVSLNDTETRKLMEECKRLQGEMMKLSEENRHLRDEGLRLRKVAHSDKPGSTSTASFRDNVTSPLPSLLVVIAAIFIGFFLGKFIL

SEQ ID NO: 11316 - protein, 287 aa, Homo sapiens
MAKHEQILVLDPPTDLKFKGPFTDVVTTNLKLRNPSDRKVCFKVKTTAPRRYCVRPNSGIIDPGSTVTVSVMLQPFDYDPNEKSKHKFMVQTIFAPPNTSDMEAVWKEAKPDELMDSKLRCVFEMPNENDKLGITPPGNAPTVTSMSSINNTVATPASYHTKDDPRGLSVLKQEKQKNDMEPSKAVPLNASKQDGPMPKPHSVSLNDTETRKLMEECKRLQGEMMKLSEENRHLRDEGLRLRKVAHSDKPGSTSTASFRDNVTSPLPSLLVVIAAIFIGFFLGKFIL

SEQ ID NO: 11317 - protein, 221 aa, Homo sapiens
MAGGVRPLRGLRALCRVLLFLSQFCILSGGESTEIPPYVMKCPSNGLCSRLPADCIDCTTNFSCTYGKPVTFDCAVKPSVTCVDQDFKSQKNFIINMTCRFCWQLPETDYECTNSTSCMTVSCPRQRYPANCTVRDHVHCLGNRTFPKMLYCNWTGGYKWSTALALSITLGGFGADRFYLGQWREGLGKLFSFGGLGIWTLIDVLLIGVGYVGPADGSLYI

SEQ ID NO: 11318 - protein, 247 aa, Homo sapiens
MAGGVRPLRGLRALCRVLLFLSQFCILSGGEQSQALAQSIKDPGPTRTFTVVPRAAESTEIPPYVMKCPSNGLCSRLPADCIDCTTNFSCTYGKPVTFDCAVKPSVTCVDQDFKSQKNFIINMTCRFCWQLPETDYECTNSTSCMTVSCPRQRYPANCTVRDHVHCLGNRTFPKMLYCNWTGGYKWSTALALSITLGGFGADRFYLGQWREGLGKLFSFGGLGIWTLIDVLLIGVGYVGPADGSLYI

SEQ ID NO: 11319 - protein, 911 aa, Homo sapiens
MADGGGPKEAPSLRSSPGPAPRVPRAVGPSGGGGETPRTAALALRFDKPIKQAFYNTGAVLFVCLCCGAAVLVYFILEAFLRPLLWAVLCGTFLHPFKSSLTRLGRHWLQRLHRAHTPIVLAALLLPLCFVDYGVEALGEQALRRRRLLLLLGAGGPLLYGLYCLGSYLGVQVLLVHAATLICRGLDYFSSLWIWTLVVGYVLTVSFKWNASTERYLRAVSIPVWIILLFHLASLAGSWRIPVFLVIVFLMSVGTLYEKQNGKESSGAELPGQVISMAASTLANLAISITGYESSSEDQPSTQPAEAVDRGESAPTLSTSPSPSSPSPTSPSPTLGRRRPEIGTFLRKKKTSDIYFVSLVWAIVVMQIWLNLWIVQLLPVPIAVWILKKLVIHFGVVDFLEKRYHVWWGIIESFLKERQGALAPWPIVGLGKFLLKVDSKLWHWLNKKMIIWLEKMLDKIISIFIIFLLVIGTLLLALLLTAKVHQESVHMIEVTSNLINETLANHPEWANWLPEAQVVQRALNSAANNVYQYGREWITHKLHKILGDKVNNTAVIEKQVLELWDRLYHSWFVKNVTHSGRHKGQKLHVSRQNSWLGDILDWQDIVSFVHENIETFLSILESLWIVMSRNVSLLFTTVTTLLTILFYSGTALLNFVLSLIIFLTTLFYLLSSSDEYYKPVKWVISLTPLSQPGPSSNIIGQSVEEAIRGVFDASLKMAGFYGLYTWLTHTMFGINIVFIPSALAAILGAVPFLGTYWAAVPAVLDLWLTQGLGCKAILLLIFHLLPTYFVDTAIYSDISGGGHPYLTGLAVAGGAYYLGLEGAIIGPILLCILVVASNIYSAMLVSPTNSVPTPNQTPWPAQPQRTFRDISERSEIFSKVDVVSSAVIFLRKFKFDSEFSSAVAFCPSSCA

SEQ ID NO: 11320 - protein, 314 aa, Homo sapiens
MFSINPLENLKVYISSRPPLVVFMISVSAMAIAFLTLGYFFKIKEIKSPEMAEDWNTFLLRFNDLDLCVSENETLKHLTNDTTTPESTMTSGQARASTQSPQALEDSGPVNISVSITLTLDPLKPFGGYSRNVTHLYSTILGHQIGLSGREAHEEINITFTLPTAWSSDDCALHGHCEQVVFTACMTLTASPGVFPVTVQPPHCVPDTYSNATLWYKIFTTARDANTKYAQDYNPFWCYKGAIGKVYHALNPKLTVIVPDDDRSLINLHLMHTSYFLFVMVITMFCYAVIKGRPSKLRQSNPEFCPEKVALAEA

SEQ ID NO: 11321 - protein, 1680 aa, Homo sapiens
PGLVGEHGGHCKVLWLANSLYSVGLPHHSHGTEPMWHGNHVQPGATHRPNQGLEMLQGLGIGMKAFHNFNYFLFFYNVLLGLGACLSRLLISCLLGMWLIARIDRTIMQSGYEGADMGFSAWIGMLYMDHYHINPVLVSFCHILITNHREKKLQQSTKYWCLNQSAESLRICAMRGGENRPPARVQSSSEELELRHQSLDAFPGRRLPGRGIQPAAKMSSVGKVTQVPNGKAYQQIFQAEVQLVHSLAATRKRAAERSVTLKSGRIPMMKKVETPEGEVMSPRQQKWMHSLPNDWIMENPVLHREKERAKREKARESENTIAAREVRGLMDTIVPEKISTSTFQRQAEHKRKSYESALASFQEEIAQVGKEMEPLIVDTGGLFLKKLTESDEEMNRLFLKVENDTNLEDYTIQALLELWDKVAGRLLLRKQEIKELDEALHSLEFSRTDKLKSVLKKYAEVIEKTSYLMRPEVYRLINEEAMVMNYALLGNRKALAQLFVNLMESTLQQELDSRHRWQGLVDTWKALKKEALLQSFSEFMASESIHTPPAVTKELEVMLKTQNVLQQRRLKHLCTICDLLPPSYSKTQLTEWHSSLNSLNKELDTYHVDCMMWIRLLYEKTWQECLMHVQNCKKQLLDWKAFTEEEAETLVNQFFFQMVGALQGKVEEDLELLDKSFETLADQTEWQSSHLFKYFQEVVQLWEAHQSELLVQELELEKRMEQHRQKHSLESQVQEAHLDRLLDQLRQQSDKETLAFHLEKVKDYLKNMKSRYECFHTLLTKEVMEYPAIMLKELNSYSSALSQYFFVREIFEQNLAGEVIFKFRQPEAHEKPSQKRVKKLRKKQGSKEDMTRSEESISSGTSTARSVEEVEEENDQEMESFITEEVLGQQKKSPLHAKMDESKEGSIQGLEEMQVEREGSLNPSLNEENVKGQGEKKEESEEEDEKEEEEEEEKLEEEKEEKEAQEEQESLSVGEEEDKEEGLEEIYYEDMESFTISSGNTYFVFVPLEEEHCRKSHSTFSAMFINDTSSAKFIEQVTIPSRLILEIKKQLFSEGGNFSPKEINSLCSRLEKEAARIELVESVIMLNMEKLENEYLDQANDVINKFESKFHNLSVDLIFIEKIQRLLTNLQVKIKCQVAKSNSQTNGLNFSLQQLQNKIKTCQESRGEKTTVTTEELLSFVQTWKEKLSQRIQYLNCSLDRVSMTELVFTNTILKDQEEDSDILTSSEALEEEAKLDVVTPESFTQLSRVGKPLIEDPAVDVIRKLLQLPNTKWPTHHCDKDPSQTGFKRHRCQPENSGKKAVPSASATSAGSLQTTHPPLSHSFTPHPKPNKMERKYRVLGDKPPPAAEDFKGIILTLLWESSENLLTVAEEFYRKEKRPVTRPDCMCDTFDQCAENISKKILEYQSQANKYHNSCLIELRIQIRRFEELLPQVCWLVMENFKEHHWKKFFTSVKEIRGQFEEQQKRLEKRKDKNAQKLHLNLGHPVHFQEMESLHLSEEERQEELDSMIRMNKEKLEECTRRNGQVFITNLATFTEKFLLQLDEVVTIDDVQVARMEPPKQKLSMLIRRKLAGLSLKEESEKPLIERGSRKWPGIKPTEVTIQNKILLQPTSSISTTKTTLGHLAAVEARDAVYLKYLASFEEELKRIQDDCTSQIKEAQRWKDSWKQSLHTIQGLYV

SEQ ID NO: 11322 - protein, 487 aa, Homo sapiens
VHRVLARVMAVLGVQLVVTLLTATLMHRLAPHCSFARWLLCNGSLFRYKHPSEEELRALAGKPRPRGRKERWANGLSEEKPLSVPRDAPFQLETCPLTTVDALVLRFFLEYQWFVDFAVYSGGVYLFTEAYYYMLGPAKETNIAVFWCLLTVTFSIKMFLTVTRLYFSAEEGGERSVCLTFAFLFLLLAMLVQVVREETLELGLEPGLASMTQNLEPLLKKQGWDWALPVAKLAIRVGLAVVGSVLGAFLTFPGLRLAQTHRDALTMSEDRPMLQFLLHTSFLSPLFILWLWTKPIARDFLHQPPFGETRFSLLSDSAFDSGRLWLLVVLCLLRLAVTRPHLQAYLCLAKARVEQLRREAGRIEAREIQQRVVRVYCYVTVVSLQYLTPLILTLNCTLLLKTLGGYSWGLGPAPLLSPDPSSASAAPIGSGEDEVQQTAARIAGALGGLLTPLFLRGVLAYLIWWTAACQLLASLFGLYFHQHLAGS

SEQ ID NO: 11323 - protein, 1617 aa, Homo sapiens [sequence omitted]

SEQ ID NO: 11324 - protein, 139 aa, Homo sapiens [sequence omitted]

SEQ ID NO: 11325 - protein, 484 aa, Homo sapiens
MKKGIRYETSRKTSYIFQQPQHGPWQTRMRKISNHGSLRVAKVAYPLGLCVGVFIYVAYIKWHRATATQAFFSITRAAPGARWGQQAHSPLGTAADGHEVFYGIMFDAGSTGTRVHVFQFTRPPRETPTLTHETFKAVKPGLSAYADDVEKSAQGIRELLDVAKQDIPFDFWKATPLVLKATAGLRLLPGEKAQKLLQKVKEVFKASPFLVGDDCVSIMNGTDEGVSAWITINFLTGSLKTPGGSSVGMLDLGGGSTQIAFLPRVEGTLQASPPGYLTALRMFNRTYKLYSYSYLGLGLMSARLAILGGVEGQPAKDGKELVSPCLSPSFKGEWEHAEVTYRVSGQKAAASLHELCAARVSEVLQNRVHRTEEVKHVDFYAFSYYYDLAAGVGLIDAEKGGSLVVGDFEIAAKYVCRTLETQPQSSPFSCMDLTYVSLLLQEFGFPRSKVLKLTRKIDNVETSWALGAIFHYIDSLNRQKSPAS

SEQ ID NO: 11326 - protein, 503 aa, Homo sapiens
GGRGGAGRGGGAQKTGCRLLPGKGHSSPWVWRSARCMQPQHGPWQTRMRKISNHGSLRVAKVAYPLGLCVGVFIYVAYIKWHRATATQAFFSITRAAPGARWGQQAHSPLGTAADGHEVFYGIMFDAGSTGTRVHVFQFTRPPRETPTLTHETFKALKPGLSAYADDVEKSAQGIRELLDVAKQDIPFDFWKATPLVLKATAGLRLLPGEKAQKLLQKVKEVFKASPFLVGDDCVSIMNGTDEGVSAWITINFLTGSLKTPGGSSVGMLDLGGGSTQIAFLPRVEGTLQASPPGYLTALRMFNRTYKLYSYSYLGLGLMSARLAILGGVEGQPAKDGKELVSPCLSPSFKGEWEHAEVTYRVSGQKAAASLHELCAARVSEVLQNRVHRTEEVKHVDFYAFSYYYDLAAGVGLIDAEKGGSLVVGDFEIAAKYVCRTLETQPQSSPFSCMDLTYVSLLLQEFGFPRSKVLKLTRKIDNVETSWALGAIFHYIDSLNRQKSPAS

SEQ ID NO: 11327 - protein, 314 aa, Homo sapiens
MTLGSLGNSSSSVSATFLLSGIPGLERMHIWISIPLCFMYLVSIPGNCTILFIIKTERSLHEPMYLFLSMLALIDLGLSLCTLPTVLGIFWVGAREISHDACFAQLFFIHCFSFLESSVLLSMAFDRFVAICHPLHYVSILTNTVIGRIGLVSLGRSVALIFPLPFMLKRFPYCGSPVLSHSYCLHQEVMKLACADMKANSIYGMFVIVSTVGIDSLLILFSYALILRTVLSIASRAERFKALNTCVSHICAVLLFYTPMIGLSVIHRFGKQAPHLVQVVMGFMYLLFPPVMNPIVYSVKTKQIRDRVTHAFCY

SEQ ID NO: 11328 - protein, 223 aa, Homo sapiens
MRTFGKCLVVEPKRAVSREDSVKPVAHLTVKKIFVGGIKEDTEEYNLRDYFEKCSKIETIEVMEDRQSGKKRGFAFVTFDDHDIIDKIVVQKYHTINGHNCEVKKALSKQEMQSAGSQRGHGGGSGNFMGRGGNFGGAGGNFGLGGYGGGGGGYDGYNEGGNFGGGNYGGGGNYNDFGNHSGQQQSNYGPMKGGSFGGRSSGSPYGGGYGSGGGSGGYGSRRF

SEQ ID NO: 11329 - protein, 729 aa, Homo sapiens
MSGQPPPPPPQQQQQQQQLSPPPPAALAPVSGVVLPAPPAVSAGSSPAGSPGGGAGGEGLGAAAAALLLHPPPPPPPATAAPPPPPPPPPPPASAAAPASGPPAPPGLAAGPGPAGGAPTPALVAGSSAAAPFPHGDSALNEQEKELQRRLKRLYPAVDEQETPLPRSWSPKDKFSYIGLSQNNLRVHYKGHGKTPKDAASVRATHPIPAACGIYYFEVKIVSKGRDGYMGIGLSAQGVNMNRLPGWDKHSYGYHGDDGHSFCSSGTGQPYGPTFTTGDVIGCCVNLINNTCFYTKNGHSLGIAFTDLPPNLYPTVGLQTPGEVVDANFGQHPFVFDIEDYMREWRTKIQAQIDRFPIGDREGEWQTMIQKMVSSYLVHHGYCATAEAFARSTDQTVLEELASIKNRQRIQKLVLAGRMGEAIETTQQLYPSLLERNPNLLFTLKVRQFIEMVNGTDSEVRCLGGRSPKSQDSYPVSPRPFSSPSMSPSHGMNIHNLASGKGSTAHFSGFESCSNGVISNKAHQSYCHSNKHQSSNLNVPELNSINMSRSQQVNNFTSNDVDMETDHYSNGVGETSSNGFLNGSSKHDHEMEDCDTEMEVDSSQLRRQLCGGSQAAIERMIHFGRELQAMSEQLRRDCGKNTANKKMLKDAFSLLAYSDPWNSPVGNQLDPIQREPVCSALNSAILETHNLPKQPPLALAMGQATQCLGLMARSGIGSCAFATVEDYLH

SEQ ID NO: 11330 - protein, 415 aa, Homo sapiens
  VARIANT 103, 182: Xaa = Any Amino Acid
MSEKSFLGMGVLPEHRYHENHSKKPKWERKNILVNIVIIGHIDSGKSTTTGHLISKCAQQECDVTIDVTISPWKVETSEYYMTNIDAPRHRDFIENVITGTSXADCAVLIVAAGVGEFEAGVSKNEQTHEYALLTYTLGVKQLIVGVKMDSTEPPYSQKRHKEVIKKISTHIKKIDYNPIPXIVAFVPISVWNCDSMLVPRVHMPGLKGWKVTRNDGNDSGTMLPEALNYILPPAHPTDKSLRLPLQDVYNIGDIGTVSMGWAETGVLKPGTVVTFAPVNVTTEGKSVEMHHEALSEALPGDNVGFDVKNVSVKDVRCGNVAGDSINDPPVEAVDFTAQVIILNHPGHISTDCGPVLNCQTAHIACKFAELKKKTDCCSGKKLEDLKFLKSGDASTMDMVSSNPMCVESFSDELP

SEQ ID NO: 11331 - protein, 522 aa, Homo sapiens
MQPWHGKAMQRASEAGATAPKASARNARGAPMDPNESPAAPEAALPKAGKFGPARKSGSRQKKSAPDTQERPPVRATGARAKKAPQRAQDTQPSDATSAPGAEGLEPPAAREPALSRAGSCRQRGARCSTKPRPPPGPWDVPSPGLPVSAPILVRRDAAPGASKLRAVLEKLKLSRDDISTAAGMVKGVVDHLLLRLKCDSAFRGVGLLNTGSYYEHVKISAPNEFDVMFKLEVPRIQLEEYSNTRAYYFVKFKRNPKENPLSQFLEGEILSASKMLSKFRKIIKEEINDIKDTDVIMKRKRGGSPAVTLLISEKISVDITLALESKSSWPASTQEGLRIQNWLSAKVRKQLRLKPFYLVPKHAKEGNGFQEETWRLSFSHIEKEILNNHGKSKTCCENKEEKCCRKDCLKLMKYLLEQLKERFKDKKHLDKFSSYHVKTAFFHVCTQNPQDSQWDRKDLGLCFDNCVTYFLQCLRTEKLENYFIPEFNLFSSNLIDKRSKEFLTKQIEYERNNEFPVFDEF

SEQ ID NO: 11332 - protein, 459 aa, Homo sapiens
MDAFRRNTTISLLTTDDAMVSIDPTMPANSERAFKINELKAEVANHLAVLEKRVELEGLKVVEIEKCKSDIKKMREELAARSSRTNCPCKYSFLDNHKKLTPRRDVPTYPKYLLSPETIEALRKPTFDVWLWEPNEMLSCLEHMYHDLGLVRDFSINPVTLRRWLFCVHDNYRNNPFHNFRHCFCVAQMMYSMVWLCSLQEKFSQTDILILMTAAICHDLDHPGYNNTYQINARTELAVRYNDISPLENHHCAVAFQILAEPECNIFSNIPPDGFKQIRQGMITLILATDMARHAEIMDSFKEKMENFDYSNEEHMTLLKMILIKCCDISNEVRPMEVAEPWVDCLLEEYFMQSDREKSEGLPVAPFMDRDKVTKATAQIGFIKFVLIPMFETVTKLFPMVEEIMLQPLWESRDRYEELKRIDDAMKELQKKTDSLTSGATEKSRERSRDVKNSEGDCA

SEQ ID NO: 11333 - protein, 350 aa, Homo sapiens
MLEGAELYFNVDHGYLEGLVRGCKASLLTQQDYINLVQCETLEDLKIHLQTTDYGNFLANHTNPLTVSKIDTEMRKRLCGEFEYFRNHSLEPLSTFLTYMTCSYMIDNVILLMNGALQKKSVKEILGKCHPLGRFTEMEAVNIAETPSDLFNAILIETPLAPFFQDCMSENALDELNIELLRNKLYKSYLEAFYKFCKNHGDVTAEVMCPILEFEADRRAFIITLNSFGTELSKEDRETLYPTFGKLYPEGLRLLAQAEDFDQMKNVADHYGVYKPLFEAVGGSGGKTLEDVFYEREVQMNVLAFNRQFHYGVFYAYVKLKEQEIRNIVWIAECISQRHRTKINSYIPIL

SEQ ID NO: 11334 - protein, 1022 aa, Homo sapiens [sequence omitted]

SEQ ID NO: 11335 - protein, 797 aa, Homo sapiens [sequence omitted]

SEQ ID NO: 11336 - protein, 1020 aa, Homo sapiens
ILKVKGELRAAKEMKDEAGERDREVSSLNSKLLSLQLDIKNLHDVCKRQRKTLQDNQLCMEEAMNSSHDKKQAQALAFEESEVEFGSSKQCHLRQLQQLKKKLLVLQQELEFHTEELQTSYYSLRQYQSILEKQTSDLVLLHHHCKLKEDEVILYEEEMGNHNENTGEKLHLAQEQLALAGDKIASLERSLNLYRDKYQSSLSNIELLECQVKMLQGELGGIMGQEPENKGDHSKVRIYTSPCMIQEHQETQKRLSEVWQKVSQQDDLIQELRNKLACSNALVLEREKALIKLQADFASCTATHRYPPSSSEECEDIKKILKHLQEQKDSQCLHVEEYQNLVKDLRVELEAVSEQKRNIMKDMMKLELDLHGLREETSAHIERKDKDITILQCRLQELQLEFTETQKLTLKKDKFLQEKDEMLQELEKKLTQVQNSLLKKEKELEKQQCMATELEMTVKEAKQDKSKEAECKALQAEVQKLKNSLEEAKQQERLAAQQAAQCKEEAALAGCHLEDTQRKLQKGLLLDKQKADTIQELQRELQMLQKESSMAEKEQTSNRKRVEELSLELSEALRKLENSDKEKRQLQKTVAEQDMKMNDMLDPQSLFFQHREQGSIKCKLEEDLQEATKLLEDKREQLKKSKEHEKLMEGELEALRQEFKKKDKTLKENSRKLEEENENLRAELQCCSTQLESSLNKYNTSQQVIQDLNKEIALQKESLMSLQAQLDKALQKEKHYLQTTITKEAYDALSRKSAACQDDLTQALEKLNHVTSETKSLQQSLTQTQEKKAQLEEEIIAYEERMKKLNTELRKLRGFHQESELEVHAFDKKLEEMSCQVLQWQKQHQNDLKMLAAKEEQLREFQEEMAALKENLLEDDKEPCCLPQWSVPKDTCRLYRGNDQIMTNLEQWAKQQKVANEKLGNQLREQVKYIAKLSGEKDHLHSVMVHLQQENKKLKKEIEEKKMKAENTRLCTKALGPSRTESTQREKVCGTLGWKGLPQDMGQRMDLTKYIGMPHCPGTS

SEQ ID NO: 11337 - protein, 711 aa, Homo sapiens
MSSVQSQQEQLSQSDPSPSPNSCSSFELIDMDAGSLYEPVSPHWFYCKIIDSKETWIPFNSEDSQQLEEAYSSGKGCNGRVVPTDGGRYDVHLGERMRYAVYWDELASEVRRCTWFYKGDKDNKYVPYSESFSQVLEETYMLAVTLDEWKKKLESPNREIIILHNPKLMVHYQPVAGSDDWGSTPTEQGRPRTVKRGVENISVDIHCGEPLQIDHLVFVVHGIGPACDLRFRSIVQCVNDFRSVSLNLLQTHFKKAQENQQIGRVEFLPVNWHSPLHSTGVDVDLQRITLPSINRLRHFTNDTILDVFFYNSPTYCQTIVDTVASEMNRIYTLFLQRNPDFKGGVSIAGHSLGSLILFDILTNQKDSLGDIDSEKDSLNIVMDQGDTPTLEEDLKKLQLSEFFDIFEKEKVDKEALALCTDRDLQEIGIPLGPRKKILNYFSTRKNSMGIKRPAPQPASGANIPKESEFCSSSNTRNGDYLDVGIGQVSVKYPRLIYKPEIFFAFGSPIGMFLTVRGLKRIDPNYRFPTCKGFFNIYHPFDPVAYRIEPMVVPGVEFEPMLIPHHKGRKRMHLELREGLTRMSMDLKNNLLGSLRMAWKSFTRAPYPALQASETPEETEAEPESTSEKPSDVNTEETSVAVKEEVLPINVGMLNGGQRIDYVLQEKPIESFNEYLFALQSHLCYWESEDTVLLVLKEIYQTQGIFLDQPLQ

SEQ ID NO: 11338 - protein, 531 aa, Homo sapiens
MVSKLTSLQQELLSALLSSGVTKEVLVQALEELLPSPNFGVKLETLPLSPGSGAEPDTKPVFHTLTNGHAKGRLSGDEGSEDGDDYDTPPILKELQALNTEEAAEQRAEVDRMLSEDPWRAAKMIKGYMQQHNIPQREVVDVTGLNQSHLSQHLNKGTPMKTQKRAALYTWYVRKQREILRQFSQQSHGPGQSDDACSEPTNKKMRRNRFKWGPASQQILYQAYDRQKNPSKEEREALVEECNRAECLQRGVSPSKAHGLGSNLVTEVRVYNWFANRRKEEAFRQKLAMDAYSSNQTHSLNPLLSHGSPHHQPSSSPPNKLSGVRYSQQGNNEITSSSTISHHGNSAMVTSQSVLQQVSPASLDPGHNLLSPDGKMISVSGGGLPPVSTLTNIHSLSHHNPQQSQNLIMTPLSGVMAIAQSLNTSQAQSVPVINSVAGSLAALQPVQFSQQLHSPHQQPLMQQSPGSHMAQQPFMAAVTQLQNSHMYAHKQEPPQYSHTSRFPSAMVVTDTSSISTLTNMSSSKQCPLQAW

SEQ ID NO: 11339 - protein, 358 aa, Homo sapiens
MPVPPPPAPPPPPTFALANTEKPTLNKTEQAGRNALLSDISKGKKLKKTVTNDRSAPILDKPKGAGAGGGGGGFGGGGGFGGGGGGGGGGSFGGGGPPGLGGLFQAGMPKLRSTANRDNHSGGSRPPLLPPGGRSTSAKPFSPPSGPGRFPVPSPGHRSGPPEPQRNRMPPPRPDVGSKPDSIPPPVPSTPRPIQSSLHNRGSPPVPGGPRQPSPGPTPPPPPVRDPPGRSGPLPPPPPVSRNGSTSRALPATPQLPSRSGVDSPRSGPRPPLPPDRPSAGAPPPPPPSTSIRNGFQDSPCEDEWESRFYFHPISDLPPPEPYVQTTKSYPSKLARNESRSGSNRRERGAPPLPPIPR

SEQ ID NO: 11340 - protein, 1453 aa, Homo sapiens
MIKCLSVEVQAKLRSGLAISSLGQCVEELALNSIDAEAKCVAVRVNMETFQVQVIDNGFGMGSDDVEKVGNRYFTSKCHSVQDLENPRFYGFRGEALANIADMASAVEISSKKNRTMKTFVKLFQSGKALKACEADVTRASAGTTVTVYNLFYQLPVRRKCMDPRLEFEKVRQRIEALSLMHPSISFSLRNDVSGSMVLQLPKTKDVCSRFCQIYGLGKSQKLREISFKYKEFELSGYISSEAHYNKNMQFLFVNKRLVLRTKLHKLIDFLLRKESIICKPKNGPTSRQMNSSLRHRSTPELYGIYVINVQCQFCEYDVCMEPAKTLIEFQNWDTLLFCIQEGVKMFLKQEKLFVELSGEDIKEFSEDNGFSLFDATLQKRVTSDERSNFQEACNNILDSYEMFNLQSKAVKRKTTAENVNTQSSRDSEATRKNTNDAFLYIYESGGPGHSKMTEPSLQNKDSSCSESKMLEQETIVASEAGENEKHKKSFLEHSSLENPCGTSLEMFLSPFQTPCHFEESGQDLEIWKESTTVNGMAANILKNNRIQNQPKRFKDATEVGCQPLPFATTLWGVHSAQTEKEKKKESSNCGRRNVFSYGRVKLCSTGFITHVVQNEKTKSTETEHSFKNYVRPGPTRAQETFGNRTRHSVETPDIKDLASTLSKESGQLPNKKNCRTNISYGLENEPTATYTMFSAFQEGSKKSQTDCILSDTSPSFPWYRHVSNDSRKTDKLIGFSKPIVRKKLSLSSQLGSLEKFKRQYGKVENPLDTEVEESNGVTTNLSLQVEPDILLKDKNRLENSDVCKITTMEHSDSDSSCQPASHILDSEKFPFSKDEDCLEQQMPSLRESPMTLKELSLFNRKPLDLEKSSESLASKLSRLKGSERETQTMGMMSRFNELPNSDSSRKDSKLCSVLTQDFCMLFNNKHEKTENGVIPTSDSATQDNSFNKNSKTHSNSNTTENCVISETPLVLPYNNSKVTGKDSDVLIRASEQQIGSLDSPSGMLMNPVEDATGDQNGICFQSEESKARACSETEESNTCCSDWQRHFDVALGRMVYVNKMTGLSTFIAPTEDIQAACTKDLTTVAVDVVLENGSQYRCQPFRSDLVLPFLPRARAERTVMRQDNRDTVDDTVSSESLQSLFSEWDNPVFARYPEVAVDVSSGQAESLAVKIHNILYPYRFTKGMIHSMQVLQQVDNKFIACLMSTKTEENGEAGGNLLVLVDQHAAHERIRLEQLIIDSYEKQQAQGSGRKKLLSSTLIPPLEITVTEEQRRLLWCYHKNLEDLGLEFVFPDTSDSLVLVGKVPLCFVEREANELRRGRSTVTKSIVEEFIREQLELLQTTGGIQGTLPLTVQKVLASQACHGAIKFNDGLSLQESCRLIEALSSCQLPFQCAHGRPSMLPLADIDHLEQEKQIKPNLTKLRKMAQAWRLFGKAECDTRQSLQQSMPPCEPP

SEQ ID NO: 11341 - protein, 1429 aa, Homo sapiens
MIKCLSVEVQAKLRSGLAISSLGQCVEELALNSIDAEAKCVAVRVNMETFQVQVIDNGFGMGSDDVEKVGNRYFTSKCHSVQDLENPRFYGFRGEALANIADMASAVEISSKKNRTMKTFVKLFQSGKALKACEADVTRASAGTTVTVYNLFYQLPVRRKCMDPRLEFEKVRQRIEALSLMHPSISFSLRNDVSGSMVLQLPKTKDVCSRFCQIYGLGKSQKLREISFKYKEFELSGYISSEAHYNKNMQFLFVNKRLVLRTKLHKLIDFLLRKESIICKPKNGPTSRQMNSSLRHRSTPELYGIYVINVQCQFCEYDVCMEPAKTLIEFQNWDTLLFCIQEGVKMFLKQEKLFVELSGEDIKEFSEDNGFSLFDATLQKRVTSDERSNFQEACNNILDSYEMFNLQSKAVKRKTTAENVNTQSSRDSEATRKNTNDAFLYIYESGGPGHSKMTEPSLQNKDSSCSESKMLEQETIVASEAGENEKHKKSFLEHSSLENPCGTSLEMFLSPFQTPCHFEESGQDLEIWKESTTVNGMAANILKNNRIQNQPKRFKDATEVGCQPLPFATTLWGVHSAQTEKEKKKESSNCGRRNVFSYGRVKLCSTGFITHVVQNEKTKSTETEHSFKNYVRPGPTRAQETFGNRTRHSVETPDIKDLASTLSKESGQLPNKKNCRTNISYGLENEPTATYTMFSAFQEGSKKSQTDCILSDTSPSFPWYRHVSNDSRKTDKLIGFSKPIVRKKLSLSSQLGSLEKFKRQYGKVENPLDTEVEESNGVTTNLSLQVEPDILLKDKNRLENSDVCKITTMEHSDSDSSCQPASHILDSEKFPFSKDEDCLEQQMPSLRESPMTLKELSLFNRKPLDLEKSSESLASKLSRLKGSERETQTMGMMSRFNELPNSDSSRKDSKLCSVLTQDFCMLFNNKHEKTENGVIPTSDSATQDNSFNKNSKTHSNSNTTENCVISETPLVLPYNNSKVTGKDSDVLIRASEQQIGSLDSPSGMLMNPVEDATGDQNGICFQSEESKARACSETEESNTCCSDWQRHFDVALGRMVYVNKMTGLSTFIAPTEDIQAACTKDLTTVAVDVVLENGSQYRCQPFRSDLVLPFLPRARAERTVMRQDNRDTVDDTVSSESLQSLFSEWDNPVFARYPEVAVDVSSGQAESLAVKIHNILYPYRFTKGMIHSMQVLQQVDNKFIACLMSTKTEENGEADSYEKQQAQGSGRKKLLSSTLIPPLEITVTEEQRRLLWCYHKNLEDLGLEFVFPDTSDSLVLVGKVPLCFVEREANELRRGRSTVTKSIVEEFIREQLELLQTTGGIQGTLPLTVQKVLASQACHGAIKFNDGLSLQESCRLIEALSSCQLPFQCAHGRPSMLPLADIDHLEQEKQIKPNLTKLRKMAQAWRLFGKAECDTRQSLQQSMPPCEPP

SEQ ID NO: 11342 - protein, 497 aa, Homo sapiens
MTLGSCCCEIMSSESSPAALSEADADIDVVGGGSGGGELPARSGPRAPRDVLPHGHEPPAEEAEADLAEDEEESGGCSDGEPRALASRGAAAAAGSPGPGAAAARGAAGPGPGPPSGGAATRSPLVKPPYSYIALITMAILQSPKKRLTLSEICEFISGRFPYYREKFPAWQNSIRHNLSLNDCFVKIPREPGNPGKGNYWTLDPESADMFDNGSFLRRRKRFKRQPLPPPHPHPHPHPELLLRGGAAAAGDPGAFLPGFAAYGAYGYGYGLALPAYGAPPPGPAPHPHPHPHPHAFAFAAAAAAAPCQLSVPPGRAAAPPPGPPTASVFAGAGSAPAPAPASGSGPGPGPAGLPAFLGAELGCAKAFYPASLSPPAAGTAAGLPTALLRQGLKTDAGGGAGGGGAGAGQRPSFSIDHIMGHGGGGAAPPGAGEGSPGPPFAAAAGPGGQAQVLAMLTAPALAPVAGHIRLSHPGDALLSSGSRFASKVAGLSGCHF

SEQ ID NO: 11343 - protein, 465 aa, Homo sapiens
MTLSTEMSDASGLAEETDIDVVGEGEDEEDEEEEDDDEGGGGGPRLAVPAQRRRRRRSYAGEDELEDLEEEEDDDDILLAPPAGGSPAPPGPAPAAGAGAGGGGGGGGAGGGGSAGSGAKNPLVKPPYSYIALITMAILQSPKKRLTLSEICEFISGRFPYYREKFPAWQNSIRHNLSLNDCFVKIPREPGNPGKGNYWTLDPESADMFDNGSFLRRRKRFKRQPLLPPNAAAAESLLLRGAGAAGGAGDPAAAAALFPPAPPPPPHAYGYGPYGCGYGLQLPPYAPPSALFAAAAAAAAAAAFHPHSPPPPPPPHGAAAELARTAFGYRPHPLGAALPGPLPASAAKAGGPGASALARSPFSIESIIGGSLGPAAAAAAAAQAAAAAQASPSPSPVAAPPAPGSSGGGCAAQAAVGPAAALTRSLVAAAAAAASSVSSSAALGTLHQGTALSSVENFTARISNC

SEQ ID NO: 11344 - protein, 1064 aa, Homo sapiens
MNHDFQALALESRGMGELLPTKKFWEPDDSTKDGQKGIFLGDDEWRETAWGASHHSMSQPIMVQRRSGQGFHGNSEVNAILSPRSESGGLGVSMVEYVLSSSPADKLDSRFRKGNFGTRDAETDGPEKGDQKGKASPFEEDQNRDLKQGDDDDSKINGRGLPNGMDADCKDFNRTPGSRQASPTEVVERLGPNTNPSEGLGPLPNPTANKPLVEEFSNPETQNLDAMEQVGLESLQFDYPGNQVPMDSSGATVGLFDYNSQQQLFQRTNALTVQQLTAAQQQQYALAAAQQPHIAGVFSAGLAPAAFVPNPYIISAAPPGTDPYTAAGLAAAATLAGPAVVPPQYYGVPWGVYPANLFQQQAAAAANNTASQQAASQAQPGQQQVLRAGAGQRPLTPNQGQQGQQAESLAAAAAANPTLAFGQGLATGMPGYQVLAPTAYYDQTGALVVGPGARTGLGAPVRLMAPTPVLISSAAAQAAAAAAAGGTASSLTGSTNGLFRPIGTQPPQQQQQQPSTNLQSNSFYGSSSLTNSSQSSSLFSHGPGQPGSTSLGFGSGNSLGAAIGSALSGFGSSVGSSASSSATRRESLSTSSDLYKRSSSSLAPIGQPFYNSLGFSSSPSPIGMPLPSQTPGHSLTPPPSLSSHGSSSSLHLGGLTNGSGRYISAAPGAEAKYRSASSTSSLFSSSSQLFPPSRLRYNRSDIMPSGRSRLLEDFRNNRFPNLQLRDLIGHIVEFSQDQHGSRFIQQKLERATPAERQMVFNEILQAAYQLMTDVFGNYVIQKFFEFGSLDQKLALATRIRGHVLPLALQMYGCRVIQKALESISSDQQSEMVKELDGHVLKCVKDQNGNHVVQKCIECVQPQSLQFIIDAFKGQVFVLSTHPYGCRVIQRILEHCTAEQTLPILEELHQHTEQLVQDQYGNYVIQHVLEHGRPEDKSKIVSEIRGKVLALSQHKFASNVVEKCVTHASRAERALLIDEVCCQNDGPHSALYTMMKDQYANYVVQKMIDMAEPAQRKIIMHKIRPHITTLRKYTYGKHILAKLEKYYLKNSPDLGPIGGPPNGML

SEQ ID NO: 11345 - protein, 876 aa, Homo sapiens
RFRKGNFGTRDAETDGPEKGDQKGKASPFEEDQNRDLKQGDDDDSKINGRGLPNGMDADCKDFNRTPGSRQASPTEVVERLGPNTNPSEGLGPLPNPTANKPLVEEFSNPETQNLDAMEQVGLESLQFDYPGNQVPMDSSGATVGLFDYNSQQQLFQRTNALTVQQLTAAQQQQYALAAAQQPHIAGVFSAGLAPAAFVPNPYIISAAPPGTDPYTAAGLAAAATLAGPAVVPPQYYGVPWGVYPANLFQQQAAAAANNTASQQAASQAQPGQQQVLRAGAGQRPLTPNQGQQGQQAESLAAAAAANPTLAFGQGLATGMPGYQVLAPTAYYDQTGALVVGPGARTGLGAPVRLMAPTPVLISSAAAQAAAAAAAGGTASSLTGSTNGLFRPIGTQPPQQQQQQPSTNLQSNSFYGSSSLTNSSQSSSLFSHGPGQPGSTSLGFGSGNSLGAAIGSALSGFGSSGGLTNGSGRYISAAPGAEAKYRSASSTSSLFSSSSQLFPPSRLRYNRSDIMPSGRSRLLEDFRNNRFPNLQLRDLIGHIVEFSQDQHGSRFIQQKLERATPAERQMVFNEILQAAYQLMTDVFGNYVIQKFFEFGSLDQKLALATRIRGHVLPLALQMYGCRVIQKALESISSDQQSEMVKELDGHVLKCVKDQNGNHVVQKCIECVQPQSLQFIIDAFKGQVFVLSTHPYGCRVIQRILEHCTAEQTLPILEELHQHTEQLVQDQYGNYVIQHVLEHGRPEDKSKIVSEIRGKVLALSQHKFASNVVEKCVTHASRAERALLIDEVCCQNDGPHSALYTMMKDQYANYVVQKMIDMAEPAQRKIIMHKIRPHITTLRKYTYGKHILAKLEKYYLKNSPDLGPIGGPPNGML

SEQ ID NO: 11346 - protein, 650 aa, Homo sapiens
KEAEAFAYYRRTHTANERRRRGEMRDLFEKLKITLGLLHSSKVSKSLILTRAFSEIQGLTDQADKLIGQKNLLTRKRNILIRKVSSLSGKTEEVVLKKLEYIYAKQQALEAQKRKKKMGSDEFDISPRISKQQEGSSASSVDLGQMFINNRRGKPLILSRKKDQATENTSPLNTPHTSANLVMTPQGQLLTLKGPLFSGPVVAVSPDLLESDLKPQVAGSAVALPENDDLFMMPRIVNVTSLATEGGLVDMGGSKYPHEVPDSKPSDHLKDTVRNEDNSLEDKGRISSRGNRDGRVTLGPTQVFLANKDSGYPQIVDVSNMQKAQEFLPKKISGDMRGIQYKWKESESRGERVKSKDSSFHKLKMKDLKDSSIEMELRKVTSAIEEAALDSSELLTNMEDEDDTDETLTSLLNEIAFLNQQLNDDSVGLAELPSSMDTEFPGDARRAFISKVPPGSRATFQVEHLGTGLKELPDVQGESDSISPLLLHLEDDDFSENEKQLAEPASEPDVLKIVIDSEIKDSLLSNKKAIDGGKNTSGLPAEPESVSSPPTLHMKTGLENSNSTDTLWRPMPKLAPLGLKVANPSSDADGQSLKVMPCLAPIAAKVGSVGHKMNLTGNDQEGRESKVMPTLAPVVAKLGNSGASPSSAGK

SEQ ID NO: 11347 - protein, 2397 aa, Homo sapiens
MTARGQSPLAPLLETLEDPSASHGGQTDAYLTLTSRMTGEEGKEVITEIEKKLPRLYKVLKVSSIIDSLEILFNKGETHSAVVDFEALNVIVRLIEQAPIQMGEEAVRWAKLVIPLVVHSAQKVHLRGATALEMGMPLLLQKQQEIASITEQLMTTKLISELQKLFMSKNETYVLKLWPLFVKLLGRTLHRSGSFINSLLQLEELGFRSGAPMIKKIAFIAWKSLIDNFALNPDILCSAKRLKLLMQPLSSIHVRTETLALTKLEVWWYLLMRLGPHLPANFEQVCVPLIQSTISIDSNASPQGNSCHVATSPGLNPMTPVHKGASSPYGAPGTPRMNLSSNLGGMATIPSIQLLGLEMLLHFLLGPEALSFAKQNKLVLSLEPLEHPLISSPSFFSKHANTLITAVHDSFVAVGKDAPDVVVSAIWKELISLVKSVTESGNKKEKPGSEVLTLLLKSLESIVKSEVFPVSKTLVLMEITIKGLPQKVLGSPAYQVANMDILNGTPALFLIQLIFNNFLECGVSDERFFLSLESLVGCVLSGPTSPLAFSDSVLNVINQNAKQLENKEHLWKMWSVIVTPLTELINQTNEVNQGDALEHNFSAIYGALTLPVNHIFSEQRFPVATMKTLLRTWSELYRAFARCAALVATAEENLCCEELSSKIMSSLEDEGFSNLLFVDRIIYIITVMVDCIDFSPYNIKYQPKVKSPQRPSDWSKKKNEPLGKLTSLFKLIVKVIYSFHTLSFKEAHSDTLFTIGNSITGIISSVLGHISLPSMIRKIFATLTRPLALFYENSKLDEVPKVYSCLNNKLEKLLGEIIACLQFSYTGTYDSELLEQLSPLLCIIFLHKNKQIRKQSAQFWNATFAKVMMLVYPEELKPVLTQAKQKFLLLLPGLETVEMMEESSGPYSDGTENSQLNVKISGMERKSNGKRDSFLAQTKNKKENMKPAAKLKLESSSLKVKGEILLEEEKSTDFVFIPPEGKDAKERILTDHQKEVLKTKRCDIPAMYNNLDVSQDTLFTQYSQEEPMEIPTLTRKPKEDSKMMITEEQMDSDIVIPQDVTEDCGMAEHLEKSSLSNNECGSLDKTSPEMSNSNNDERKKALISSRKTSTECASSTENSFVVSSSSVSNTTVAGTPPYPTSRRQTFITLEKFDGSENRPFSPSPLNNISSTVTVKNNQETMIKTDFLPKAKQREGTFSKSDSEKIVNGTKRSSRRAGKAEQTGNKRSKPLMRSEPEKNTEESVEGIVVLENNPPGLLNQTECVSDNQVHLSESTMEHDNTKLKAATVENAVLLETNTVEEKNVEINLESKENTPPVVISADQMVNEDSQVQITPNQKTLRRSSRRRSEVVESTTESQDKENSHQKKERRKEEEKPLQKSPLHIKDDVLPKQKLIAEQTLQENLIEKGSNLHEKTLGETSANAETEQNKKKADPENIKSEGDGTQDIVDKSSEKLVRGRTRYQTRRASQGLLSSIENSESDSSEAKEEGSRKKRSGKWKNKSNESVDIQDQEEKVVKQECIKAENQSHDYKATSEEDVSIKSPICEKQDESNTVICQDSTVTSDLLQVPDDLPNVCEEKNETSKYAEYSFTSLPVPESNLRTRNAIKRLHKRDSFDNCSLGESSKIGISDISSLSEKTFQTLECQHKRSRRVRRSKGCDCCGEKSQPQEKSLIGLKNTENNDVEISETKKADVQAPVSPSETSQANPYSEGQFLDEHHSVNFHLGLKEDNDTINDSLIVSETKSKENTMQESLPSGIVNFREEICDMDSSEAMSLESQESPNENFKTVGPCLGDSKNVSQESLETKEEKPEETPKMELSLENVTVEGNACKVTESNLEKAKTMELNVGNEASFHGQERTKTGISEEAAIEENKRNDDSEADTAKLNAKEVATEEFNSDISLSDNTTPVKLNAQTEISEQTAAGELDGGNDVSDLHSSEETNTKMKNNEEMMIGEAMAETGHDGETENEGITTKTSKPDEAETNMLTAEMDNFVCDTVEMSTEEGIIDANKTETNTEYSKSEEKLDNNQMVMESDILQEDHHTSQKVEEPSQCLASGTAISELIIEDNNASPQKLRELDPSLVSANDSPSGMQTRCVWSPLASPSTSILKRGLKRSQEDEISSPVNKVRRVSFADPIYQAGLADDIDRRCSIVRSHSSNSSPIGKSVKTSPTTQSKHNTTSAKGFLSPGSRSPKFKSSKKCLISEMAKESIPCPTESVYPPLVNCVAPVDIILPQITSNMWARGLGQLIRAKNIKTIGDLSTLTASEIKTLPIRSPKVSNVKKALRIYHEQQVKTRGLEEIPVFDISEKTVNGIENKSLSPDEERLVSDIIDPVALEIPLSKNLLAQISALALQLDSEDLHNYSGSQLFEMHEKLSCMANSVIKNLQSRWRSPSHENSI

SEQ ID NO: 11348 - protein, 1820 aa, Homo sapiens [sequence omitted]

SEQ ID NO: 11349 - protein, 466 aa, Homo sapiens
MSYPGYPPTGYPPFPGYPPAGQESSFPPSGQYPYPSGFPPMGGGAYPQVPSSGYPGAGGYPAPGGYPAPGGYPGAPQPGGAPSYPGVPPGQGFGVPPGGAGFSGYPQPPSQSYGGGPAQVPLPGGFPGGQMPSQYPGGQPTYPSQPATVTQVTQGTIRPAANFDAIRDAEILRKAMKGFGTDEQAIVDVVANRSNDQRQKIKAAFKTSYGKDLIKDLKSELSGNMEELILALFMPPTYYDAWSLRKAMQGAGTQERVLIEILCTRTNQEIREIVRCYQSEFGRDLEKDIRSDTSGHFERLLVSMCQGNRDENQSINHQMAQEDAQRLYQAGEGRLGTDESCFNMILATRSFPQLRATMEAYSRMANRDLLSSVSREFSGYVESGLKTILQCALNRPAFFAERLYYAMKGAGTDDSTLVRIVVTRSEIDLVQIKQMFAQMYQKTLGTMIAGDTSGDYRRLLLAIVGQ

SEQ ID NO: 11350 - protein, 488 aa, Homo sapiens
MSYPGYPPTGYPPFPGYPPAGQESSFPPSGQYPYPSGFPPMGGGAYPQVPSSGYPGAGGYPAPGGYPAPGGYPGAPQPGGAPSYPGVPPGQGFGVPPGGAGFSGYPQPPSQSYGGGPAQVPLPGGFPGGQMPSQYPGGQPTYPSQINTDSFSSYPVFSPVSLDYSSEPATVTQVTQGTIRPAANFDAIRDAEILRKAMKGFGTDEQAIVDVVANRSNDQRQKIKAAFKTSYGKDLIKDLKSELSGNMEELILALFMPPTYYDAWSLRKAMQGAGTQERVLIEILCTRTNQEIREIVRCYQSEFGRDLEKDIRSDTSGHFERLLVSMCQGNRDENQSINHQMAQEDAQRLYQAGEGRLGTDESCFNMILATRSFPQLRATMEAYSRMANRDLLSSVSREFSGYVESGLKTILQCALNRPAFFAERLYYAMKGAGTDDSTLVRIVVTRSEIDLVQIKQMFAQMYQKTLGTMIAGDTSGDYRRLLLAIVGQ

SEQ ID NO: 11351 - protein, 560 aa, Homo sapiens
MFGIQESIQRSGSSMKEEPLGSGMNAVRTWMQGAGVLDANTAAQSGVGLARAHFEKQPPSNLRKSNFFHFVLALYDRQGQPVEIERTAFVGFVEKEKEANSEKTNNGIHYRLQLLYSNGIRTEQDFYVRLIDSMTKQAIVYEGQDKNPEMCRVLLTHEIMCRFFLKFFLKCNQNCLKNAGNPRDMRRFQVVVSTTVNVDGHVLAVSDNMFVHNNSKHGRRARRLDPSEATPCIKAISPSEGWTTGGATVIIIGDNFFDGLQVIFGTMLVWSELITPHAIRVQTPPRHIPGVVEVTLSYKSKQFCKGTPGRFIYTALNEPTIDYGFQRLQKVIPRHPGDPERLPKEVILKRAADLVEALYGMPHNNQEIILKRAADIAEALYSVPRNHNQLPALANTSVHAGMMGVNSFSGQLAVNVSEASQATNQGFTRNSSSVSPHGYVPSTTPQQTNYNSVTTSMNGYGSAAMSNLGGSPTFLNGSAANSPYAIVPSSPTMASSTSLPSNCSSSSGIFSFSPANMVSAVKQKSAFAPVVRPQTSPPPTCTSTNGNSLQAISGMIVPPM

SEQ ID NO: 11352 - protein, 591 aa, Homo sapiens
MFGIQESIQRSGSSMKEEPLGSGMNAVRTWMQGAGVLDANTAAQSGVGLARAHFEKQPPSNLRKSNFFHFVLALYDRQGQPVEIERTAFVGFVEKEKEANSEKTNNGIHYRLQLLYSNGIRTEQDFYVRLIDSMTKQAIVYEGQDKNPEMCRVLLTHEIMCSRCCDKKSCGNRNETPSDPVIIDRFFLKFFLKCNQNCLKNAGNPRDMRRFQVVVSTTVNVDGHVLAVSDNMFVHNNSKHGRRARRLDPSEGTPSYLEHATPCIKAISPSEGWTTGGATVIIIGDNFFDGLQVIFGTMLVWSELITPHAIRVQTPPRHIPGVVEVTLSYKSKQFCKGTPGRFIYTALNEPTIDYGFQRLQKVIPRHPGDPERLPKEVILKRAADLVEALYGMPHNNQEIILKRAADIAEALYSVPRNHNQLPALANTSVHAGMMGVNSFSGQLAVNVSEASQATNQGFTRNSSSVSPHGYVPSTTPQQTNYNSVTTSMNGYGSAAMSNLGGSPTFLNGSAANSPYAIVPSSPTMASSTSLPSNCSSSSGIFSFSPANMVSAVKQKSAFAPVVRPQTSPPPTCTSTNGNSLQAISGMIVPPM

SEQ ID NO: 11353 - protein, 584 aa, Homo sapiens
MMENYGNLVSLDVLNRDKDEEPTVKQEIEEIEEEVEPQGVIVTRIKSEIDQDPMGRETFELVGRLDKQRGIFLWEIPRESLTQEQRMFRENTNIIRKRPNSEEKCHKCEECGKGFVRKAHFIQHQRVHTGEKPFQCNECGKSFSRSSFVIEHQRIHTGERPYECNYCGKTFSVSSTLIRHQRIHTGERPYQCNQCKQSFSQRRSLVKHQRIHTGEKPHKCSDCGKAFSWKSHLIEHQRTHTGEKPYHCTKCKKSFSRNSLLVEHQRIHTGERPHKCGECGKAFRLSTYLIQHQKIHTGEKPFLCIECGKSFSRSSFLIEHQRIHTGERPYQCKECGKSFSQLCNLTRHQRIHTGDKPHKCEECGKAFSRSSGLIQHQRIHTREKTYPYNETKESFDPNCSLVIQQEVYPKEKSYKCDECGKTFSVSAHLVQHQRIHTGEKPYLCTVCGKSFSRSSFLIEHQRIHTGERPYLCRQCGKSFSQLCNLIRHQGVHTGNKPHKCDECGKAFSRNSGLIQHQRIHTGEKPYKCEKCDKSFSQQRSLVNHQMIHAEVKTQETHECDACGEAFNCRISLIQHQKLHTAWMQ

SEQ ID NO: 11354 - protein, 626 aa, Homo sapiens
MASPSPPPESKGLLTFEDVAVFFTQEEWDYLDPAQRSLYKDVMMENYGNLVSLDVLNRDKDEEPTVKQEIEEIEEEVEPQGVIVTRIKSEIDQDPMGRETFELVGRLDKQRGIFLWEIPRESLTQEQRMFRENTNIIRKRPNSEEKCHKCEECGKGFVRKAHFIQHQRVHTGEKPFQCNECGKSFSRSSFVIEHQRIHTGERPYECNYCGKTFSVSSTLIRHQRIHTGERPYQCNQCKQSFSQRRSLVKHQRIHTGEKPHKCSDCGKAFSWKSHLIEHQRTHTGEKPYHCTKCKKSFSRNSLLVEHQRIHTGERPHKCGECGKAFRLSTYLIQHQKIHTGEKPFLCIECGKSFSRSSFLIEHQRIHTGERPYQCKECGKSFSQLCNLTRHQRIHTGDKPHKCEECGKAFSRSSGLIQHQRIHTREKTYPYNETKESFDPNCSLVIQQEVYPKEKSYKCDECGKTFSVSAHLVQHQRIHTGEKPYLCTVCGKSFSRSSFLIEHQRIHTGERPYLCRQCGKSFSQLCNLIRHQGVHTGNKPHKCDECGKAFSRNSGLIQHQRIHTGEKPYKCEKCDKSFSQQRSLVNHQMIHAEVKTQETHECDACGEAFNCRISLIQHQKLHTAWMQ

SEQ ID NO: 11355 - protein, 612 aa, Homo sapiens
MASPSPPPESKEEWDYLDPAQRSLYKDVMMENYGNLVSLDVLNRDKDEEPTVKQEIEEIEEEVEPQGVIVTRIKSEIDQDPMGRETFELVGRLDKQRGIFLWEIPRESLTQEQRMFRENTNIIRKRPNSEEKCHKCEECGKGFVRKAHFIQHQRVHTGEKPFQCNECGKSFSRSSFVIEHQRIHTGERPYECNYCGKTFSVSSTLIRHQRIHTGERPYQCNQCKQSFSQRRSLVKHQRIHTGEKPHKCSDCGKAFSWKSHLIEHQRTHTGEKPYHCTKCKKSFSRNSLLVEHQRIHTGERPHKCGECGKAFRLSTYLIQHQKIHTGEKPFLCIECGKSFSRSSFLIEHQRIHTGERPYQCKECGKSFSQLCNLTRHQRIHTGDKPHKCEECGKAFSRSSGLIQHQRIHTREKTYPYNETKESFDPNCSLVIQQEVYPKEKSYKCDECGKTFSVSAHLVQHQRIHTGEKPYLCTVCGKSFSRSSFLIEHQRIHTGERPYLCRQCGKSFSQLCNLIRHQGVHTGNKPHKCDECGKAFSRNSGLIQHQRIHTGEKPYKCEKCDKSFSQQRSLVNHQMIHAEVKTQETHECDACGEAFNCRISLIQHQKLHTAWMQ

SEQ ID NO: 11356 - protein, 531 aa, Homo sapiens
MGRETFELVGRLDKQRGIFLWEIPRESLTQEQRMFRENTNIIRKRPNSEEKCHKCEECGKGFVRKAHFIQHQRVHTGEKPFQCNECGKSFSRSSFVIEHQRIHTGERPYECNYCGKTFSVSSTLIRHQRIHTGERPYQCNQCKQSFSQRRSLVKHQRIHTGEKPHKCSDCGKAFSWKSHLIEHQRTHTGEKPYHCTKCKKSFSRNSLLVEHQRIHTGERPHKCGECGKAFRLSTYLIQHQKIHTGEKPFLCIECGKSFSRSSFLIEHQRIHTGERPYQCKECGKSFSQLCNLTRHQRIHTGDKPHKCEECGKAFSRSSGLIQHQRIHTREKTYPYNETKESFDPNCSLVIQQEVYPKEKSYKCDECGKTFSVSAHLVQHQRIHTGEKPYLCTVCGKSFSRSSFLIEHQRIHTGERPYLCRQCGKSFSQLCNLIRHQGVHTGNKPHKCDECGKAFSRNSGLIQHQRIHTGEKPYKCEKCDKSFSQQRSLVNHQMIHAEVKTQETHECDACGEAFNCRISLIQHQKLHTAWMQ

SEQ ID NO: 11357 - protein, 402 aa, Homo sapiens
MNIHMKRKTIKNINTFENRMLMLDGMPAVRVKTELLESEQGSPNVHNYPDMEAVPLLLNNVKGEPPEDSLSVDHFQTQTEPVDLSINKARTSPTAVSSSPVSMTASASSPSSTSTSSSSSSRLASSPTVITSVSSASSSSTVLTPGPLVASASGVGGQQFLHIIHPVPPSSPMNLQSNKLSHVHRIPVVVQSVPVVYTAVRSPGNVNNTIVVPLLEDGRGHGKAQMDPRGLSPRQSKSDSDDDDLLNVTLDSVNETGSTALSIARAVQEVHPSPVSRVRGNRMNNQKFPCSISPFSIESTRRQRRSESPDSRKRRIHRCDFEGCNKVYTKSSHLKAHRRTHTGEKPYKCTWEGCTWKFARSDELTRHYRKHTGVKPFKCADCDRSFSRSDHLALHRRRHMLV

SEQ ID NO: 11358 - protein, 269 aa, Homo sapiens
MNIHMKRKTIKNINTFENRMLMLDGMPAVRVKTELLESEQGSPNVHNYPDMEAVPLLLNNVKGEPPEDSLSVDHFQTQTEPVDLSINKARTSPTAVSSSPVSMTASASSPSSTSTSSSSSSRLASSPTVITSVSSASSSSTVLTPGPLVASASGVGGQQFLHIIHPVPPSSPMNLQSNKLSHVHRIPVVVQSVPVVYTAVRSPGNVNNTIVVPLLEDGRGHGKAQMDPRGLSPRQSKSDSDDDDLLNVTLDSVNETGSTALSIARAVQE

SEQ ID NO: 11359 - protein, 159 aa, Homo sapiens
MRKNESYLNQPAPPIPIPTLSLMGGCREHFENHWKGRARWLMPVIPALWEAKAGRSPEVRSSKPAWPTWRNPIFTKNTKISQVLELFLNYQSLICALEKQKRQKGSLAIFCWSFQGGCVSKRPDVPSLKSQKPKRKRITGRKRLSKGFWSLLFSNLGRF

SEQ ID NO: 11360 - protein, 159 aa, Homo sapiens
MRKNESYLNQPAPPIPIPTLSLMGGCREHFENHWKGRARWLMPVIPALWEAKAGRSPEVRSSKPAWPTWRNPIFTKNTKISQVLELFLNYQSLICALEKQKRQKGSLAIFCWSFQGGCVSKRPDVPSLKSQKPKRKRITGRKRLSKGSWSLLFSNLGRF

SEQ ID NO: 11361 - protein, 737 aa, Homo sapiens
MELGCWTQLGLTFLQLLLISSLPREYTVINEACPGAEWNIMCRECCEYDQIECVCPGKREVVGYTIPCCRNEENECDSCLIHPGCTIFENCKSCRNGSWGGTLDDFYVKGFYCAECRAGWYGGDCMRCGQVLRAPKGQILLESYPLNAHCEWTIHAKPGFVIQLRFVMLSLEFDYMCQYDYVEVRDGDNRDGQIIKRVCGNERPAPIQSIGSSLHVLFHSDGSKNFDGFHAIYEEITACSSSPCFHDGTCVLDKAGPYKCACLAGYTGQRCENLLEAGKSKIKASEDSLSVLEERNCSDPGGPVNGYQKITGGPGLINGRHAKIGTVVSFFCNNSYVLSGNEKRTCQQNGEWSGKQPICIKACREPKISDLVRRRVLPMQVQSRETPLHQLYSAAFSKQKLQSAPTKKPALPFGDLPMGYQHLHTQLQYECISPFYRRLGSSRRTCLRTGKWSGRAPSCIPICGKIENITAPKTQGLRWPWQAAIYRRTSGVHDGSLHKGAWFLVCSGALVNERTVVVAAHCVTDLGKVTMIKTADLKVVLGKFYRDDDRDEKTIQSLQISAIILHPNYDPILLDADIAILKLLDKARISTRVQPICLAASRDLSTSFQESHITVAGWNVLADVRSPGFKNDTLRSGVVSVVDSLLCEEQHEDHGIPVSVTDNMFCASWEPTAPSDICTAETGGIAAVSFPGRASPEPRWHLMGLVSWSYDKTCSHRLSTAFTKVLPFKDWIERNMK

SEQ ID NO: 11362 - protein, 848 aa, Homo sapiens
MWLRLGPPSLSLSPKPTVGRSLCLTLWFLSLALRASTQAPAPTVNTHFGKLRGARVPLPSEILGPVDQYLGVPYAAPPIGEKRFLPPEPPPSWSGIRNATHFPPVCPQNIHTAVPEVMLPVWFTANLDIVATYIQEPNEDCLYLNVYVPTEDVKRISKECARKPNKKICRKGGSGAKKQGEDLADNDGDEDEDIRDSGAKPVMVYIHGGSYMEGTGNMIDGSILASYGNVIVITLNYRVGVLGFLSTGDQAAKGNYGLLDQIQALRWVSENIAFFGGDPRRITVFGSGIGASCVSLLTLSHHSEGLFQRAIIQSGSALSSWAVNYQPVKYTSLLADKVGCNVLDTVDMVDCLRQKSAKELVEQDIQPARYHVAFGPVIDGDVIPDDPEILMEQGEFLNYDIMLGVNQGEGLKFVEGVVDPEDGVSGTDFDYSVSNFVDNLYGYPEGKDTLRETIKFMYTDWADRDNPETRRKTLVALFTDHQWVEPSVVTADLHARYGSPTYFYAFYHHCQSLMKPAWSDAAHGDEVPYVFGVPMVGPTDLFPCNFSKNDVMLSAVVMTYWTNFAKTGDPNKPVPQDTKFIHTKANRFEEVAWSKYNPRDQLYLHIGLKPRVRDHYRATKVAFWKHLVPHLYNLHDMFHYTSTTTKVPPPDTTHSSHITRRPNGKTWSTKRPAISPAYSNENAQGSWNGDQDAGPLLVENPRDYSTELSVTIAVGASLLFLNVLAFAALYYRKDKRRQEPLRQPSPQRGAGAPELGAAPEEELAALQLGPTHHECEAGPPHDTLRLTALPDYTLTLRRSPDDIPLMTPNTITMIPNSLVGLQTLHPYNTFAAGFNSTGLPHSHSTTRV

SEQ ID NO: 11363 - protein, 828 aa, Homo sapiens
MWLRLGPPSLSLSPKPTVGRSLCLTLWFLSLALRASTQAPAPTVNTHFGKLRGARVPLPSEILGPVDQYLGVPYAAPPIGEKRFLPPEPPPSWSGIRNATHFPPVCPQNIHTAVPEVMLPVWFTANLDIVATYIQEPNEDCLYLNVYVPTEDGSGAKKQGEDLADNDGDEDEDIRDSGAKPVMVYIHGGSYMEGTGNMIDGSILASYGNVIVITLNYRVGVLGFLSTGDQAAKGNYGLLDQIQALRWVSENIAFFGGDPRRITVFGSGIGASCVSLLTLSHHSEGLFQRAIIQSGSALSSWAVNYQPVKYTSLLADKVGCNVLDTVDMVDCLRQKSAKELVEQDIQPARYHVAFGPVIDGDVIPDDPEILMEQGEFLNYDIMLGVNQGEGLKFVEGVVDPEDGVSGTDFDYSVSNFVDNLYGYPEGKDTLRETIKFMYTDWADRDNPETRRKTLVALFTDHQWVEPSVVTADLHARYGSPTYFYAFYHHCQSLMKPAWSDAAHGDEVPYVFGVPMVGPTDLFPCNFSKNDVMLSAVVMTYWTNFAKTGDPNKPVPQDTKFIHTKANRFEEVAWSKYNPRDQLYLHIGLKPRVRDHYRATKVAFWKHLVPHLYNLHDMFHYTSTTTKVPPPDTTHSSHITRRPNGKTWSTKRPAISPAYSNENAQGSWNGDQDAGPLLVENPRDYSTELSVTIAVGASLLFLNVLAFAALYYRKDKRRQEPLRQPSPQRGAGAPELGAAPEEELAALQLGPTHHECEAGPPHDTLRLTALPDYTLTLRRSPDDIPLMTPNTITMIPNSLVGLQTLHPYNTFAAGFNSTGLPHSHSTTRV

SEQ ID NO: 11364 - protein, 1207 aa, Homo sapiens
MRLTHICCCCLLYQLGFLSNGIVSELQFAPDREEWEVVFPALWRREPVDPAGGSGGSADPGWVRGVGGGGSARAQAAGSSREVRSVAPVPLEEPVEGRSESRLRPPPPSEGEEDEELESQELPRGSSGAAALSPGAPASWQPPPPPQPPPSPPPAQHAEPDGDEVLLRIPAFSRDLYLLLRRDGRFLAPRFAVEQRPNPGPGPTGAASAPQPPAPPDAGCFYTGAVLRHPGSLASFSTCGGGLMGFIQLNEDFIFIEPLNDTMAITGHPHRVYRQKRSMEEKVTEKSALHSHYCGIISDKGRPRSRKIAESGRGKRYSYKLPQEYNIETVVVADPAMVSYHGADAARRFILTILNMVFNLFQHKSLGVQVNLRVIKLILLHETPPELYIGHHGEKMLESFCKWQHEEFGKKNDIHLEMSTNWGEDMTSVDAAILITRKDFCVHKDEPCDTVGIAYLSGMCSEKRKCIIAEDNGLNLAFTIAHEMGHNMGINHDNDHPSCADGLHIMSGEWIKGQNLGDVSWSRCSKEDLERFLRSKASNCLLQTNPQSVNSVMVPSKLPGMTYTADEQCQILFGPLASFCQEMQHVICTGLWCKVEGEKECRTKLDPPMDGTDCDLGKWCKAGECTSRTSAPEHLAGEWSLWSPCSRTCSAGISSRERKCPGLDSEARDCNGPRKQYRICENPPCPAGLPGFRDWQCQAYSVRTSSPKHILQWQAVLDEEKPCALFCSPVGKEQPILLSEKVMDGTSCGYQGLDICANGRCQKVGCDGLLGSLAREDHCGVCNGNGKSCKIIKGDFNHTRGAGYVEVLVIPAGARRIKVVEEKPAHSYLALRDAGKQSINSDWKIEHSGAFNLAGTTVHYVRRGLWEKISAKGPTTAPLHLLVLLFQDQNYGLHYEYTIPSDPLPENQSSKAPEPLFMWTHTSWEDCDATCGGGERKTTVSCTKIMSKNISIVDNEKCKYLTKPEPQIRKCNEQPCQTRWMMTEWTPCSRTCGKGMQSRQVACTQQLSNGTLIRARERDCIGPKPASAQRCEGQDCMTVWEAGVWSEFSVKCGKGIRHRTVRCTNPRKKCVLSTRPREAEDCEDYSKCYVWRMGDWSKCSITCGKGMQSRVIQCMHKITGRHGNECFSSEKPAAYRPCHLQPCNEKINVNTITSPRLAALTFKCLGDQWPVYCRVIREKNLCQDMRWYQRCCETCRDFYAQKLQQKS

SEQ ID NO: 11365 - protein, 1145 aa, Homo sapiens
MAVPARTCGASRPGPARTARPWPGCGPHPGPGTRRPTSGPPRPLWLLLPLLPLLAAPGASAYSFPQQHTMQHWARRLEQEVDGVMRIFGGVQQLREIYKDNRNLFEVQENEPQKLVEKVAGDIESLLDRKVQALKRLADAAENFQKAHRWQDNIKEEDIVYYDAKADAELDDPESEDVERGSKASTLRLDFIEDPNFKNKVNYSYAAVQIPTDIYKGSTVILNELNWTEALENVFMENRRQDPTLLWQVFGSATGVTRYYPATPWRAPKKIDLYDVRRRPWYIQGASSPKDMVIIVDVSGSVSGLTLKLMKTSVCEMLDTLSDDDYVNVASFNEKAQPVSCFTHLVQANVRNKKVFKEAVQGMVAKGTTGYKAGFEYAFDQLQNSNITRANCNKMIMMFTDGGEDRVQDVFEKYNWPNRTVRVFTFSVGQHNYDVTPLQWMACANKGYYFEIPSIGAIRINTQEYLDVLGRPMVLAGKEAKQVQWTNVYEDALGLGLVVTGTLPVFNLTQDGPGEKKNQLILGVMGIDVALNDIKRLTPNYTLGANGYVFAIDLNGYVLLHPNLKPQTTNFREPVTLDFLDAELEDENKEEIRRSMIDGNKGHKQIRTLVKSLDERYIDEVTRNYTWVPIRSTNYSLGLVLPPYSTFYLQANLSDQILQVKYFEFLLPSSFESEGHVFIAPREYCKDLNASDNNTEFLKNFIELMEKVTPDSKQCNNFLLHNLILDTGITQQLVERVWRDQDLNTYSLLAVFAATDGGITRVFPNKAAEDWTENPEPFNASFYRRSLDNHGYVFKPPHQDALLRPLELENDTVGILVSTAVELSLGRRTLRPAVVGVKLDLEAWAEKFKVLASNRTHQDQPQKCGPNSHCEMDCEVNNEDLLCVLIDDGGFLVLSNQNHQWDQVGRFFSEVDANLMLALYNNSFYTRKESYDYQAACAPQPPGNLGAAPRGVFVPTVADFLNLAWWTSAAAWSLFQQLLYGLIYHSWFQADPAEAEGSPETRESSCVMKQTQYYFGSVNASYNAIIDCGNCSRLFHAQRLTNTNLLFVVAEKPLCSQCEAGRLLQKETHCPADGPEQCELVQRPRYRRGPHICFDYNATEDTSDCGRGASFPPSLGVLVSLQLLLLLGLPPRPQPQVLVHASRRL

SEQ ID NO: 11366 - protein, 676 aa, Homo sapiens
  VARIANT 264, 410, 499, 615: Xaa = Any Amino Acid
MLLPGAADGTGAGAGVAAMDLYMIVLCILAASLAKTGFYLSHKVTSIVPESTLLIILGLVLGSIIWVAKHITSFMMMSLIMLDASYFIPNWLFFGNLGTILLYKVISTMWNASTTILSLYDVSLSRLMGYLQIGLLDFLLFGSLITTVDPAAVLVVFEEVHGNEVLFIIIFRELLLNDSVIMVLYNVFQSFVTLGGDNVTSMNSVEGVVSFLVVSLGGMLVGMVFAFLLSLVTHLTKHVHIIEPGFMLVISYLSILMSEKLLLXAILAIIFCGICCHKYMKANISEQLAPTMCYTMKMLTSGTNPIFMSLGTLAMNLLIWTWNKAFIRLHWPSSSGTEAISVIHSWLLDCYWMVWLEIIGQVVMSCGGLHGAMAFILVILLNGNKVKEKNLFVSTTVNIFKVIFWGLTIXSLVQWLKVKRSEHWEPKFHEKLQCHPLDHILLAIKDISRHIRHNDLKDMWSHFDRNFLSGVLMRRLAQKSPEGILNVFHALNLKDAISXVTKGECLRSLAFIGSPSTDNVVNVDFTPRSSTMVASVSYHLRENISTVCLDIQSLEQHGRAFGTGRTRSCTTCCSNTCASWGRSICIATATPAEDKKQDRDIFHRSMRKHLESFKXTKLRITQNKKAAKLYKPKRAQKQRTPKALYPLQHSCTNANPGQGLGLSGHPTLLNKMNLQK

SEQ ID NO: 11367 - protein, 553 aa, Homo sapiens
MAFQDLLGHAGDLWRFQILQTVFLSIFAVATYLHFMLENFTAFIPGHRCWVHILDNDTVSDNDTGALSQDALLRISIPLDSNMRPEKCRRFVHPQWQLLHLNGTFPNTSDADMEPCVDGWVYDRISFSSTIVTEWDLVCDSQSLTSVAKFVFMAGMMVGGILGGHLSDRFGRRFVLRWCYLQVAIVGTCAALAPTFLIYCSLRFLSGIAAMSLITNTIMLIAEWATHRFQAMGITLGMCPSGIAFMTLAGLAFAIRDWHILQLVVSVPYFVIFLTSSWLLESARWLIINNKPEEGLKELRKAAHRSGMKNARDTLTLEILKSTMKKELEAAQKKKPSLCEMLHMPNICKRISLLSFTRFANFMAYFGLNLHVQHLGNNVFLLQTLFGAVILLANCVAPWALKYMNRRASQMLLMFLLAICLLAIIFVPQEMQTLREVLATLGLGASALANTLAFAHGNEVIPTIIRARAMGINATFANIAGALAPLMMILSVYSPPLPWIIYGVFPFISGFAFLLLPETRNKPLFDTIQDEKNERKDPREPKQEDPRVEVTQF

SEQ ID NO: 11368 - protein, 511 aa, Homo sapiens
MGVLKFKHIFFRSFVKSSGVSQIVFTFLLIPCCLTLNFRAPPVIPNVPFLWAWNAPSEFCLGKFDEPLDMSLFSFIGSPRINATGQGVTIFYVDRLGYYPYIDSITGVTVNGGIPQKISLQDHLDKAKKDITFYMPVDNLGMAVIDWEEWRPTWARNWKPKDVYKNRSIELVQQQNVQLSLTEATEKAKQEFEKAGKDFLVETIKLGKLLRPNHLWGYYLFPDCYNHHYKKPGYNGSCFNVEIKRNDDLSWLWNESTALYPSIYLNTQQSPVAATLYVRNRVREAIRVSKIPDAKSPLPVFAYTRIVFTDQVLKFLSQDELVYTFGETVALGASGIVIWGTLSIMRSMKSCLLLDNYMETILNPYIINVTLAAKMCSQVLCQEQGVCIRKNWNSSDYLHLNPDNFAIQLEKGGKFTVRGKPTLEDLEQFSEKFYCSCYSTLSCKEKADVKDTDAVDVCIADGVCIDAFLKPPMETEEPQIFYNASPSTLSATMFIWRLEVWDQGISRIGFF

SEQ ID NO: 11369 - protein, 509 aa, Homo sapiens
MGVLKFKHIFFRSFVKSSGVSQIVFTFLLIPCCLTLNFRAPPVIPNVPFLWAWNAPSEFCLGKFDEPLDMSLFSFIGSPRINATGQGVTIFYVDRLGYYPYIDSITGVTVNGGIPQKISLQDHLDKAKKDITFYMPVDNLGMAVIDWEEWRPTWARNWKPKDVYKNRSIELVQQQNVQLSLTEATEKAKQEFEKAGKDFLVETIKLGKLLRPNHLWGYYLFPDCYNHHYKKPGYNGSCFNVEIKRNDDLSWLWNESTALYPSIYLNTQQSPVAATLYVRNRVREAIRVSKIPDAKSPLPVFAYTRIVFTDQVLKFLSQDELVYTFGETVALGASGIVIWGTLSIMRSMKSCLLLDNYMETILNPYIINVTLAAKMCSQVLCQEQGVCIRKNWNSSDYLHLNPDNFAIQLEKGGKFTVRGKPTLEDLEQFSEKFYCSCYSTLSCKEKADVKDTDAVDVCIADGVCIDAFLKPPMETEEPQIFYNASPSTLSATMFIVSILFLIISSVASL

SEQ ID NO: 11370 - protein, 652 aa, Homo sapiens
WQTPGLAPRVAPSRAEPSGAGGASGITRVAVPEQLQSIEGWRGAHTVHGAGGQGGQGAVVMAQFDTEYQRLEASYSDSPPGEEDLLVHVAEGSKSPWHHIENLDLFFSRVYNLHQKNGFTCMLIGEIFELMQFLFVVAFTTFLVSCVDYDILFANKMVNHSLHPTEPVKVTLPDAFLPAQVCSARIQENGSLITILVIAGVFWIHRLIKFIYNICCYWEIHSFYLHALRIPMSALPYCTWQEVQARIVQTQKEHQICIHKRELTELDIYHRILRFQNYMVALVNKSLLPLRFRLPGLGEAVFFTRGLKYNFELILFWGPGSLFLNEWSLKAEYKRGGQRLELAQRLSNRILWIGIANFLLCPLILIWQILYAFFSYAEVLKREPGALGARCWSLYGRCYLRHFNELEHELQSRLNRGYKPASKYMNCFLSPLLTLLAKNGAFFAGSILAVLIALTIYDEDVLAVEHVLTTVTLLGVTVTVCRSFIPDQHMVFCPEQLLRVILAHIHYMPDHWQGNAHRSQTRDEFAQLFQYKAVFILEELLSPIVTPLILIFCLRPRALEIIDFFRNFTVEVVGVGDTCSFAQMDVRQHGHPQWLSAGQTEASVYQQAEDGKTELSLMHFAITNPGWQPPRESTAFLGFLKEQVQRDGAAAS

SEQ ID NO: 11371 - protein, 839 aa, Homo sapiens
MAQFDTEYQRLEASYSDSPPGEEDLLVHVAEGSKSPWHRIENLDLFFSRVYNLHQKNGFTCMLIGEIFELMQFLFVVAFTTFLVSCVDYDILFANKMVNHSLHPTEPVKVTLPDAFLPAQVCSARIQENGSLITILVIAGVFWIHRLIKFIYNICCYWEIHSFYLHALRIPMSALPYCTWQEVQARIVQTQKEHQICIHKRELTELDIYHRILRFQNYMVALVNKSLLPLRFRLPGLGEAVFFTRGLKYNFELILFWGPGSLFLNEWSLKAEYKRGGQRLELAQRLSNRILWIGIANFLPCPLILIWQILYAFFSYAEVLKREPGALGARCWSLYGRCYLRHFNELEHELQSRLNRGYKPASKYMNCFLSPLLTLLAKNGAFFAGSILAVLIALTIYDEDVLAVEHVLTTVTLLGVTVTVCRSFIPDQHMVFCPEQLLRVILAHIHYMPDHWQGNAHRSQTRDEFAQLFQYKAVFILEELLSPIVTPLILIFCLRPRALEIIDFFRNFTVEVVGVGDTCSFAQMDVRQHGHPQWLSAGQTEASVYQQAEDGKTELSLMHFAITNPGWQPPRESTAFLGFLKEQVQRDGAAASLAQGGLLPENALFTSIQSLQSESEPLSLIANVVAGSSCRGPPLPRDLQGSRHRAEVASALRSFSPLQPGQAPTGRAHSTMTGSGVDARTASSGSSVWEGQLQSLVLSEYASTEMSLHALYMHQLHKQQAQAEPERHVWHRRESDESGESAPDEGGEGARAPQSIPRSASYPCVAPRPGAPETTALHGGFQRRYGGITDPGTVPRVPSHFSRLPLGGWAEDGQSASRHPEPVPEEGSEDELPPQVHKV

SEQ ID NO: 11372 - protein, 970 aa, Homo sapiens [sequence omitted]

SEQ ID NO: 11373 - protein, 278 aa, Homo sapiens
MMTFSSSIFLGLDIGLIISVVSAFFITTVRSHRAKILLLGQIPNTNIYRSINDYREIITIPGVKIFQCCSSITFVNVYYLKHKLLKEVDMVKVPLKEEEIFSLFNSSDTNLQGGKICRCFCNCDDLEPLPRILYTERFENKLDPEASSINLIHCSHFESMNTSQTASEDQVPYTVSSVSQKNQGQQYEEVEEVWLPNNSSRNSSPGLPDVAESQGRRSLIPYSDASLLPSVHTIILDFSMVHYVDSRGLVVLRQVSTEEALAGALIPLLPSQPHPDPD

SEQ ID NO: 11374 - protein, 970 aa, Homo sapiens
MAQLERSAISGFSSKSRRNSFAYDVKREVYNEETFQQEHKRKASSSGNMNINITTFRHHVQCRCSWHRFLRCVLTIFPFLEWMCMYRLKDWLLGDLLAGISVGLVQVPQGLTLSLLARQLIPPLNIAYAAFCSSVIYVIFGSCHQMSIGSFFLVSALLINVLKVSPFNNGQLVMGSFVKNEFSAPSYLMGYNKSLSVVATTTFLTGIIQLIMGVLGLGFIATYLPESAMSAYLAAVALHIMLSQLTFIFGIMISFHAGPISFFYDIINYCVALPKANSTSILVFLTVVVALRINKCIRISFNQYPIEFPMELFLIIGFTVIANKISMATETSQTLIDMIPYSFLLPVTPDFSLLPKIILQAFSLSLVSSFLLIFLGKKIASLHNYSVNSNQDLIAIGLCNVVSSFFRSCVFTGAIARTIIQDKSGGRQQFASLVGAGVMLLLMVKMGHFFYTLPNAVLAGIILSNVIPYLETISNLPSLWRQDQYDCALWMMTFSSSIFLGLDIGLIISVVSAFFITTVRSHRAKILLLGQIPNTNIYRSINDYREIITIPGVKIFQCCSSITFVNVYYLKHKLLKEVDMVKVPLKEEEIFSLFNSSDTNLQGGKICRCFCNCDDLEPLPRILYTERFENKLDPEASSINLIHCSHFESMNTSQTASEDQVPYTVSSVSQKNQGQQYEEVEEVWLPNNSSRNSSPGLPDVAESQGRRSLIPYSDASLLPSVHTIILDFSMVHYVDSRGLVVLRQICNAFQNANILILIAGCHSSIVRAFERNDFFDAGITKTQLFLSVHDAVLFALSRKVIGSSELSIDESETVIRETYSETDKNDNSRYKMSSSFLGSQKNVSPGFIKIQQPVEEESELDLELESEQEAGLGLDLDLDRELEPEMEPKAETETKTQTEMEPQPETEPEMEPNPKSRPRAHTFPQQRYWPMYHPSMASTQSQTQTRTWSVERRRHPMDSYSPEGNSNEDV

SEQ ID NO: 11375 - protein, 865 aa, Homo sapiens
MAQLERSAISGFSSKSRRNSFAYDVKREVYNEETFQQEHKRKASSSGNMNINITTFRHHVQCRCSWHRFLRCMLTIFPFLEWMCMYRLKDWLLGDLLAGISVGLVQVPQGLTLSLLARQLIPPLNIAYAAFCSSVIYVIFGSCHQMSIGSFFLVSALLINVLKVSPFNNGQLVMGSFVKNEFSAPSYLMGYNKSLSVVATTTFLTGIIQIIGFTVIANKISMATETSQTLIDMIPYSFLLPVTPDFSLLPKIILQAFSLSLVSSFLLIFLGKKIASLHNYSVNSNQDLIAIGLCNVVSSFFRSCVFTGAIARTIIQDKSGGRQQFASLVGAGVMLLLMVKMGHFFYTLPNAVLAGIILSNVIPYLETISNLPSLWRQDQYDCALWMMTFSSSIFLGLDIGLIISVVSAFFITTVRSHRAKILLLGQIPNTNIYRSINDYREIITIPGVKIFQCCSSITFVNVYYLKHKLLKEVDMVKVPLKEEEIFSLFNSSDTNLQGGKICRCFCNCDDLEPLPRILYTERFENKLDPEASSVNLIHCSHFESMNTSQTASEDQVPYTVSSVSQKNQGQQYEEVEEVWLPNNSSRNSSPGLPDVAESQGRRSLIPYSDASLLPSVHTIILDFSMVHYVDSRGLVVLRQICNAFQNANILILIAGCHSSIVRAFERNDFFDAGITKTQLFLSVHDAVLFALSRKVIGSSELSIDESETVIRETYSETDKNDNSRYKMSSSFLGSQKNVSPGFIKIQQPVEEESELDLELESEQEAGLGLDLDLDRELEPEMEPKAETETKTQTEMEPQPETEPEMEPNPKSRPRAHTFPQQRYWPMYHPSMASTQSQTQTRTWSVERRRHPMDSYSPEGNSNEDV

SEQ ID NO: 11376 - DNA, 1245 bp, Homo sapiens
actgctcttccagaggcaagaccaaccaagatgagtgacctgggagctgtcatttccctcctgctctggggacgacagctttttgcactgtactcaggcaatgatgtcacggatatttcagatgaccgcttcccgaagccccctgagattgcaaatggctatgtggagcacttgtttcgctaccagtgtaagaactactacagactgcgcacagaaggagatggagtatacaccttaaatgataagaagcagtggataaataaggctgttggagataaacttcctgaatgtgaagcagtatgtgggaagcccaagaatccggcaaacccagtgcagcggatcctgggtggacacctggatgccaaaggcagctttccctggcaggctaagatggtttcccaccataatctcaccacaggggccacgctgatcaatgaacaatggctgctgaccacggctaaaaatctcttcctgaaccattcagaaaatgcaacagcgaaagacattgcccctactttaacactctatgtggggaaaaagcagcttgtagagattgagaaggtggttctacaccctaactaccaccaggtagatattgggctcatcaaactcaaacagaaggtgcttgttaatgagagagtgatgcccatctgcctaccttcaaagaattatgcagaagtagggcgtgtgggttacgtgtctggctggggacaaagtgacaactttaaacttactgaccatctgaagtatgtcatgctgcctgtggctgaccaatacgattgcataacgcattatgaaggcagcacatgccccaaatggaaggcaccgaagagccctgtaggggtgcagcccatactgaacgaacacaccttctgtgtcggcatgtctaagtaccaggaagacacctgctatggcgatgcgggcagtgcctttgccgttcacgacctggaggaggacacctggtacgcggctgggatcctaagctttgataagagctgtgctgtggctgagtatggtgtgtatgtgaaggtgacttccatccagcactgggttcagaagaccatagctgagaactaatgcaaggctggccggaagcccttgcctgaaagcaagatttcagcctggaagagggcaaagtggacgggagtggacaggagtggatgcgataagatgtggtttgaagctgatgggtgccagccctgcattgctgagtcaatcaataaagagctttcttttgacccaaaa

SEQ ID NO: 11377 - DNA, 1433 bp, Homo sapiens
agatgccccacagcactgctcttccagaggcaagaccaaccaagatgagtgccctgggagctgtcattgccctcctgctctggggacagctttttgcagtggactcaggcaatgatgtcacggatatcgcagatgacggctgcccgaagccccccgagattgcacatggctatgtggagcactcggttcgctaccagtgtaagaactactacaaactgcgcacagaaggagatggagtatacaccttaaatgataagaagcagtggataaataaggctgttggagataaacttcctgaatgtgaagcagatgacggctgcccgaagccccccgagattgcacatggctatgtggagcactcggttcgctaccagtgtaagaactactacaaactgcgcacagaaggagatggagtgtacaccttaaacaatgagaagcagtggataaataaggctgttggagataaacttcctgaatgtgaagcagtatgtgggaagcccaagaatccggcaaacccagtgcagcggatcctgggtggacacctggatgccaaaggcagctttccctggcaggctaagatggtttcccaccataatctcaccacaggtgccacgctgatcaatgaacaatggctgctgaccacggctaaaaatctcttcctgaaccattcagaaaatgcaacagcgaaagacattgcccctactttaacactctatgtggggaaaaagcagcttgtagagattgagaaggttgttctacaccctaactactcccaggtagatattgggctcatcaaactcaaacagaaggtgtctgttaatgagagagtgatgcccatctgcctaccttcaaaggattatgcagaagtagggcgtgtgggttatgtttctggctgggggcgaaatgccaattttaaatttactgaccatctgaagtatgtcatgctgcctgtggctgaccaagaccaatgcataaggcattatgaaggcagcacagtccccgaaaagaagacaccgaagagccctgtaggggtgcagcccatactgaatgaacacaccttctgtgctggcatgtctaagtaccaagaagacacctgctatggcgatgcgggcagtgcctttgccgttcacgacctggaggaggacacctggtatgcgactgggatcttaagctttgataagagctgtgctgtggctgagtatggtgtgtatgtgaaggtgacttccatccaggactgggttcagaagaccatagctgagaactaatgcaaggctggccggaagcccttgcctgaaagcaagatttcagcctggaagagggcaaagtggacgggagtggacaggagtggatgcgataagatgtggtttgaagctgatgggtgccagccctgcattgctgagtcaatcaataaagagctttcttttgacccattt

SEQ ID NO: 11378 - DNA, 1607 bp, Homo sapiens
aatgactcctttcggtaagtgcagtggaagctgtacactgcccaggcaaagcgtccgggcagcgtaggcgggcgactcagatcccagccagtggacttagcccctgtttgctcctccgataactggggtgaccttggttaatattcaccagcagcctcccccgttgcccctctggatccactgcttaaatacggacgaggacagggccctgtctcctcagcttcaggcaccaccactgacctgggacagtgaatcgacaatgccgtcttctgtctcgtggggcatcctcctgctggcaggcctgtgctgcctggtccctgtctccctggctgaggatccccagggagatgctgcccagaagacagatacatcccaccatgatcaggatcacccaaccttcaacaagatcacccccaacctggctgagttcgccttcagcctataccgccagctggcacaccagtccaacagcaccaatatcttcttctccccagtgagcatcgctacagcctttgcaatgctctccctggggaccaaggctgacactcacgatgaaatcctggagggcctgaatttcaacctcacggagattccggaggctcagatccatgaaggcttccaggaactcctccgtaccctcaaccagccagacagccagctccagctgaccaccggcaatggcctgttcctcagcgagggcctgaagctagtggataagtttttggaggatgttaaaaagttgtaccactcagaagccttcactgtcaacttcggggacaccgaagaggccaagaaacagatcaacgattacgtggagaagggtactcaagggaaaattgtggatttggtcaaggagcttgacagagacacagtttttgctctggtgaattacatcttctttaaaggcaaatgggagagaccctttgaagtcaaggacaccgaggaagaggacttccacgtggaccaggtgaccaccgtgaaggtgcctatgatgaagcgtttaggcatgtttaacatccagcactgtaagaagctgtccagctgggtgctgctgatgaaatacctgggcaatgccaccgccatcttcttcctgcctgatgaggggaaactacagcacctggaaaatgaactcacccacgatatcatcaccaagttcctggaaaatgaagacagaaggtctgccagcttacatttacccaaactgtccattactggaacctatgatctgaagagcgtcctgggtcaactgggcatcactaaggtcttcagcaatggggctgacctctccggggtcacagaggaggcacccctgaagctctccaaggccgtgcataaggctgtgctgaccatcgacgagaaagggactgaagctgctggggccatgtttttagaggccatacccatgtctatcccccccgaggtcaagttcaacaaaccctttgtcttcttaatgattgaacaaaataccaagtctcccctcttcatgggaaaagtggtgaatcccacccaaaaataactgcctctcgctcctcaacccctcccctccatccctggccccctccctggatgacattaaagaagggttgagctggtccctgcctgcaaaa

SEQ ID NO: 11379 - DNA, 2318 bp, Homo sapiens
gcacagaagcgagtccgactgtgctcgctgctcagcgccgcacccggaagatgaggctcgccgtgggagccctgctggtctgcgccgtcctggggctgtgtctggctgtccctgataaaactgtgagatggtgtgcagtgtcggagcatgaggccactaagtgccagagtttccgcgaccatatgaaaagcgtcattccatccgatggtcccagtgttgcttgtgtgaagaaagcctcctaccttgattgcatcagggccattgcggcaaacgaagcggatgctgtgacactggatgcaggtttggtgtatgatgcttacctggctcccaataacctgaagcctgtggtggcagagttctatgggtcaaaagaggatccacagactttctattatgctgttgctgtggtgaagaaggatagtggcttccagatgaaccagcttcgaggcaagaagtcctgccacacgggtctaggcaggtccgctgggtggaacatccccataggcttactttactgtgacttacctgagccacgtaaacctcttgagaaagcagtggccaatttcttctcgggcagctgtgccccttgtgcggatgggacggacttcccccagctgtgtcaactgtgtccagggtgtggctgctccacccttaaccaatacttcggctactcgggagccttcaagtgtctgaaggatggtgctggggatgtggcctttgtcaagcactcgactatatttgagaacttggcaaacaaggctgacagggaccagtatgagctgctttgcctggacaacacccggaagccggtagatgaatacaaggactgccacttggcccaggtcccttctcataccgtcgtggcccgaagtatgggcggcaaggaggacttgatctgggagcttctcaaccaggcccaggaacattttggcaaagacaaatcaaaagaattccaactattcagctctcctcatgggaaggacctgctgtttaaggactctgcccacgggtttttaaaagtcccccccaggatggatgccaagatgtacctgggctatgagtatgtcactgccatccggaatctacgggaaggcacatgcccagaagccccaacagatgaatgcaagcctgtgaagtggtgtgcgctgagccaccacgagaggctcaagtgtgatgagtggagtgttaacagtgtagggaaaatagagtgtgtatcagcagagaccaccgaagactgcatcgccaagatcatgaatggagaagctgatgccatgagcttggatggagggtttgtctacatagcgggcaagtgtggtctggtgcctgtcttggcagaaaactacaataagagcgataattgtgaggatacaccagaggcagggtattttgctgtagcagtggtgaagaaatcagcttctgacctcacctgggacaatctgaaaggcaagaagtcctgccatacggcagttggcagaaccgctggctggaacatccccatgggcctgctctacaataagatcaaccactgcagatttgatgaatttttcagtgaaggttgtgcccctgggtctaagaaagactccagtctctgtaagctgtgtatgggctcaggcctaaacctgtgtgaacccaacaacaaagagggatactacggctacacaggcgctttcaggtgtctggttgagaagggagatgtggcctttgtgaaacaccagactgtcccacagaacactgggggaaaaaaccctgatccatgggctaagaatctgaatgaaaaagactatgagttgctgtgccttgatggtaccaggaaacctgtggaggagtatgcgaactgccacctggccagagccccgaatcacgctgtggtcacacggaaagataaggaagcttgcgtccacaagatattacgtcaacagcagcacctatttggaagcaacgtaactgactgctcgggcaacttttgtttgttccggtcggaaaccaaggaccttctgttcagagatgacacagtatgtttggccaaacttcatgacagaaacacatatgaaaaatacttaggagaagaatatgtcaaggctgttggtaacctgagaaaatgctccacctcatcactcctggaagcctgcactttccgtagaccttaaaatctcagaggtagggctgccaccaaggtgaagatgggaacgcagatgatccatgagtttgccctggtttcactggcccaagtggtttgtgctaaccacgtctgtcttcacagctctgtgttgccatgtgtgctgaacaaaaaataaaaattattattgattttatatttc

SEQ ID NO: 11380 - DNA, 5067 bp, Homo sapiens
ctcctccccatcctctccctctgtccctctgtccctctgaccctgcactgtcccagcaccatgggacccacctcaggtcccagcctgctgctcctgctactaacccacctccccctggctctggggagtcccatgtactctatcatcacccccaacatcttgcggctggagagcgaggagaccatggtgctggaggcccacgacgcgcaaggggatgttccagtcactgttactgtccacgacttcccaggcaaaaaactagtgctgtccagtgagaagactgtgctgacccctgccaccaaccacatgggcaacgtcaccttcacgatcccagccaacagggagttcaagtcagaaaaggggcgcaacaagttcgtgaccgtgcaggccaccttcgggacccaagtggtggagaaggtggtgctggtcagcctgcagagcgggtacctcttcatccagacagacaagaccatctacacccctggctccacagttctctatcggatcttcaccgtcaaccacaagctgctacccgtgggccggacggtcatggtcaacattgagaacccggaaggcatcccggtcaagcaggactccttgtcttctcagaaccagcttggcgtcttgcccttgtcttgggacattccggaactcgtcaacatgggccagtggaagatccgagcctactatgaaaactcaccacagcaggtcttctccactgagtttgaggtgaaggagtacgtgctgcccagtttcgaggtcatagtggagcctacagagaaattctactacatctataacgagaagggcctggaggtcaccatcaccgccaggttcctctacgggaagaaagtggagggaactgcctttgtcatcttcgggatccaggatggcgaacagaggatttccctgcctgaatccctcaagcgcattccgattgaggatggctcgggggaggttgtgctgagccggaaggtactgctggacggggtgcagaacctccgagcagaagacctggtggggaagtctttgtacgtgtctgccaccgtcatcttgcactcaggcagtgacatggtgcaggcagagcgcagcgggatccccatcgtgacctctccctaccagatccacttcaccaagacacccaagtacttcaaaccaggaatgccctttgacctcatggtgttcgtgacgaaccctgatggctctccagcctaccgagtccccgtggcagtccagggcgaggacactgtgcagtctctaacccagggagatggcgtggccaaactcagcatcaacacacaccccagccagaagcccttgagcatcacggtgcgcacgaagaagcaggagctctcggaggcagagcaggctaccaggaccatgcaggctctgccctacagcaccgtgggcaactccaacaattacctgcatctctcagtgctacgtacagagctcagacccggggagaccctcaacgtcaacttcctcctgcgaatggaccgcgcccacgaggccaagatccgctactacacctacctgatcatgaacaagggcaggctgttgaaggcgggacgccaggtgcgagagcccggccaggacctggtggtgctgcccctgtccatcaccaccgacttcatcccttccttccgcctggtggcgtactacacgctgatcggtgccagcggccagagggaggtggtggccgactccgtgtgggtggacgtcaaggactcctgcgtgggctcgctggtggtaaaaagcggccagtcagaagaccggcagcctgtacctgggcagcagatgaccctgaagatagagggtgaccacggggcccgggtggtactggtggccgtggacaagggcgtgttcgtgctgaataagaagaacaaactgacgcagagtaagatctgggacgtggtggagaaggcagacatcggctgcaccccgggcagtgggaaggattacgccggtgtcttctccgacgcagggctgaccttcacgagcagcagtggccagcagaccgcccagagggcagaacttcagtgcccgcagccagccgcccgccgacgccgttccgtgcagctcacggagaagcgaatggacaaagtcggcaagtaccccaaggagctgcgcaagtgctgcgaggacggcatgcgggagaaccccatgaggttctcgtgccagcgccggacccgtttcatctccctgggcgaggcgtgcaagaaggtcttcctggactgctgcaactacatcacagagctgcggcggcagcacgcgcgggccagccacctgggcctggccaggagtaacctggatgaggacatcattgcagaagagaacatcgtttcccgaagtgagttcccagagagctggctgtggaacgttgaggacttgaaagagccaccgaaaaatggaatctctacgaagctcatgaatatatttttgaaagactccatcaccacgtgggagattctggctgtcagcatgtcggacaagaaagggatctgtgtggcagaccccttcgaggtcacagtaatgcaggacttcttcatcgacctgcggctaccctactctgttgttcgaaacgagcaggtggaaatccgagccgttctctacaattaccggcagaaccaagagctcaaggtgagggtggaactactccacaatccagccttctgcagcctggccaccaccaagaggcgtcaccagcagaccgtaaccatcccccccaagtcctcgttgtccgttccatatgtcatcgtgccgctaaagaccggcctgcaggaagtggaagtcaaggctgccgtctaccatcatttcatcagtgacggtgtcaggaagtccctgaaggtcgtgccggaaggaatcagaatgaacaaaactgtggctgttcgcaccctggatccagaacgcctgggccgtgaaggagtgcagaaagaggacatcccacctgcagacctcagtgaccaagtcccggacaccgagtctgagaccagaattctcctgcaagggaccccagtggcccagatgacagaggatgccgtcgacgcggaacggctgaagcacctcattgtgaccccctcgggctgcggggaacagaacatgatcggcatgacgcccacggtcatcgctgtgcattacctggatgaaacggagcagtgggagaagttcggcctagagaagcggcagggggccttggagctcatcaagaaggggtacacccagcagctggccttcagacaacccagctctgcctttgcggccttcgtgaaacgggcacccagcacctggctgaccgcctacgtggtcaaggtcttctctctggctgtcaacctcatcgccatcgactcccaagtcctctgcggggctgttaaatggctgatcctggagaagcagaagcccgacggggtcttccaggaggatgcgcccgtgatacaccaagaaatgattggtggattacggaacaacaacgagaaagacatggccctcacggcctttgttctcatctcgctgcaggaggctaaagatatttgcgaggagcaggtcaacagcctgccaggcagcatcactaaagcaggagacttccttgaagccaactacatgaacctacagagatcctacactgtggccattgctggctatgctctggcccagatgggcaggctgaaggggcctcttcttaacaaatttctgaccacagccaaagataagaaccgctgggaggaccctggtaagcagctctacaacgtggaggccacatcctatgccctcttggccctactgcagctaaaagactttgactttgtgcctcccgtcgtgcgttggctcaatgaacagagatactacggtggtggctatggctctacccaggccaccttcatggtgttccaagccttggctcaataccaaaaggacgcccctgaccaccaggaactgaaccttgatgtgtccctccaactgcccagccgcagctccaagatcacccaccgtatccactgggaatctgccagcctcctgcgatcagaagagaccaaggaaaatgagggtttcacagtcacagctgaaggaaaaggccaaggcaccttgtcggtggtgacaatgtaccatgctaaggccaaagatcaactcacctgtaataaattcgacctcaaggtcaccataaaaccagcaccggaaacagaaaagaggcctcaggatgccaagaacactatgatccttgagatctgtaccaggtaccggggagaccaggatgccactatgtctatattggacatatccatgatgactggctttgctccagacacagatgacctgaagcagctggccaatggtgttgacagatacatctccaagtatgagctggacaaagccttctccgataggaacaccctcatcatctacctggacaaggtctcacactctgaggatgactgtctagctttcaaagttcaccaatactttaatgtagagcttatccagcctggagcagtcaaggtctacgcctattacaacctggaggaaagctgtacccggttctaccatccggaaaaggaggatggaaagctgaacaagctctgccgtgatgaactgtgccgctgtgctgaggagaattgcttcatacaaaagtcggatgacaaggtcaccctggaagaacggctggacaaggcctgtgagccaggagtggactatgtgtacaagacccgactggtcaaggttcagctgtccaatgactttgacgagtacatcatggccattgagcagaccatcaagtcaggctcggatgaggtgcaggttggacagcagcgcacgttcatcagccccatcaagtgcagagaagccctgaagctggaggagaagaaacactacctcatgtggggtctctcctccgatttctggggagagaagcccaacctcagctacatcatcgggaaggacacttgggtggagcactggcctgaggaggacgaatgccaagacgaagagaaccagaaacaatgccaggacctcggcgccttcaccgagagcatggttgtctttgggtgccccaactgaccacacccccattcc

SEQ ID NO: 11381 - DNA, 4678 bp, Homo sapiens
gcacacagagcagcataaagcccagttgctttgggaagtgtttgggaccagatggattgtagggagtagggtacaatacagtctgttctcctccagctccttctttctgcaacatggggaagaacaaactccttcatccaagtctggttcttctcctcttggtcctcctgcccacagacgcctcagtctctggaaaaccgcagtatatggttctggtcccctccctgctccacactgagaccactgagaagggctgtgtccttctgagctacctgaatgagacagtgactgtaagtgcttccttggagtctgtcaggggaaacaggagcctcttcactgacctggaggcggagaatgacgtactccactgtgtcgccttcgctgtcccaaagtcttcatccaatgaggaggtaatgttcctcactgtccaagtgaaaggaccaacccaagaatttaagaagcggaccacagtgatggttaagaacgaggacagtctggtctttgtccagacagacaaatcaatctacaaaccagggcagacagtgaaatttcgtgttgtctccatggatgaaaactttcaccccctgaatgagttgattccactagtatacattcaggatcccaaaggaaatcgcatcgcacaatggcagagtttccagttagagggtggcctcaagcaattttcttttcccctctcatcagagcccttccagggctcctacaaggtggtggtacagaagaaatcaggtggaaggacagagcaccctttcaccgtggaggaatttgttcttcccaagtttgaagtacaagtaacagtgccaaagataatcaccatcttggaagaagagatgaatgtatcagtgtgtggcctatacacatatgggaagcctgtccctggacatgtgactgtgagcatttgcagaaagtatagtgacgcttccgactgccacggtgaagattcacaggctttctgtgagaaattcagtggacagctaaacagccatggctgcttctatcagcaagtaaaaaccaaggtcttccagctgaagaggaaggagtatgaaatgaaacttcacactgaggcccagatccaagaagaaggaacagtggtggaattgactggaaggcagtccagtgaaatcacaagaaccataaccaaactctcatttgtgaaagtggactcacactttcgacagggaattcccttctttgggcaggtgcgcctagtagatgggaaaggcgtccctataccaaataaagtcatattcatcagaggaaatgaagcaaactattactccaatgctaccacggatgagcatggccttgtacagttctctatcaacaccaccaatgttatgggtacctctcttactgttagggtcaattacaaggatcgtagtccctgttacggctaccagtgggtgtcagaagaacacgaagaggcacatcacactgcttatcttgtgttctccccaagcaagagctttgtccaccttgagcccatgtctcatgaactaccctgtggccatactcagacagtccaggcacattatattctgaatggaggcaccctgctggggctgaagaagctctccttctattatctgataatggcaaagggaggcattgtccgaactgggactcatggactgcttgtgaagcaggaagacatgaagggccatttttccatctcaatccctgtgaagtcagacattgctcctgtcgctcggttgctcatctatgctgttttacctaccggggacgtgattggggattctgcaaaatatgatgttgaaaattgtctggccaacaaggtggatttgagcttcagcccatcacaaagtctcccagcctcacacgcccacctgcgagtcacagcggctcctcagtccgtctgcgccctccgtgctgtggaccaaagcgtgctgctcatgaagcctgatgctgagctctcggcgtcctcggtttacaacctgctaccagaaaaggacctcactggcttccctgggcctttgaatgaccaggacgatgaagactgcatcaatcgtcataatgtctatattaatggaatcacatatactccagtatcaagtacaaatgaaaaggatatgtacagcttcctagaggacatgggcttaaaggcattcaccaactcaaagattcgtaaacccaaaatgtgtccacagcttcaacagtatgaaatgcatggacctgaaggtctacgtgtaggtttttatgagtcagatgtaatgggaagaggccatgcacgcctggtgcatgttgaagagcctcacacggagaccgtacgaaagtacttccctgagacatggatctgggatttggtggtggtaaactcagcaggtgtggctgaggtaggagtaacagtccctgacaccatcaccgagtggaaggcaggggccttctgcctgtctgaagatgctggacttggtatctcttccactgcctctctccgagccttccagcccttctttgtggagctcacaatgccttactctgtgattcgtggagaggccttcacactcaaggccacggtcctaaactaccttcccaaatgcatccgggtcagtgtgcagctggaagcctctcccgccttcctagctgtcccagtggagaaggaacaagcgcctcactgcatctgtgcaaacgggcggcaaactgtgtcctgggcagtaaccccaaagtcattaggaaatgtgaatttcactgtgagcgcagaggcactagagtctcaagagctgtgtgggactgaggtgccttcagttcctgaacacggaaggaaagacacagtcatcaagcctctgttggttgaacctgaaggactagagaaggaaacaacattcaactccctactttgtccatcaggtggtgaggtttctgaagaattatccctgaaactgccaccaaatgtggtagaagaatctgcccgagcttctgtctcagttttgggagacatattaggctctgccatgcaaaacacacaaaatcttctccagatgccctatggctgtggagagcagaatatggtcctctttgctcctaacatctatgtactggattatctaaatgaaacacagcagcttactccagagatcaagtccaaggccattggctatctcaacactggttaccagagacagttgaactacaaacactatgatggctcctacagcacctttggggagcgatatggcaggaaccagggcaacacctggctcacagcctttgttctgaagacttttgcccaagctcgagcctacatcttcatcgatgaagcacacattacccaagccctcatatggctctcccagaggcagaaggacaatggctgtttcaggagctctgggtcactgctcaacaatgccataaagggaggagtagaagatgaagtgaccctctccgcctatatcaccatcgcccttctggagattcctctcacagtcactcaccctgttgtccgcaatgccctgttttgcctggagtcagcctggaagacagcacaagaaggggaccatggcagccatgtatataccaaagcactgctggcctatgcttttgccctggcaggtaaccaggacaagaggaaggaagtactcaagtcacttaatgaggaagctgtgaagaaagacaactctgtccattgggagcgccctcagaaacccaaggcaccagtggggcatttttacgaaccccaggctccctctgctgaggtggagatgacatcctatgtgctcctcgcttatctcacggcccagccagccccaacctcggaggacctgacctctgcaaccaacatcgtgaagtggatcacgaagcagcagaatgcccagggcggtttctcctccacccaggacacagtggtggctctccatgctctgtccaaatatggagcagccacatttaccaggactgggaaggctgcacaggtgactatccagtcttcagggacattttccagcaaattccaagtggacaacaacaaccgcctgttactgcagcaggtctcattgccagagctgcctggggaatacagcatgaaagtgacaggagaaggatgtgtctacctccagacatccttgaaatacaatattctcccagaaaaggaagagttcccctttgctttaggagtgcagactctgcctcaaacttgtgatgaacccaaagcccacaccagcttccaaatctccctaagtgtcagttacacagggagccgctctgcctccaacatggcgatcgttgatgtgaagatggtctctggcttcattcccctgaagccaacagtgaaaatgcttgaaagatctaaccatgtgagccggacagaagtcagcagcaaccatgtcttgatttaccttgataaggtgtcaaatcagacactgagcttgttcttcacggttctgcaagatgtcccagtaagagatctgaaaccagccatagtgaaagtctatgattactacgagacggatgagtttgcaattgctgagtacaatgctccttgcagcaaagatcttggaaatgcttgaagaccacaaggctgaaaagtgctttgctggagtcctgttctcagagctccacagaagacacgtgtttttgtatctttaaagacttgatgaataaacactttttctggtcaatgtcaaaaaaaaaaaaaaaaaaaaaaaaa

SEQ ID NO: 11382 - DNA, 803 bp, Homo sapiens
gcccatagtttattataaaggtgactgcaccctgcagccaccagcactgcctggctccacgtgcctcctggtctcagtatggcgctgtcctgggttcttacagtcctgagcctcctacctctgctggaagcccagatcccattgtgtgccaacctagtaccggtgcccatcaccaacgccaccctggaccagatcactggcaagtggttttatatcgcatcggcctttcgaaacgaggagtacaataagtcggttcaggagatccaagcaaccttcttttacttcacccccaacaagacagaggacacgatctttctcagagagtaccagacccgacaggaccagtgcatctataacaccacctacctgaatgtccagcgggaaaatgggaccatctccagatacgtgggaggccaagagcatttcgctcacttgctgatcctcagggacaccaagacctacatgcttgcttttgacgtgaacgatgagaagaactgggggctgtctgtctatgctgacaagccagagacgaccaaggagcaactgggagagttctacgaagctctcgactgcttgcgcattcccaagtcagatgtcgtgtacaccgattggaaaaaggataagtgtgagccactggagaagcagcacgagaaggagaggaaacaggaggagggggaatcctagcaggacacagccttggatcaggacagagacttggggccatcctgcccctccaacccgacatgtgtacctcagctttttccctcacttgcatcaataaagcttctgtgtttggaacagct

SEQ ID NO: 11383 - DNA, 1538 bp, Homo sapiens
cctccaaccacctgcacgcctgcctgccagggcctctctggggcagccatgaagtccctcgtcctgctcctttgtcttgctcagctctggggctgccactcagccccacatggcccagggctgatttatagacaaccgaactgcgatgatccagaaactgaggaagcagctctggtggctatagactacatcaatcaaaaccttccttggggatacaaacacaccttgaaccagattgatgaagtaaaggtgtggcctcagcagccctccggagagctgtttgagattgaaatagacaccctggaaaccacctgccatgtgctggaccccacccctgtggcaagatgcagcgtgaggcagctgaaggagcatgctgtcgaaggagactgtgatttccagctgttgaaactagatggcaagttttccgtggtatacgcaaaatgtgattccagtccagactcagccgaggacgtgcgcaaggtgtgccaagactgccccctgctggccccgctgaacgacaccagggtggtgcacgccgcgaaagctgccctggccgccttcaacgctcagaacaacggctccaattttcagctggaggaaatttcccgggctcagcttgtgcccctcccaccttctacctatgtggagtttacagtgtctggcactgactgtgttgctaaagaggccacagaggcagccaagtgtaacctgctggcagaaaagcaatatggcttttgtaaggcaacactcagtgagaagcttggtggggcagaggttgcagtgacctgcacggtgttccaaacacagcccgtgacctcacagccccaaccagaaggtgccaatgaagcagtccccacccccgtggtggacccagatgcacctccgtcccctccacttggcgcacctggactccctccagctggctcacccccagactcccatgtgttactggcagctcctccaggacaccagttgcaccgggcgcactacgacctgcgccacaccttcatgggtgtggtctcattggggtcaccctcaggagaagtgtcgcacccccggaaaacacgcacagtggtgcagcctagtgttggtgctgctgctgggccagtggttcctccatgtccggggaggatcagacacttcaaggtctaggctagacatggcagagatgaggaggtttggcacagaaaacatagccaccattttgtccaagcctgggcatgggtggggggccttgtctgctggccacgcaagtgtcacatgcgatctacattaatatcaagtcttgactccctacttcccgtcattcctcacaggacagaagcagagtgggtggtggttatgtttgacagaaggcattaggttgacaacttgtcatgattttgacggtaagccaccatgattgtgttctctgcctctggttgaccttacaaaaaccattggaactgtgactttgaaaggtgctcttgctaagcttatatgtgcctgttaatgaaagtgcctgaaagaccttccttaataaagaaggttctaagctg

SEQ ID NO: 11384 - DNA, 844 bp, Homo sapiens
cagacacagagtaaacttttgctgggctccaagtgaccgcccatagtttattataaaggtgactgcaccctgcagccaccagcactgcctggctccacgtgcctcctggtctcagtatggcgctgtcctgggttcttacagtcctgagcctcctacctctgctggaagcccagatcccattgtgtgccaacctagtaccggtgcccatcaccaacgccaccctggaccggatcactggcaagtggttttatatcgcatcggcctttcgaaacgaggagtacaataagtcggttcaggagatccaagcaaccttcttttactttacccccaacaagacagaggacacgatctttctcagagagtaccagacccgccagaaccagtgcttctataactccagttacctgaatgtccagcgggagaatgggaccgtctccagatacgagggaggccgagaacatgttgctcacctgctgttccttagggacaccaagaccttgatgtttggttcctacctggacgatgagaagaactgggggctgtctttctatgctgacaagccagagacgaccaaggagcaactgggagagttctacgaagctctcgactgcttgtgcattcccaggtcagatgtcatgtacaccgactggaaaaaggataagtgtgagccactggagaagcagcacgagaaggagaggaaacaggaggagggggaatcctagcaggacacagccttggatcaggacagagacttgggggccatcctgcccctccaacccgacatgtgtacctcagctttttccctcacttgcatcaataaagcttctgtgtttggaacagctaa

SEQ ID NO: 11385 - DNA, 2574 bp, Homo sapiens
ttggatgttccgggaaagtgatgtgggtaggacaggcggggcgagccgcaggtgccagaacacagattgtataaaaggctgggggctggtggggagcaggggaagggaatgtgaccaggtctaggtctggagtttcagcttggacactgagccaagcagacaagcaaagcaagccaggacacaccatcctgccccaggcccagcttctctcctgccttccaacgccatggggagcaatctcagcccccaactctgcctgatgccctttatcttgggcctcttgtctggaggtgtgaccaccactccatggtctttggcccggccccagggatcctgctctctggagggggtagagatcaaaggcggctccttccgacttctccaagagggccaggcactggagtacgtgtgtccttctggcttctacccgtaccctgtgcagacacgtacctgcagatctacggggtcctggagcaccctgaagactcaagaccaaaagactgtcaggaaggcagagtgcagagcaatccactgtccaagaccacacgacttcgagaacggggaatactggccccggtctccctactacaatgtgagtgatgagatctctttccactgctatgacggttacactctccggggctctgccaatcgcacctgccaagtgaatggccgatggagtgggcagacagcgatctgtgacaacggagcggggtactgctccaacccgggcatccccattggcacaaggaaggtgggcagccagtaccgccttgaagacagcgtcacctaccactgcagccgggggcttaccctgcgtggctcccagcggcgaacgtgtcaggaaggtggctcttggagcgggacggagccttcctgccaagactccttcatgtacgacacccctcaagaggtggccgaagctttcctgtcttccctgacagagaccatagaaggagtcgatgctgaggatgggcacggcccaggggaacaacagaagcggaagatcgtcctggacccttcaggctccatgaacatctacctggtgctagatggatcagacagcattggggccagcaacttcacaggagccaaaaagtgtctagtcaacttaattgagaaggtggcaagttatggtgtgaagccaagatatggtctagtgacatatgccacataccccaaaatttgggtcaaagtgtctgaagcagacagcagtaatgcagactgggtcacgaagcagctcaatgaaatcaattatgaagaccacaagttgaagtcagggactaacaccaagaaggccctccaggcagtgtacagcatgatgagctggccagatgacgtccctcctgaaggctggaaccgcacccgccatgtcatcatcctcatgactgatggattgcacaacatgggcggggacccaattactgtcattgatgagatccgggacttgctatacattggcaaggatcgcaaaaacccaagggaggattatctggatgtctatgtgtttggggtcgggcctttggtgaaccaagtgaacatcaatgctttggcttccaagaaagacaatgagcaacatgtgttcaaagtcaaggatatggaaaacctggaagatgttttctaccaaatgatcgatgaaagccagtctctgagtctctgtggcatggtttgggaacacaggaagggtaccgattaccacaagcaaccatggcaggccaagatctcagtcattcgcccttcaaagggacacgagagctgtatgggggctgtggtgtctgagtactttgtgctgacagcagcacattgtttcactgtggatgacaaggaacactcaatcaaggtcagcgtaggaggggagaagcgggacctggagatagaagtagtcctatttcaccccaactacaacattaatgggaaaaaagaagcaggaattcctgaattttatgactatgacgttgccctgatcaagctcaagaataagctgaaatatggccagactatcaggcccatttgtctcccctgcaccgagggaacaactcgagctttgaggcttcctccaactaccacttgccagcaacaaaaggaagagctgctccctgcacaggatatcaaagctctgtttgtgtctgaggaggagaaaaagctgactcggaaggaggtctacatcaagaatggggataagaaaggcagctgtgagagagatgctcaatatgccccaggctatgacaaagtcaaggacatctcagaggtggtcacccctcggttcctttgtactggaggagtgagtccctatgctgaccccaatacttgcagaggtgattctggcggccccttgatagttcacaagagaagtcgtttcattcaagttggtgtaatcagctggggagtagtggatgtctgcaaaaaccagaagcggcaaaagcaggtacctgctcacgcccgagactttcacatcaacctctttcaagtgctgccctggctgaaggagaaactccaagatgaggatttgggttttctataaggggtttcctgctggacaggggcgtgggattgaattaaaacagctgcgacaac

SEQ ID NO: 11386 - DNA, 3321 bp, Homo sapiens
atgaagattttgatacttggtatttttctgtttttatgtagtaccccagcctgggcgaaagaaaagcattattacattggaattattgaaacgacttgggattatgcctctgaccatggggaaaagaaacttatttctgttgacacggaacattccaatatctatcttcaaaatggcccagatagaattgggagactatataagaaggccctttatcttcagtacacagatgaaacctttaggacaactatagaaaaaccggtctggcttgggtttttaggccctattatcaaagctgaaactggagataaagtttatgtacacttaaaaaaccttgcctctaggccctacacctttcattcacatggaataacttactataaggaacatgagggggccatctaccctgataacaccacagattttcaaagagcagatgacaaagtatatccaggagagcagtatacatacatgttgcttgccactgaagaacaaagtcctggggaaggagatggcaattgtgtgactaggatttaccattcccacattgatgctccaaaagatattgcctcaggactcatcggacctttaataatctgtaaaaaagattctctagataaagaaaaagaaaaacatattgaccgagaatttgtggtgatgttttctgtggtggatgaaaatttcagctggtacctagaagacaacattaaaacctactgctcagaaccagagaaagttgacaaagacaacgaagacttccaggagagtaacagaatgtattctgtgaatggatacacttttggaagtctcccaggactctccatgtgtgctgaagacagagtaaaatggtacctttttggtatgggtaatgaagttgatgtgcacgcagctttctttcacgggcaagcactgactaacaagaactaccgtattgacacaatcaacctctttcctgctaccctgtttgatgcttatatggtggcccagaaccctggagaatggatgctcagctgtcagaatctaaaccatctgaaagccggtttgcaagcctttttccaggtccaggagtgtaacaagtcttcatcaaaggataatatccgtgggaagcatgttagacactactacattgccgctgaggaaatcatctggaactatgctccctctggtatagacatcttcactaaagaaaacttaacagcacctggaagtgactcagcggtgttttttgaacaaggtaccacaagaattggaggctcttataaaaagctggtttatcgtgagtacacagatgcctccttcacaaatcgaaaggagagaggccctgaagaagagcatcttggcatcctgggtcctgtcatttgggcagaggtgggagacaccatcagagtaaccttccataacaaaggagcatatcccctcagtattgagccgattggggtgagattcaataagaacaacgagggcacatactattccccaaattacaacccccagagcagaagtgtgcctccttcagcctcccatgtggcacccacagaaacattcacctatgaatggactgtccccaaagaagtaggacccactaatgcagatcctgtgtgtctagctaagatgtattattctgctgtggatcccactaaagatatattcactgggcttattgggccaatgaaaatatgcaagaaaggaagtttacatgcaaatgggagacagaaagatgtagacaaggaattctatttgtttcctacagtatttgatgagaatgagagtttactcctggaagataatattagaatgtttacaactgcacctgatcaggtggataaggaagatgaagactttcaggaatctaataaaatgcactccatgaatggattcatgtatgggaatcagccgggtctcactatgtgcaaaggagattcggtcgtgtggtacttattcagcgccggaaatgaggccgatgtacatggaatatacttttcaggaaacacatatctgtggagaggagaacggagagacacagcaaacctcttccctcaaacaagtcttacgctccacatgtggcctgacacagaggggacttttaatgttgaatgccttacaactgatcattacacaggcggcatgaagcaaaaatatactgtgaaccaatgcaggcggcagtctgaggattccaccttctacctgggagagaggacatactatatcgcagcagtggaggtggaatgggattattccccacaaagggagtgggaaaaggagctgcatcatttacaagagcagaatgtttcaaatgcatttttagataagggagagttttacataggctcaaagtacaagaaagttgtgtatcggcagtatactgatagcacattccgtgttccagtggagagaaaagctgaagaagaacatctgggaattctaggtccacaacttcatgcagatgttggagacaaagtcaaaattatctttaaaaacatggccacaaggccctactcaatacatgcccatggggtacaaacagagagttctacagttactccaacattaccaggtgaaactctcacttacgtatggaaaatcccagaaagatctggagctggaacagaggattctgcttgtattccatgggcttattattcaactgtggatcaagttaaggacctctacagtggattaattggccccctgattgtttgtcgaagaccttacttgaaagtattcaatcccagaaggaagctggaatttgcccttctgtttctagtttttgatgagaatgaatcttggtacttagatgacaacatcaaaacatactctgatcaccccgagaaagtaaacaaagatgatgaggaattcatagaaagcaataaaatgcatgctattaatggaagaatgtttggaaacctacaaggcctcacaatgcacgtgggagatgaagtcaactggtatctgatgggaatgggcaatgaaatagacttacacactgtacattttcacggccatagcttccaatacaagcacaggggagtttatagttctgatgtctttgacattttccctggaacataccaaaccctagaaatgtttccaagaacacctggaatttggttactccactgccatgtgaccgaccacattcatgctggaatggaaaccacttacaccgttctacaaaatgaagacaccaaatctggctgaatgaaataaattggtgataagtggaaaaaagagaaaaaccaatgattcataacaatgtatgtgaaagtgtaaaatagaatgttactttggaatgactataaacattaaaagagactggagcat

SEQ ID NO: 11387 - DNA, 1668 bp, Homo sapiens
aaatatgtttggataacccagcagagccatttaacctttgggaacaaggcaactagcgtctggcagcaggaatccaaccagtgccctgagttctgaggcagagaggaggacagaagaaacaagaggctggagattgtcaaattcagtatcccagttggctcttgattcttggtgaaaccatccctcagctcctagagggagattgttagatcatgaaactaattaccatccttttcctctgctccaggctgctactaagtttaacccaggaatcacagtccgaggaaattgactgcaatgacaaggatttatttaaagctgtggatgctgctctgaagaaatataacagtcaaaaccaaagtaacaaccagtttgtattgtaccgcataactgaagccactaagacggttggctctgacacgttttattccttcaagtacgaaatcaaggagggggattgtcctgttcaaagtggcaaaacctggcaggactgtgagtacaaggatgctgcaaaagcagccactggagaatgcacggcaaccgtggggaagaggagcagtacgaaattctccgtggctacccagacctgccagattactccagccgagggccctgtggtgacagcccagtacgactgcctcggctgtgtgcatcctatatcaacgcagagcccagacctggagcccattctgagacacggcattcagtactttaacaacaacactcaacattcctccctcttcatgcttaatgaagtaaaacgggcccaaagacaggtggtggctggattgaactttcgaattacctactcaattgtgcaaacgaattgttccaaagagaattttctgttcttaactccagactgcaagtccctttggaatggtgataccggtgaatgtacagataatgcatacatcgatattcagctacgaattgcttccttctcacagaactgtgacatttatccagggaaggattttgtacaaccacctaccaagatttgcgtgggctgccccagagatatacccaccaacagcccagagctggaggagacactgactcacaccatcacaaagcttaatgcagagaataacgcaactttctatttcaagattgacaatgtgaaaaaagcaagagtacaggtggtggctggcaagaaatattttattgacttcgtggccagggaaaccacatgttccaaggaaagtaatgaagagttgaccgaaagctgtgagaccaaaaaacttggccaaagcctagattgcaacgctgaagtttatgtggtaccctgggagaaaaaaatttaccctactgtcaactgtcaaccactgggaatgatctcactgatgaaaaggcctccaggtttttcacctttccgatcatcacgaataggggaaataaaagaagaaacaactagtcacctaaggtcctgcgagtacaagggtcgacccccaaaggcaggggcagagccagcatctgagagggaggtctcttgaccaatgggcagaatcttcactccaggcacatagccccaaccacctctgccagcaaccttgagaggaaggacaagaagaaagatgggatagaatttaaatagagaagaatgccattttatcactctgcctctgggtgaaataaagatcagtcttgatgttctaactctaaaaa

SEQ ID NO: 11388 - DNA, 1984 bp, Homo sapiens
ctgatttacaggaactcacaccagcgatcaatcttccttaatttgtaactgggcagtgtcccgggccagccaatagctaagactgccccccccgcaccccaccctccctgaccctgggggactctctactcagtctgcactggagctgcctggtgaccagaagtttggagtccgctgacgtcgccgcccagatggcctccaggctgaccctgctgaccctcctgctgctgctgctggctggggatagagcctcctcaaatccaaatgctaccagctccagctcccaggatccagagagtttgcaagacagaggcgaagggaaggtcgcaacaacagttatctccaagatgctattcgttgaacccatcctggaggtttccagcttgccgacaaccaactcaacaaccaattcagccaccaaaataacagctaataccactgatgaacccaccacacaacccaccacagagcccaccacccaacccaccatccaacccacccaaccaactacccagctcccaacagattctcctacccagcccactactgggtccttctgcccaggacctgttactctctgctctgacttggagagtcattcaacagaggccgtgttgggggatgctttggtagatttctccctgaagctctaccacgccttctcagcaatgaagaaggtggagaccaacatggccttttccccattcagcatcgccagcctccttacccaggtcctgctcggggctggggagaacaccaaaacaaacctggagagcatcctctcttaccccaaggacttcacctgtgtccaccaggccctgaagggcttcacgaccaaaggtgtcacctcagtctctcagatcttccacagcccagacctggccataagggacacctttgtgaatgcctctcggaccctgtacagcagcagccccagagtcctaagcaacaacagtgacgccaacttggagctcatcaacacctgggtggccaagaacaccaacaacaagatcagccggctgctagacagtctgccctccgatacccgccttgtcctcctcaatgctatctacctgagtgccaagtggaagacaacatttgatcccaagaaaaccagaatggaaccctttcacttcaaaaactcagttataaaagtgcccatgatgaatagcaagaagtaccctgtggcccatttcattgaccaaactttgaaagccaaggtggggcagctgcagctctcccacaatctgagtttggtgatcctggtaccccagaacctgaaacatcgtcttgaagacatggaacaggctctcagcccttctgttttcaaggccatcatggagaaactggagatgtccaagttccagcccactctcctaacactaccccgcatcaaagtgacgaccagccaggatatgctctcaatcatggagaaattggaattcttcgatttttcttatgaccttaacctgtgtgggctgacagaggacccagatcttcaggtttctgcgatgcagcaccagacagtgctggaactgacagagactggggtggaggcggctgcagcctccgccatctctgtggcccgcaccctgctggtctttgaagtgcagcagcccttcctcttcgtgctctgggaccagcagcacaagttccctgtcttcatggggcgagtatatgaccccagggcctgagacctgcaggatcaggttagggcgagcgctacctctccagcctcagctctcagttgcagccctgctgctgcctgcctggacttggcccctgccacctcctgcctcaggtgtccgctatccaccaaaagggctccctgagggtctgggcaagggacctgcttctattagcccttctccatggccctgccatgctctccaaaccactttttgcagctttctctagttcaagttcaccagactctataaataaaacctgacagaccatgactttcaaaaaaaaaaaaaaaaaa

SEQ ID NO: 11389 - DNA, 5426 bp, Homo sapiens
agaaggtagcagacagacagacggatctaacctctcttggatcctccagccatgaggctgctctgggggctgatctgggcatccagcttcttcaccttatctctgcagaagcccaggttgctcttgttctctccttctgtggttcatctgggggtccccctatcggtgggggtgcagctccaggatgtgccccgaggacaggtagtgaaaggatcagtgttcctgagaaacccatctcgtaataatgtcccctgctccccaaaggtggacttcacccttagctcagaaagagacttcgcactcctcagtctccaggtgcccttgaaagatgcgaagagctgtggcctccatcaactcctcagaggccctgaggtccagctggtggcccattcgccatggctaaaggactctctgtccagaacgacaaacatccagggtatcaacctgctcttctcctctcgccgggggcacctctttttgcagacggaccagcccatttacaaccctggccagcgggttcggtaccgggtctttgctctggatcagaagatgcgcccgagcactgacaccatcacagtcatggtggagaactctcacggcctccgcgtgcggaagaaggaggtgtacatgccctcgtccatcttccaggatgactttgtgatcccagacatctcagagccagggacctggaagatctcagcccgattctcagatggcctggaatccaacagcagcacccagtttgaggtgaagaaatatgtccttcccaactttgaggtgaagatcacccctggaaagccctacatcctgacggtgccaggccatcttgatgaaatgcagttagacatccaggccaggtacatctatgggaagccagtgcagggggtggcatatgtgcgctttgggctcctagatgaggatggtaagaagactttctttcgggggctggagagtcagaccaagctggtgaatggacagagccacatttccctctcaaaggcagagttccaggacgccctggagaagctgaatatgggcattactgacctccaggggctgcgcctctacgttgctgcagccatcattgagtctccaggtggggagatggaggaggcagagctcacatcctggtattttgtgtcatctcccttctccttggatcttagcaagaccaagcgacaccttgtgcctggggcccccttcctgctgcaggccttggtccgtgagatgtcaggctccccagcttctggcattcctgtcaaagtttctgccacggtgtcttctcctgggtctgttcctgaagtccaggacattcagcaaaacacagacgggagcggccaagtcagcattccaataattatccctcagaccatctcagagctgcagctctcagtatctgcaggctccccacatccagcgatagccaggctcactgtggcagccccaccttcaggaggccccgggtttctgtctattgagcggccggattctcgacctcctcgtgttggggacactctgaacctgaacttgcgagccgtgggcagtggggccaccttttctcattactactacatgatcctatcccgagggcagatcgtgttcatgaatcgagagcccaagaggaccctgacctcggtctcggtgtttgtggaccatcacctggcaccctccttctactttgtggccttctactaccatggagaccacccagtggccaactccctgcgagtggatgtccaggctggggcctgcgagggcaagctggagctcagcgtggacggtgccaagcagtaccggaacggggagtccgtgaagctccacttagaaaccgactccctagccctggtggcgctgggagccttggacacagctctgtatgctgcaggcagcaagtcccacaagcccctcaacatgggcaaggtctttgaagctatgaacagctatgacctcggctgtggtcctgggggtggggacagtgcccttcaggtgttccaggcagcgggcctggccttttctgatggagaccagtggaccttatccagaaagagactaagctgtcccaaggagaagacaacccggaaaaagagaaacgtgaacttccaaaaggcgattaatgagaaattgggtcagtatgcttccccgacagccaagcgctgctgccaggatggggtgacacgtctgcccatgatgcgttcctgcgagcagcgggcagcccgcgtgcagcagccggactgccgggagcccttcctgtcctgctgccaatttgctgagagtctgcgcaagaagagcagggacaagggccaggcgggcctccaacgagccctggagatcctgcaggaggaggacctgattgatgaggatgacattcccgtgcgcagcttcttcccagagaactggctctggagagtggaaacagtggaccgctttcaaatattgacactgtggctccccgactctctgaccacgtgggagatccatggcctgagcctgtccaaaaccaaaggcctatgtgtggccaccccagtccagctccgggtgttccgcgagttccacctgcacctccgcctgcccatgtctgtccgccgctttgagcagctggagctgcggcctgtcctctataactacctggataaaaacctgactgtgagcgtccacgtgtccccagtggaggggctgtgcctggctgggggcggagggctggcccagcaggtgctggtgcctgcgggctctgcccggcctgttgccttctctgtggtgcccacggcagccgccgctgtgtctctgaaggtggtggctcgagggtccttcgaattccctgtgggagatgcggtgtccaaggttctgcagattgagaaggaaggggccatccatagagaggagctggtctatgaactcaaccccttggaccaccgaggccggaccttggaaatacctggcaactctgatcccaatatgatccctgatggggactttaacagctacgtcagggttacagcctcagatccattggacactttaggctctgagggggccttgtcaccaggaggcgtggcctccctcttgaggcttcctcgaggctgtggggagcaaaccatgatctacttggctccgacactggctgcttcccgctacctggacaagacagagcagtggagcacactgcctcccgagaccaaggaccacgccgtggatctgatccagaaaggctacatgcggatccagcagtttcggaaggcggatggttcctatgcggcttggttgtcacgggacagcagcacctggctcacagcctttgtgttgaaggtcctgagtttggcccaggagcaggtaggaggctcgcctgagaaactgcaggagacatctaactggcttctgtcccagcagcaggctgacggctcgttccaggacccctgtccagtgttagacaggagcatgcaggggggtttggtgggcaatgatgagactgtggcactcacagcctttgtgaccatcgcccttcatcatgggctggccgtcttccaggatgagggtgcagagccattgaagcagagagtggaagcctccatctcaaaggcaaactcatttttgggggagaaagcaagtgctgggctcctgggtgcccacgcagctgccatcacggcctatgccctgacactgaccaaggcgcctgtggacctgctcggtgttgcccacaacaacctcatggcaatggcccaggagactggagataacctgtactggggctcagtcactggttctcagagcaatgccgtgtcgcccaccccggctcctcgcaacccatccgaccccatgccccaggccccagccctgtggattgaaaccacagcctacgccctgctgcacctcctgcttcacgagggcaaagcagagatggcagaccaggcttcggcctggctcacccgtcagggcagcttccaagggggattccgcagtacccaagacacggtgattgccctggatgccctgtctgcctactggattgcctcccacaccactgaggagaggggtctcaatgtgactctcagctccacaggccggaatgggttcaagtcccacgcgctgcagctgaacaaccgccagattcgcggcctggaggaggagctgcagttttccttgggcagcaagatcaatgtgaaggtgggaggaaacagcaaaggaaccctgaaggtccttcgtacctacaatgtcctggacatgaagaacacgacctgccaggacctacagatagaagtgacagtcaaaggccacgtcgagtacacgatggaagcaaacgaggactatgaggactatgagtacgatgagcttccagccaaggatgacccagatgcccctctgcagcccgtgacacccctgcagctgtttgagggtcggaggaaccgccgcaggagggaggcgcccaaggtggtggaggagcaggagtccagggtgcactacaccgtgtgcatctggcggaacggcaaggtggggctgtctggcatggccatcgcggacgtcaccctcctgagtggattccacgccctgcgtgctgacctggagaagctgacctccctctctgaccgttacgtgagtcactttgagaccgaggggccccacgtcctgctgtattttgactcggtccccacctcccgggagtgcgtgggctttgaggctgtgcaggaagtgccggtggggctggtgcagccggccagcgcaaccctgtacgactactacaaccccgagcgcagatgttctgtgttttacggggcaccaagtaagagcagactcttggccaccttgtgttctgctgaagtctgccagtgtgctgaggggaagtgccctcgccagcgtcgcgccctggagcggggtctgcaggacgaggatggctacaggatgaagtttgcctgctactacccccgtgtggagtacggcttccaggttaaggttctccgagaagacagcagagctgctttccgcctctttgagaccaagatcacccaagtcctgcacttcaccaaggatgtcaaggccgctgctaatcagatgcgcaacttcctggttcgagcctcctgccgccttcgcttggaacctgggaaagaatatttgatcatgggtctggatggggccacctatgacctcgagggacacccccagtacctgctggactcgaatagctggatcgaggagatgccctctgaacgcctgtgccggagcacccgccagcgggcagcctgtgcccagctcaacgacttcctccaggagtatggcactcaggggtgccaggtgtgagggctgccctcccacctccgctgggaggaacctgaacctgggaaccatgaagctggaagcactgctgtgtccgctttcatgaacacagcctgggaccagggcatattaaaggcttttggcagcaaagtgtcagtgttggc

SEQ ID NO: 11390 - DNA, 1559 bp, Homo sapiens
aaagaaccagttttcaggcggattgcctcagatcacactatctccacttgcccagccctgtggaagattagcggccatgtattccaatgtgataggaactgtaacctctggaaaaaggaaggtttatcttttgtccttgctgctcattggcttctgggactgcgtgacctgtcacgggagccctgtggacatctgcacagccaagccgcgggacattcccatgaatcccatgtgcatttaccgctccccggagaagaaggcaactgaggatgagggctcagaacagaagatcccggaggccaccaaccggcgtgtctgggaactgtccaaggccaattcccgctttgctaccactttctatcagcacctggcagattccaagaatgacaatgataacattttcctgtcacccctgagtatctccacggcttttgctatgaccaagctgggtgcctgtaatgacaccctccagcaactgatggaggtatttaagtttgacaccatatctgagaaaacatctgatcagatccacttcttctttgccaaactgaactgccgactctatcgaaaagccaacaaatcctccaagttagtatcagccaatcgcctttttggagacaaatcccttaccttcaatgagacctaccaggacatcagtgagttggtatatggagccaagctccagcccctggacttcaaggaaaatgcagagcaatccagagcggccatcaacaaatgggtgtccaataagaccgaaggccgaatcaccgatgtcattccctcggaagccatcaatgagctcactgttctggtgctggttaacaccatttacttcaagggcctgtggaagtcaaagttcagccctgagaacacaaggaaggaactgttctacaaggctgatggagagtcgtgttcagcatctatgatgtaccaggaaggcaagttccgttatcggcgcgtggctgaaggcacccaggtgcttgagttgcccttcaaaggtgatgacatcaccatggtcctcatcttgcccaagcctgagaagagcctggccaaggtagagaaggaactcaccccagaggtgctgcaagagtggctggatgaattggaggagatgatgctggtggtccacatgccccgcttccgcattgaggacggcttcagtttgaaggagcagctgcaagacatgggccttgtcgatctgttcagccctgaaaagtccaaactcccaggtattgttgcagaaggccgagatgacctctatgtctcagatgcattccataaggcatttcttgaggtaaatgaagaaggcagtgaagcagctgcaagtaccgctgttgtgattgctggccgttcgctaaaccccaacagggtgactttcaaggccaacaggcctttcctggtttttataagagaagttcctctgaacactattatcttcatgggcagagtagccaacccttgtgttaagtaaaatgttcttattctttgcacctcttcctatttttggtttgtgaacagaagtaaaaataaatacaaactacttccatctcacattaaaa

SEQ ID NO: 11391 - DNA, 1629 bp, Homo sapiens
attcatgaaaatccactactccagacagacggctttggaatccaccagctacatccagctccctgaggcagagttgagaatggagagaatgttacctctcctggctctggggctcttggcggctgggttctgccctgctgtcctctgccaccctaacagcccacttgacgaggagaatctgacccaggagaaccaagaccgagggacacacgtggacctcggattagcctccgccaacgtggacttcgctttcagcctgtacaagcagttagtcctgaaggcccctgataagaatgtcatcttctccccactgagcatctccaccgccttggccttcctgtctctgggggcccataataccaccctgacagagattctcaaaggcctcaagttcaacctcacggagacttctgaggcagaaattcaccagagcttccagcacctcctgcgcaccctcaatcagtccagcgatgagctgcagctgagtatgggaaatgccatgtttgtcaaagagcaactcagtctgctggacaggttcacggaggatgccaagaggctgtatggctccgaggcctttgccactgactttcaggactcagctgcagctaagaagctcatcaacgactacgtgaagaatggaactagggggaaaatcacagatctgatcaaggaccttgactcgcagacaatgatggtcctggtgaattacatcttctttaaagccaaatgggagatgccctttgacccccaagatactcatcagtcaaggttctacttgagcaagaaaaagtgggtaatggtgcccatgatgagtttgcatcacctgactataccttacttccgggacgaggagctgtcctgcaccgtggtggagctgaagtacacaggcaatgccagcgcactcttcatcctccctgatcaagacaagatggaggaagtggaagccatgctgctcccagagaccctgaagcggtggagagactctctggagttcagagagataggtgagctctacctgccaaagttttccatctcgagggactataacctgaacgacatacttctccagctgggcattgaggaagccttcaccagcaaggctgacctgtcagggatcacaggggccaggaacctagcagtctcccaggtggtccataaggctgtgcttgatgtatttgaggagggcacagaagcatctgctgccacagcagtcaaaatcaccctcctttctgcattagtggagacaaggaccattgtgcgtttcaacaggcccttcctgatgatcattgtccctacagacacccagaacatcttcttcatgagcaaagtcaccaatcccaagcaagcctagagcttgccatcaagcagtggggctctcagtaaggaacttggaatgcaagctggatgcctgggtctctgggcacagcctggcccctgtgcaccgagtggccatggcatgtgtggccctgtctgcttatccttggaaggtgacagcgattccctgtgtagctctcacatgcacaggggcccatggactcttcagtctggagggtcctgggcctcctgacagcaataaataatttcgttggaaaaaaaaaaaaaaaaaaaaaaaaaaaaaaaaaaaaaaaa

SEQ ID NO: 11392 - DNA, 1061 bp, Homo sapiens
tgtgaaggaaatcgggggaggaggatggacacaacatcccatctttgtgtttcgatacagactaagcttttaggccaaccctcctgactggatgggggcggcgggcgtggcatgcatgaaaagtaaacatcagagacctgaagaagcttataaaatagcttgggagaggccagtcaccaagacaggcatctcaaatcggctgattctgcatctggaaactgccttcatcttgaaagaaaagctccaggtcccttctccagccacccagccccaagatggtgatgctgctgctgctgctttccgcactggctggcctcttcggtgcggcagagggacaagcatttcatcttgggaagtgccccaatcctccggtgcaggagaattttgacgtgaataagtatctcggaagatggtacgaaattgagaagatcccaacaacctttgagaatggacgctgcatccaggccaactactcactaatggaaaacggaaagatcaaagtgttaaaccaggagttgagagctgatggaactgtgaatcaaatcgaaggtgaagccaccccagttaacctcacagagcctgccaagctggaagttaagttttcctggtttatgccatcggcaccgtactggatcctggccaccgactatgagaactatgccctcgtgtattcctgtacctgcatcatccaactttttcacgtggattttgcttggatcttggcaagaaaccctaatctccctccagaaacagtggactctctaaaaaatatcctgacttctaataacattgatgtcaagaaaatgacggtcacagaccaggtgaactgccccaagctctcgtaaccaggttctacagggaggctgcacccactccatgttacttctgcttcgctttcccctaccccaccccccccccataaagacaaaccaatcaaccacgacaaaggaagttgacctgaacatgtaaccatgccctaccctgttaccttgctagctgcaaaataaacttgttgctgacctgctgtgctcgcagtagattccaaaaaaaaaaaaaaaaaa

SEQ ID NO: 11393 - DNA, 1389 bp, Homo sapiens
atggctagggtactgggagcacccgttgcactggggttgtggagcctatgctggtctctggccattgccacccctcttcctccgactagtgcccatgggaatgttgctgaaggcgagaccaagccagacccagacgtgactgaacgctgctcagatggctggagctttgatgctaccaccctggatgacaatggaaccatgctgttttttaaaggggagtttgtgtggaagagtcacaaatgggaccgggagttaatctcagagagatggaagaatttccccagccctgtggatgctgcattccgtcaaggtcacaacagtgtctttctgatcaagggggacaaagtctgggtataccctcctgaaaagaaggagaaaggatacccaaagttgctccaagatgaatttcctggaatcccatccccactggatgcagctgtggaatgtcaccgtggagaatgtcaagctgaaggcgtcctcttcttccaaggtgaccgcgagtggttctgggacttggctacgggaaccatgaaggagcgttcctggccagctgttgggaactgctcctctgccctgagatggctgggccgctactactgcttccagggtaaccaattcctgcgcttcgaccctgtcaggggagaggtgcctcccaggtacccgcgggatgtccgagactacttcatgccctgccctggcagaggccatggacacaggaatgggactggccatgggaacagtacccaccatggccctgagtatatgcgctgtagcccacatctagtcttgtctgcactgacgtctgacaaccatggtgccacctatgccttcagtgggacccactactggcgtctggacaccagccgggatggctggcatagctggcccattgctcatcagtggccccagggtccttcagcagtggatgctgccttttcctgggaagaaaaactctatctggtccagggcacccaggtatatgtcttcctgacaaagggaggctataccctagtaagcggttatccgaagcggctggagaaggaagtcgggacccctcatgggattatcctggactctgtggatgcggcctttatctgccctgggtcttctcggctccatatcatggcaggacggcggctgtggtggctggacctgaagtcaggagcccaagccacgtggacagagcttccttggccccatgagaaggtagacggagccttgtgtatggaaaagtcccttggccctaactcatgttccgccaatggtcccggcttgtacctcatccatggtcccaatttgtactgctacagtgatgtggagaaactgaatgcagccaaggcccttccgcaaccccagaatgtgaccagtctcctgggctgcactcactga

SEQ ID NO: 11394 - DNA, 3260 bp, Homo sapiens
gagttcagaagcctcctggcagacactggagccacgatgaagcccccaaggcctgtccgtacctgcagcaaagttctcgtcctgctttcactgctggccatccaccagactactactgccgaaaagaatggcatcgacatctacagcctcaccgtggactccagggtctcatcccgatttgcccacacggtcgtcaccagccgagtggtcaatagggccaatactgtgcaggaggccaccttccagatggagctgcccaagaaagccttcatcaccaacttctccatgatcatcgatggcatgacctacccagggatcatcaaggagaaggctgaagcccaggcacagtacagcgcagcagtggccaagggaaagagcgctggcctcgtcaaggccaccgggagaaacatggagcagttccaggtgtcggtcagtgtggctcccaatgccaagatcacctttgagctggtctatgaggagctgctcaagcggcgtttgggggtgtacgagctgctgctgaaagtgcggccccagcagctggtcaagcacctgcagatggacattcacatcttcgagccccagggcatcagctttctggagacagagagcaccttcatgaccaaccagctggtagacgccctcaccacctggcagaataagaccaaggctcacatccggttcaagccaacactttcccagcagcaaaagtccccagagcagcaagaaacagtcctggacggcaacctcattatccgctatgatgtggaccgggccatctccgggggctccattcagatcgagaacggctactttgtacactactttgcccccgagggcctaaccacaatgcccaagaatgtggtctttgtcattgacaagagcggctccatgagtggcaggaaaatccagcagacccgggaagccctaatcaagatcctggatgacctcagccccagagaccagttcaacctcatcgtcttcagtacagaagcaactcagtggaggccatcactggtgccagcctcagccgagaacgtgaacaaggccaggagctttgctgcgggcatccaggccctgggagggaccaacatcaatgatgcaatgctgatggctgtgcagttgctggacagcagcaaccaggaggagcggctgcccgaagggagtgtctcactcatcatcctgctcaccgatggcgaccccactgtgggggagactaaccccaggagcatccagaataacgtgcgggaagctgtaagtggccggtacagcctcttctgcctgggcttcggtttcgacgtcagctatgccttcctggagaagctggcactggacaatggcggcctggcccggcgcatccatgaggactcagactctgccctgcagctccaggacttctaccaggaagtggccaacccactgctgacagcagtgaccttcgagtacccaagcaatgccgtggaggaggtcactcagaacaacttccggctcctcttcaagggctcagagatggtggtggctgggaagctccaggaccgggggcctgatgtgctcacagccacagtcagtgggaagctgcctacacagaacatcactttccaaacggagtccagtgtggcagagcaggaggcggagttccagagccccaagtatatcttccacaacttcatggagaggctctgggcatacctgactatccagcagctgctggagcaaactgtctccgcatccgatgctgatcagcaggccctccggaaccaagcgctgaatttatcacttgcctacagctttgtcacgcctctcacatctatggtagtcaccaaacccgatgaccaagagcagtctcaagttgctgagaagcccatggaaggcgaaagtagaaacaggaatgtccactcaggttccactttcttcaaatattatctccagggagcaaaaataccaaaaccagaggcttccttttctccaagaagaggatggaatagacaagctggagctgctggctcccggatgaatttcagacctggggttctcagctccaggcaacttggactcccaggacctcctgatgttcctgaccatgctgcttaccaccccttccgccgtctggccatcttgcctgcttcagcaccaccagccacctcaaatcctgatccagctgtgtctcgtgtcatgaatatgaaaatcgaagaaacaaccatgacaacccaaaccccagcccccatacaggctccctctgccatcctgccactgcctgggcagagtgtggagcggctctgtgtggaccccagacaccgccaggggccagtgaacctgctctcagaccctgagcaaggggttgaggtgactggccagtatgagagggagaaggctgggttctcatggatcgaagtgaccttcaagaaccccctggtatgggttcacgcatcccctgaacacgtggtggtgactcggaaccgaagaagctctgcgtacaagtggaaggagacgctattctcagtgatgcccggcctgaagatgaccatggacaagacgggtctcctgctgctcagtgacccagacaaagtgaccatcggcctgttgttctgggatggccgtggggaggggctccggctccttctgcgtgacactgaccgcttctccagccacgttggagggacccttggccagttttaccaggaggtgctctggggatctccagcagcatcagatgacggcagacgcacgctgagggttcagggcaatgaccactctgccaccagagagcgcaggctggattaccaggaggggcccccgggagtggagatttcctgctggtctgtggagctgtagttctgatggaaggagctgtgcccaccctgtacacttggcttccccctgcaactgcagggccgcttctggggcctggaccaccatggggaggaagagtcccactcattacaaataaagaaaggtggtgtgagcctgggaagtgggtgtctccagttccatgtggccaaatcctagggcctcaacctcgcatcctgaaccttagcatcgtggaacacagaagcttccactgtcagctctcaagagcccatggccaggaaggcccatgctgagctttcagtccagccccttcattttacaaacaaggaaactgagctcgaaccacccatttgagatgtcactgtggcccccagctagaggcccagggctgggagcattctccaggagcagaggttcagtctgcttcatggtctcttggaccagttttgactaca

SEQ ID NO: 11395 - DNA, 4004 bp, Homo sapiens
ccttttgcagcaagttctttcctgcactaatcacaattcttggaagaggagaactggacgttgtgaacagagttagctggtaaatgtcctcttaaaagatccaaaaaatgagacttctagcaaagattatttgccttatgttatgggctatttgtgtagcagaagattgcaatgaacttcctccaagaagaaatacagaaattctgacaggttcctggtctgaccaaacatatccagaaggcacccaggctatctataaatgccgccctggatatagatctcttggaaatgtaataatggtatgcaggaagggagaatgggttgctcttaatccattaaggaaatgtcagaaaaggccctgtggacatcctggagatactccttttggtacttttacccttacaggaggaaatgtgtttgaatatggtgtaaaagctgtgtatacatgtaatgaggggtatcaattgctaggtgagattaattaccgtgaatgtgacacagatggatggaccaatgatattcctatatgtgaagttgtgaagtgtttaccagtgacagcaccagagaatggaaaaattgtcagtagtgcaatggaaccagatcgggaataccattttggacaagcagtacggtttgtatgtaactcaggctacaagattgaaggagatgaagaaatgcattgttcagacgatggtttttggagtaaagagaaaccaaagtgtgtggaaatttcatgcaaatccccagatgttataaatggatctcctatatctcagaagattatttataaggagaatgaacgatttcaatataaatgtaacatgggttatgaatacagtgaaagaggagatgctgtatgcactgaatctggatggcgtccgttgccttcatgtgaagaaaaatcatgtgataatccttatattccaaatggtgactactcacctttaaggattaaacacagaactggagatgaaatcacgtaccagtgtagaaatggtttttatcctgcaacccggggaaatacagcaaaatgcacaagtactggctggatacctgctccgagatgtaccttgaaaccttgtgattatccagacattaaacatggaggtctatatcatgagaatatgcgtagaccatactttccagtagctgtaggaaaatattactcctattactgtgatgaacattttgagactccgtcaggaagttactgggatcacattcattgcacacaagatggatggtcgccagcagtaccatgcctcagaaaatgttattttccttatttggaaaatggatataatcaaaatcatggaagaaagtttgtacagggtaaatctatagacgttgcctgccatcctggctacgctcttccaaaagcgcagaccacagttacatgtatggagaatggctggtctcctactcccagatgcatccgtgtcaaaacatgttccaaatcaagtatagatattgagaatgggtttatttctgaatctcagtatacatatgccttaaaagaaaaagcgaaatatcaatgcaaactaggatatgtaacagcagatggtgaaacatcaggatcaattacatgtgggaaagatggatggtcagctcaacccacgtgcattaaatcttgtgatatcccagtatttatgaatgccagaactaaaaatgacttcacatggtttaagctgaatgacacattggactatgaatgccatgatggttatgaaagcaatactggaagcaccactggttccatagtgtgtggttacaatggttggtctgatttacccatatgttatgaaagagaatgcgaacttcctaaaatagatgtacacttagttcctgatcgcaagaaagaccagtataaagttggagaggtgttgaaattctcctgcaaaccaggatttacaatagttggacctaattccgttcagtgctaccactttggattgtctcctgacctcccaatatgtaaagagcaagtacaatcatgtggtccacctcctgaactcctcaatgggaatgttaaggaaaaaacgaaagaagaatatggacacagtgaagtggtggaatattattgcaatcctagatttctaatgaagggacctaataaaattcaatgtgttgatggagagtggacaactttaccagtgtgtattgtggaggagagtacctgtggagatatacctgaacttgaacatggctgggcccagctttcttcccctccttattactatggagattcagtggaattcaattgctcagaatcatttacaatgattggacacagatcaattacgtgtattcatggagtatggacccaacttccccagtgtgtggcaatagataaacttaagaagtgcaaatcatcaaatttaattatacttgaggaacatttaaaaaacaagaaggaattcgatcataattctaacataaggtacagatgtagaggaaaagaaggatggatacacacagtctgcataaatggaagatgggatccagaagtgaactgctcaatggcacaaatacaattatgcccacctccacctcagattcccaattctcacaatatgacaaccacactgaattatcgggatggagaaaaagtatctgttctttgccaagaaaattatctaattcaggaaggagaagaaattacatgcaaagatggaagatggcagtcaataccactctgtgttgaaaaaattccatgttcacaaccacctcagatagaacacggaaccattaattcatccaggtcttcacaagaaagttatgcacatgggactaaattgagttatacttgtgagggtggtttcaggatatctgaagaaaatgaaacaacatgctacatgggaaaatggagttctccacctcagtgtgaaggccttccttgtaaatctccacctgagatttctcatggtgttgtagctcacatgtcagacagttatcagtatggagaagaagttacgtacaaatgttttgaaggttttggaattgatgggcctgcaattgcaaaatgcttaggagaaaaatggtctcaccctccatcatgcataaaaacagattgtctcagtttacctagctttgaaaatgccatacccatgggagagaagaaggatgtgtataaggcgggtgagcaagtgacttacacttgtgcaacatattacaaaatggatggagccagtaatgtaacatgcattaatagcagatggacaggaaggccaacatgcagagacacctcctgtgtgaatccgcccacagtacaaaatgcttatatagtgtcgagacagatgagtaaatatccatctggtgagagagtacgttatcaatgtaggagcccttatgaaatgtttggggatgaagaagtgatgtgtttaaatggaaactggacggaaccacctcaatgcaaagattctacaggaaaatgtgggccccctccacctattgacaatggggacattacttcattcccgttgtcagtatatgctccagcttcatcagttgagtaccaatgccagaacttgtatcaacttgagggtaacaagcgaataacatgtagaaatggacaatggtcagaaccaccaaaatgcttacatccgtgtgtaatatcccgagaaattatggaaaattataacatagcattaaggtggacagccaaacagaagctttattcgagaacaggtgaatcagttgaatttgtgtgtaaacggggatatcgtctttcatcacgttctcacacattgcgaacaacatgttgggatgggaaactggagtatccaacttgtgcaaaaagatagaatcaatcataaagtgcacacctttattcagaactttagtattaaatcagttctcaatttcattttttatgtattgttttactcctttttattcatacgtaaaattttggattaatttgtgaaaatgtaattataagctgagaccggtggctctcttcttaaaagcaccatattaaatcctggaaaactaaaaaaaaaaaa

SEQ ID NO: 11396 - DNA, 3198 bp, Homo sapiens
gtcccaattttgaacaaagttagagagttttttcttcttttttcttctttcttaaagcgaactgtactcctctgctgttcctttgaacttggttcagtaggaagaagtgatatcctccccagaccatctgctttggggagcttggcaaaactgtccagcaaaatgaaaagactcacgtgctttttcatctgcttctttctttctgaagtatcaggcttcgaaatccccataaatggactttctgaatttgtagactatgaagatcttgtggaactggccccaggcaaatttcaattggtggcagagaaccggagatatcagagaagccttccaggagaatcggaagaaatgatggaagaggttgatcaagtaactctttatagctataaagtccagtctactattacttctcggatggccaccaccatgatccagagcaaagtggtgaacaattccccgcagcctcagaatgtcgtgtttgatgttcagatccccaaaggagcattcatttccaacttctccatgactgtggacggcaagacatttaggagctctattaaggagaaaactgtgggccgagctctttatgcacaggccagagcaaaaggcaagacggctggcttggtgaggagcagcgctcttgatatggaaaacttcagaacggaagtaaatgtcctcccaggagcaaaggtgcagttcgaacttcactaccaggaggtgaagtggaggaagctgggctcctatgagcacaggatctatctgcaacctggacggctggccaaacacttagaggtagatgtgtgggttatcgaaccacagggactgagatttcttcatgttcccgacacatttgaaggccatttcgatggtgttccggtcatttctaaaggacaacagaaggcgcacgtctccttcaagcccacggtagcacagcagagaatatgccctaactgccgggagactgcggtagatggggaactggtggtgctgtatgacgtgaaaagagaagagaaggctggtgaactggaggtgtttaatggatattttgtccacttctttgctcctgacaacctggacccaattcccaaaaacatcctctttgtcatcgatgtgagtggctccatgtggggagttaaaatgaaacaaactgtggaagcaatgaagaccatattggatgacctcagagcagaagaccatttctctgtgattgatttcaaccagaacattcgaacttggagaaatgatttaatttcagctacaaaaacacaggttgcagatgccaagaggtatattgagaaaatccagcccagtggaggcacaaacatcaacgaagcactcctacgggcaatcttcattttgaatgaagccaataacttgggactgttagaccccaactccgtctcgctgatcattttggtttctgatggagatccaacagtgggcgaactaaaactgtcaaaaattcagaaaaacgttaaggagaacatccaagacaatatctccttgttcagtttgggcatgggatttgatgtggactatgattttttgaagagactgtccaatgaaaaccatggaattgcacaaaggatttatggaaaccaggacacgtcttcccagcttaagaaattctacaaccaggtctccactccattgctccggaatgttcagttcaactatccccatacatcagtcacggacgtcactcaaaacaatttccataactactttggaggctcagagattgtggtggcaggaaaatttgaccctgctaaattggatcaaatagagagcgttatcacggcgacttcggctaacacgcagttagtcttggagaccctggcccagatggacgacttgcaggattttctatcgaaagacaagcatgcagatcccgatttcaccaggaaactgtgggcctatctaaccatcaaccaactgctagctgaacgaagcctggctcctacagctgccgccaagagaagaattacaagatcgatcctgcagatgtctctagaccaccacattgtgactccgctgacctcgctggtgatcgagaacgaggctggggatgagcgcatgctggcggatgccccaccgcaggatccctcctgctgctcaggggccctgtattacggcagcaaagtggttccagattccaccccgtcttgggccaatccttcaccaacgcccgtgatctccatgctggcacaaggatctcaggtgctagagtccacgccacccccacatgtgatgagagttgaaaatgacccacatttcatcatttatctaccaaaaagccaaaagaacatttgtttcaatattgactcagaacctggaaaaatcctcaacctggtttctgacccagaatcaggaattgtagtcaacggtcagcttgttggtgccaagaagcccaacaatggaaaactaagcacctattttggaaaactgggattttatttccaaagtgaagacataaaaatagaaatcagcactgagaccatcaccctgagccatggttctagcacattctccttgtcctggtccgacacggctcaagtcacgaatcagagggtgcagatctcagtgaagaaagaaaaagtggtaactatcaccctggataaagagatgtccttttctgttttacttcatcgtgtttggaagaagcatcccgtcaatgttgactttctgggaatctacataccccctacaaacaagttctcacctaaagcccacggactaataggccagttcatgcaggaaccaaagatacacatcttcaatgagagaccaggaaaggaccctgagaagccagaggccagcatggaagtgaaggggcagaagctgatcatcaccaggggcttacagaaagactacagaacggatctagtgtttggaacggacgttacctgctggtttgtgcacaacagtggaaaaggattcattgacgggcattacaaggattacttcgtgcctcagctctacagctttctcaaacggccttaaaggtttatagtttgggaaattatatatattaatatacatctttcccctgtcacttttgcagatattcttcggtttgaataattaaaatgaaccagatatcagggtggttaattaaaatgaaccagatatcagggtggtttataaagcctgtaaacacacctaagaaaataaacattttacaaatgaaaaaaaaaa

SEQ ID NO: 11397 - DNA, 3386 bp, Homo sapiens
ttgctgcagacgctcaccccagacactcactgcaccggagtgagcgcgaccatcatgtccatgctcgtggtctttctcttgctgtggggtgtcacctggggcccagtgacagaagcagccatattttatgagacgcagcccagcctgtgggcagagtccgaatcactgctgaaacccttggccaatgtgacgctgacgtgccaggcccacctggagactccagacttccagctgttcaagaatggggtggcccaggagcctgtgcaccttgactcacctgccatcaagcaccagttcctgctgacgggtgacacccagggccgctaccgctgccgctcgggcttgtccacaggatggacccagctgagcaagctcctggagctgacagggccaaagtccttgcctgctccctggctctcgatggcgccagtgtcctggatcacccccggcctgaaaacaacagcagtgtgccgaggtgtgctgcggggtgtgacttttctgctgaggcgggagggcgaccatgagtttctggaggtgcctgaggcccaggaggatgtggaggccacctttccagtccatcagcctggcaactacagctgcagctaccggaccgatggggaaggcgccctctctgagcccagcgctactgtgaccattgaggagctcgctgcaccaccaccgcctgtgctgatgcaccatggagagtcctcccaggtcctgcaccctggcaacaaggtgaccctcacctgcgtggctcccctgagtggagtggacttccagctacggcgcggggagaaagagctgctggtacccaggagcagcaccagcccagatcgcatcttctttcacctgaacgcggtggccctgggggatggaggtcactacacctgccgctaccggctgcatgacaaccaaaacggctggtccggggacagcgcgccggtcgagctgattctgagcgatgagacgctgcccgcgccggagttctccccggagccggagtccggcagggccttgcggctgcggtgcctggcgcccctggagggcgcgcgcttcgccctggtgcgcgaggacaggggcgggcgccgcgtgcaccgtttccagagccccgctgggaccgaggcgctcttcgagctgcacaacatttccgtggctgactccgccaactacagctgcgtctacgtggacctgaagccgcctttcgggggctccgcgcccagcgagcgcttggagctgcacgtggacggaccccctcccaggcctcagctccgggcgacgtggagtggggcggtcctggcgggccgagatgccgtcctgcgctgcgagggacccatccccgacgtcaccttcgagctgctgcgcgagggcgagacgaaggccgtgaagacggtccgcacccccggggccgcggcgaacctcgagctgatcttcgtggggccccagcacgccggcaactacaggtgccgctaccgctcctgggtgccccacaccttcgaatcggagctcagcgaccctgtggagctcctggtggcagaaagctgatgcagccgcgggcccagggtgctgttggtgtcctcagaagtgccggggattctggactggctccctcccctcctgttgcagcacaaggccggggtctctggggggctggagaagcctccctcattcctcccaggaattaataaatgtgaagagagctctgtttaaaatgtctttggactcccagggctgagtgggctgggatctcgtgtcctcaaagtggatgggttctggggtggctcctgaggtagaggagtggagaactggctcttaagagcacagttttcttttcttttttcttttttgagacagggtctcacactgtcacccaggctggagtgcagtgttgcagtccggctcactgcagttttgacctcccaggctcaagcgatcctcctgcctcagcctcccaagtagctgggagcctgggcatgcatcgccacgtctggctaattattattttttgtagacagggtctcactgtgttgcccaagcttgtcttgaactcctggccttaagtgatcctcccacctcagcctcctgagtagctgggactacaggcatgagccaccatgcctggccaactcacatttttctttctattatttattttttgtagagatgagtctcactatgttgcccaggctggtcttgaactcttgggctcaagtgatcctcccgcctcagcctcccaaagtgttgggattacaggtgtgagccacagcacctggccaaccaacacttctcagggcctctttcatctgtgctcttccaggatgctgcctcttactccctgggcacctcggcctggtcccagcaggtatgggcaggttgcttgaggctccagacatactcacctctacctcgaccacatcaaccccatcaccaagaggaggttcagggaagctgcattttgtggtcttgtcctcccagtccagggtggtagtgctgggctgttcccagcctcccacagcagagctggacgctgtggaaatggctggattcctctgtgttctttcccattatccctcagctctgagtcctcttgtgccatctgacatctgatgccttcccaaccactgccgagtttctgcctggagcagggcctcaaggccctggcacacagaagatgcgtatcagtattatcaaccaatagttgatgaattgtgtttttcaacgaatttgctagtgatctggtttactgccttagtaatatctagttcctaatatgcctatgccttttaatgtctgcacagtctgtgatgatgtcacttctctcaagcctgatgtgtcctctctctctttcttgctagtggtttatcaatttttaaaaccttttcttgtttatttgtttttgagacagaattttgctcttgttgcccaggctggagtgcaatggcgtgatcttggctcacagcaacctctacctcctgggttcaagtgattctcgtgcctcagcctcctgagtagctgggctgacaggcacccaccaccacacccagctaatttttatgtttttagtagagatggggtttcaccttgttgggtggccaggctggtctccaactcctgagctcaggtgatccacccgcctcagcctcccaaagtgctgggattacaggggtgagccaccacgcccagccccagcttagttttttaaaaagtttattttagccattctaataggtatgtagacatatctaatagtggttttccttgcgtttccttaatgtctgatgatgttaagcattttttccccaagtgcttagttgccatctatatagcatctttgatgaaatgtctgtttatatattttgcacactttaaaatattgggttgttttcttt

SEQ ID NO: 11398 - DNA, 1247 bp, Homo sapiens
gataatatctgtgcctcctgcccagaaccctccaagcagacacaatggtaagaatggtgcctgtcctgctgtctctgctgctgcttctgggtcctgctgtcccccaggagaaccaagatggtcgttactctctgacctatatctacactgggctgtccaagcatgttgaagacgtccccgcgtttcaggcccttggctcactcaatgacctccagttctttagatacaacagtaaagacaggaagtctcagcccatgggactctggagacaggtggaaggaatggaggattggaagcaggacagccaacttcagaaggccagggaggacatctttatggagaccctgaaagacatcgtggagtattacaacgacagtaacgggtctcacgtattgcagggaaggtttggttgtgagatcgagaataacagaagcagcggagcattctggaaatattactatgatggaaaggactacattgaattcaacaaagaaatcccagcctgggtccccttcgacccagcagcccagataaccaagcagaagtgggaggcagaaccagtctacgtgcagcgggccaaggcttacctggaggaggagtgccctgcgactctgcggaaatacctgaaatacagcaaaaatatcctggaccggcaagatcctccctctgtggtggtcaccagccaccaggccccaggagaaaagaagaaactgaagtgcctggcctacgacttctacccagggaaaattgatgtgcactggactcgggccggcgaggtgcaggagcctgagttacggggagatgttcttcacaatggaaatggcacttaccagtcctgggtggtggtggcagtgcccccgcaggacacagccccctactcctgccacgtgcagcacagcagcctggcccagcccctcgtggtgccctgggaggccagctaggaagcaagggttggaggcaatgtgggatctcagacccagtagctgcccttcctgcctgatgtgggagctgaaccacagaaatcacagtcaatggatccacaaggcctgaggagcagtgtggggggacagacaggaggtggatttggagaccgaagactgggatgcctgtcttgagtagacttggacccaaaaaatcatctcaccttgagcccacccccaccccattgtctaatctgtagaagctaataaataatcatccctccttgcctagcataaaaaaaaaaaaaaaaaaaaaaaaaaaaaaaa

SEQ ID NO: 11399 - DNA, 1182 bp, Homo sapiens
ccactttggtagtgccagtgtgactcatccacaatgatttctccagtgctcatcttgttctcgagttttctctgccatgttgctattgcaggacggacctgtcccaagccagatgatttaccattttccacagtggtcccgttaaaaacattctatgagccaggagaagagattacgtattcctgcaagccgggctatgtgtcccgaggagggatgagaaagtttatctgccctctcacaggactgtggcccatcaacactctgaaatgtacacccagagtatgtccttttgctggaatcttagaaaatggagccgtacgctatacgacttttgaatatcccaacacgatcagtttttcttgtaacactgggttttatctgaatggcgctgattctgccaagtgcactgaggaaggaaaatggagcccggagcttcctgtctgtgctcccatcatctgccctccaccatccatacctacgtttgcaacacttcgtgtttataagccatcagctggaaacaattccctctatcgggacacagcagtttttgaatgtttgccacaacatgcgatgtttggaaatgatacaattacctgcacgacacatggaaattggactaaattaccagaatgcagggaagtaaaatgcccattcccatcaagaccagacaatggatttgtgaactatcctgcaaaaccaacactttattacaaggataaagccacatttggctgccatgatggatattctctggatggcccggaagaaatagaatgtaccaaactgggaaactggtctgccatgccaagttgtaaagcatcttgtaaattacctgtgaaaaaagccactgtggtgtaccaaggagagagagtaaagattcaggaaaaatttaagaatggaatgctacatggtgataaagtttctttcttctgcaaaaataaggaaaagaagtgtagctatacagaggatgctcagtgtatagatggcactatcgaagtccccaaatgcttcaaggaacacagttctctggctttttggaaaactgatgcatccgatgtaaagccatgctaaggtggttttcagattccacataaaatgtcacacttgtttcttgttcatccaaggaacctaattgaaatttaaaaataaagctactgaatttattgccgcaaaaaaaaaaaa

SEQ ID NO: 11400 - DNA, 2859 bp, Homo sapiens
ctttccgcggcattctttgggcgtgagtcatgcaggtttgcagccagccccaaagggggtgtgtgcgcgagcagagcgctataaatacggcgcctcccagtgcccacaacgcggcgtcgccaggaggagcgcgcgggcacagggtgccgctgaccgaggcgtgcaaagactccagaattggaggcatgatgaagactctgctgctgtttgtggggctgctgctgacctgggagagtgggcaggtcctgggggaccagacggtctcagacaatgagctccaggaaatgtccaatcagggaagtaagtacgtcaataaggaaattcaaaatgctgtcaacggggtgaaacagataaagactctcatagaaaaaacaaacgaagagcgcaagacactgctcagcaacctagaagaagccaagaagaagaaagaggatgccctaaatgagaccagggaatcagagacaaagctgaaggagctcccaggagtgtgcaatgagaccatgatggccctctgggaagagtgtaagccctgcctgaaacagacctgcatgaagttctacgcacgcgtctgcagaagtggctcaggcctggttggccgccagcttgaggagttcctgaaccagagctcgcccttctacttctggatgaatggtgaccgcatcgactccctgctggagaacgaccggcagcagacgcacatgctggatgtcatgcaggaccacttcagccgcgcgtccagcatcatagacgagctcttccaggacaggttcttcacccgggagccccaggatacctaccactacctgcccttcagcctgccccaccggaggcctcacttcttctttcccaagtcccgcatcgtccgcagcttgatgcccttctctccgtacgagcccctgaacttccacgccatgttccagcccttccttgagatgatacacgaggctcagcaggccatggacatccacttccatagcccggccttccagcacccgccaacagaattcatacgagaaggcgacgatgaccggactgtgtgccgggagatccgccacaactccacgggctgcctgcggatgaaggaccagtgtgacaagtgccgggagatcttgtctgtggactgttccaccaacaacccctcccaggctaagctgcggcgggagctcgacgaatccctccaggtcgctgagaggttgaccaggaaatacaacgagctgctaaagtcctaccagtggaagatgctcaacacctcctccttgctggagcagctgaacgagcagtttaactgggtgtcccggctggcaaacctcacgcaaggcgaagaccagtactatctgcgggtcaccacggtggcttcccacacttctgactcggacgttccttccggtgtcactgaggtggtcgtgaagctctttgactctgatcccatcactgtgacggtccctgtagaagtctccaggaagaaccctaaatttatggagaccgtggcggagaaagcgctgcaggaataccgcaaaaagcaccgggaggagtgagatgtggatgttgcttttgcacctacgggggcatctgagtccagctccccccaagatgagctgcagccccccagagagagctctgcacgtcaccaagtaaccaggccccagcctccaggcccccaactccgcccagcctctccccgctctggatcctgcactctaacactcgactctgctgctcatgggaagaacagaattgctcctgcatgcaactaattcaataaaactgtcttgtgagctgatcgcttggagggtcctctttttatgttgagttgctgcttcccggcatgccttcattttgctatggggggcaggcaggggggatggaaaataagtagaaacaaaaaagcagtggctaagatggtatagggactgtcataccagtgaagaataaaagggtgaagaataaaagggatatgatgacaaggttgatccacttcaagaattgcttgctttcaggaagagagatgtgtttcaacaagccaactaaaatatattgctgcaaatggaagcttttctgttctattataaaactgtcgatgtattctgaccaaggtgcgacaatctcctaaaggaatacactgaaagttaaggagaagaatcagtaagtgtaaggtgtacttggtattataatgcataattgatgttttcgttatgaaaacatttggtgcccagaagtccaaattatcagttttatttgtaagagctattgcttttgcagcggttttatttgtaaaagctgttgatttcgagttgtaagagctcagcatcccaggggcatcttcttgactgtggcatttcctgtccaccgccggtttatatgatcttcatacctttccctggaccacaggcgtttctcggcttttagtctgaaccatagctgggctgcagtaccctacgctgccagcaggtggccatgactacccgtggtaccaatctcagtcttaaagctcaggcttttcgttcattaacattctctgatagaattctggtcatcagatgtactgcaatggaacaaaactcatctggctgcatcccaggtgtgtagcaaagtccacatgtaaatttatagcttagaatattcttaagtcactgtcccttgtctctctttgaagttataaacaacaaacttaaagcttagcttatgtccaaggtaagtattttagcatggctgtcaaggaaattcagagtaaagtcagtgtgattcacttaatgatatacattaattagaattatggggtcagaggtatttgcttaagtgatcataattgtaaagtatatgtcacattgtcacattaatgtcaaaaaaaaaaaaaaaaaa

SEQ ID NO: 11401 - DNA, 948 bp, Homo sapiens
cacacaccttaaccctgactttttttgctccagtttttcagaagaagtgaagtcaagatgaagaaccatttgcttttctggggagtcctggcggtttttattaaggctgttcatgtgaaagcccaagaagatgaaaggattgttcttgttgacaacaaatgtaagtgtgcccggattacttccaggatcatccgttcttccgaagatcctaatgaggacattgtggagagaaacatccgaattattgttcctctgaacaacagggagaatatctctgatcccacctcaccattgagaaccagatttgtgtaccatttgtctgacctctgtaaaaaatgtgatcctacagaagtggagctggataatcagatagttactgctacccagagcaatatctgtgatgaagacagtgctacagagacctgctacacttatgacagaaacaagtgctacacagctgtggtcccactcgtatatggtggtgagaccaaaatggtggaaacagccttaaccccagatgcctgctatcctgactaatttaagtcattgctgactgcatagctctttttcttgagaggctctccattttgattcagaaagttagcatatttattaccaatgaatttgaaaccagggctttttttttttttttgggtgatgtaaaaccaactccctgccaccaaaataattaaaatagtcacattgttatctttattaggtaatcacttcttaattatatgttcatactctaagtatcaaaatcttccaattatcatgctcacctgaaagaggtatgctctcttaggaatacagtttctagcattaaacaaataaacaaggggagaaaataaaactcaaggagtgaaaatcaggaggtgtaataaaatgttcctcgcattcaaaaaaaaaaaaaaaaaaaaaaaaaaaaaaaaaaaaaaaaaaaaaaaa

SEQ ID NO: 11402 - DNA, 1678 bp, Homo sapiens
gagcaaacagagcagcagaaaaggcagttcctcttctccagtgccctccttccctgtctctgcctctccctcccttcctcaggcatcagagcggagacttcagggagaccagagcccagcttgccaggcactgagctagaagccctgccatggcacccctgagaccccttctcatactggccctgctggcatgggttgctctggctgaccaagagtcatgcaagggccgctgcactgagggcttcaacgtggacaagaagtgccagtgtgacgagctctgctcttactaccagagctgctgcacagactatacggctgagtgcaagccccaagtgactcgcggggatgtgttcactatgccggaggatgagtacacggtctatgacgatggcgaggagaaaaacaatgccactgtccatgaacaggtggggggcccctccctgacctctgacctccaggcccagtccaaagggaatcctgagcagacacctgttctgaaacctgaggaagaggcccctgcgcctgaggtgggcgcctctaagcctgaggggatagactcaaggcctgagacccttcatccagggagacctcagcccccagcagaggaggagctgtgcagtgggaagcccttcgacgccttcaccgacctcaagaacggttccctctttgccttccgagggcagtactgctatgaactggacgaaaaggcagtgaggcctgggtaccccaagctcatccgagatgtctggggcatcgagggccccatcgatgccgccttcacccgcatcaactgtcaggggaagacctacctcttcaagggtagtcagtactggcgctttgaggatggtgtcctggaccctgattacccccgaaatatctctgacggcttcgatggcatcccggacaacgtggatgcagccttggccctccctgcccatagctacagtggccgggagcgggtctacttcttcaaggggaaacagtactgggagtaccagttccagcaccagcccagtcaggaggagtgtgaaggcagctccctgtcggctgtgtttgaacactttgccatgatgcagcgggacagctgggaggacatcttcgagcttctcttctggggcagaacctctgctggtaccagacagccccagttcattagccgggactggcacggtgtgccagggcaagtggacgcagccatggctggccgcatctacatctcaggcatggcaccccgcccctccttggccaagaaacaaaggtttaggcatcgcaaccgcaaaggctaccgttcacaacgaggccacagccgtggccgcaaccagaactcccgccggccatcccgcgccacgtggctgtccttgttctccagtgaggagagcaacttgggagccaacaactatgatgactacaggatggactggcttgtgcctgccacctgtgaacccatccagagtgtcttcttcttctctggagacaagtactaccgagtcaatcttcgcacacggcgagtggacactgtggaccctccctacccacgctccatcgctcagtactggctgggctgcccagctcctggccatctgtaggagtcagagcccacatggccgggccctctgtagctccctcctcccatctccttcccccagcccaataaaggtcccttagccccgagtttaaa

SEQ ID NO: 11403 - DNA, 1098 bp, Homo sapiens
gccactcctgctgggcagcccacagggtccctgggcggagggcaggagcatccagttggagttgacaacaggaggcagaggcatcatggagggtccccggggatggctggtgctctgtgtgctggccatatcgctggcctctatggtgaccgaggacttgtgccgagcaccagacgggaagaaaggggaggcaggaagacctggcagacgggggcggccaggcctcaagggggagcaaggggagccgggggcccctggcatccggacaggcatccaaggccttaaaggagaccagggggaacctgggccctctggaaaccccggcaaggtgggctacccagggcccagcggccccctcggagcccgtggcatcccgggaattaaaggcaccaagggcagcccaggaaacatcaaggaccagccgaggccagccttctccgccattcggcggaaccccccaatggggggcaacgtggtcatcttcgacacggtcatcaccaaccaggaagaaccgtaccagaaccactccggccgattcgtctgcactgtacccggctactactacttcaccttccaggtgctgtcccagtgggaaatctgcctgtccatcgtctcctcctcaaggggccaggtccgacgctccctgggcttctgtgacaccaccaacaaggggctcttccaggtggtgtcagggggcatggtgcttcagctgcagcagggtgaccaggtctgggttgaaaaagaccccaaaaagggtcacatttaccagggctctgaggccgacagcgtcttcagcggcttcctcatcttcccatctgcctgagccagggaaggaccccctcccccacccacctctctggcttccatgctccgcctgtaaaatgggggcgctattgcttcagctgctgaagggagggggctggctctgagagccccaggactggctgccccgtgacacatgctctaagaagctcgtttcttagacctcttcctggaataaacatctgtgtctgtgtctgctgaacatgagcttcagttgctactcggagcattgagagggaggcctaagaataataacaatccagtgcttaagagtca

SEQ ID NO: 11404 - DNA, 1780 bp, Homo sapiens
gcagagctaccatgtcctcttggagcagacagcgaccaaaaagcccagggggcattcaaccccatgtttctagaactctgttcctgctgctgctgttggcagcctcagcctggggggtcaccctgagccccaaagactgccaggtgttccgctcagaccatggcagctccatctcctgtcaaccacctgccgaaatccccggctacctgccagccgacaccgtgcacctggccgtggaattcttcaacctgacccacctgccagccaacctcctccagggcgcctctaagctccaagaattgcacctctccagcaatgggctggaaagcctctcgcccgaattcctgcggccagtgccgcagctgagggtgctggatctaacccgaaacgccctgaccgggctgcccccgggcctcttccaggcctcagccaccctggacaccctggtattgaaagaaaaccagctggaggtcctggaggtctcgtggctacacggcctgaaagctctggggcatctggacctgtctgggaaccgcctccggaaactgccccccgggctgctggccaacttcaccctcctgcgcacccttgaccttggggagaaccagttggagaccttgccacctgacctcctgaggggtccgctgcaattagaacggctacatctagaaggcaacaaattgcaagtactgggaaaagatctcctcttgccgcagccggacctgcgctacctcttcctgaacggcaacaagctggccagggtggcagccggtgccttccagggcctgcggcagctggacatgctggacctctccaataactcactggccagcgtgcccgaggggctctgggcatccctagggcagccaaactgggacatgcgggatggcttcgacatctccggcaacccctggatctgtgaccagaacctgagcgacctctatcgttggcttcaggcccaaaaagacaagatgttttcccagaatgacacgcgctgtgctgggcctgaagccgtgaagggccagacgctcctggcagtggccaagtcccagtgagaccaggggcttgggttgagggtggggggtctggtagaacactgcaacccgcttaacaaataatcctgcctttggccgggtgcgggggctcacgcctgtaatcccagcactttgggaggcccaggtgggcggatcacgaggtcaggagatcgagaccatcttggctaacatggtgaaaccctgtctctactaaaaatataaaaaattagccaggcgtggtggtgggcacctgtagtcccagcaactcgggaggctgaggcaggagaatggcgtgaacttgggaggcggagcttgcggtgagccaagatcgtgccactgcactctagcctgggcgacagagcaagactgtctcaaaaaaattaaaattaaaattaaaaacaaataatcctgccttttacaggtgaaactcggggctgtccatagcggctgggaccccgtttcatccatccatgcttcctagaacacacgatgggctttccttacccatgcccaaggtgtgccctccgtctggaatgccgttccctgtttcccagatctcttgaactctgggttctcccagccccttgtccttccttccagctgagccctggccacactggggctgcctttctctgactctgtcttccccaagtcagggggctctctgagtgcagggtctgatgctgagtcccacttagcttggggtcagaaccaaggggtttaataaataacccttgaaaactgga

SEQ ID NO: 11405 - DNA, 2116 bp, Homo sapiens
acagtgagcttccttatttgaagcaggactcaattcttggttaaaagctatggtatttgagctagttaaacacatatctctctcccattccatagggaatgagctgggctgtcctttctccccacgttcacctgcacttcgttagagagcagtgttcacatgccacaccacaagatccccacaatgacataactccattcagagactggcgtgactgggctgggtctccccaccccccttcagctcttgtatcactcagaatctggcagccagttccgtcctgacagagttcacagcatatattggtggattcttgtccatagtgcatctgctttaagaattaacgaaagcagtgtcaagacagtaaggattcaaaccatttgccaaaaatgagtctaagtgcatttactctcttcctggcattgattggtggtaccagtggccagtactatgattatgattttcccctatcaatttatgggcaatcatcaccaaactgtgcaccagaatgtaactgccctgaaagctacccaagtgccatgtactgtgatgagctgaaattgaaaagtgtaccaatggtgcctcctggaatcaagtatctttaccttaggaataaccagattgaccatattgatgaaaaggcctttgagaatgtaactgatctgcagtggctcattctagatcacaaccttctagaaaactccaagataaaagggagagttttctctaaattgaaacaactgaagaagctgcatataaaccacaacaacctgacagagtctgtgggcccacttcccaaatctctggaggatctgcagcttactcataacaagatcacaaagctgggctcttttgaaggattggtaaacctgaccttcatccatctccagcacaatcggctgaaagaggatgctgtttcagctgcttttaaaggtcttaaatcactcgaataccttgacttgagcttcaatcagatagccagactgccttctggtctccctgtctctcttctaactctctacttagacaacaataagatcagcaacatccctgatgagtatttcaagcgttttaatgcattgcagtatctgcgtttatctcacaacgaactggctgatagtggaatacctggaaattctttcaatgtgtcatccctggttgagctggatctgtcctataacaagcttaaaaacataccaactgtcaatgaaaaccttgaaaactattacctggaggtcaatcaacttgagaagtttgacataaagagcttctgcaagatcctggggccattatcctactccaagatcaagcatttgcgtttggatggcaatcgcatctcagaaaccagtcttccaccggatatgtatgaatgtctacgtgttgctaacgaagtcactcttaattaatatctgtatcctggaacaatattttatggttatgtttttctgtgtgtcagttttcatagtatccatattttattactgtttattacttccatgaattttaaaatctgagggaaatgttttgtaaacatttattttttttaaagaaaagatgaaaggcaggcctatttcatcacaagaacacacacatatacacgaatagacatcaaactcaatgctttatttgtaaatttagtgtttttttatttctactgtcaaatgatgtgcaaaaccttttactggttgcatggaaatcagccaagttttataatccttaaatcttaatgttcctcaaagcttggattaaatacatatggatgttactctcttgcaccaaattatcttgatacattcaaatttgtctggttaaaaaataggtggtagatattgaggccaagaatattgcaaaatacatgaagcttcatgcacttaaagaagtatttttagaataagaatttgcatacttacctagtgaaacttttctagaattatttttcactctaagtcatgtatgtttctctttgattatttgcatgttatgtttaataagctactagcaaaataaaacatagcaaatggcatcactgtgtttgacttcttgtgaaatttctgtactttgtatataaaatacataaaacaatagattagaaatcaaaagatatctctggcctgca

SEQ ID NO: 11406 - DNA, 1964 bp, Homo sapiens
atagcaagggatggtttaacaaaatgaaggcactcattgcagcactgcttttgatcacattgcagtattcgtgtgccgtgagtcccactgactgcagtgctgttgagccggaggctgagaaagctctagacctgatcaataaaaggcgacgggatggctaccttttccaattgctgcggattgctgatgcccacttggacagagtggaaaatacaactgtatattacttagtcttagatgtgcaagaatcggactgttcggtcctatccaggaaatactggaatgactgtgagccacctgattccagacgtccatctgaaatagtgatcggacaatgtaaggtaatagctacaagacattcccatgaatctcaggacctcagagtgattgactttaactgcaccacaagttctgtctcttcagcactggccaataccaaagatagtccggtcctcatagatttctttgaggatactgagcgctacagaaaacaagccaacaaagcccttgagaagtacaaagaggagaatgatgactttgcctctttcagagtggaccgaatcgagagagttgcaagagtgagaggaggggaaggaactggttacttcgtggacttctctgtgcggaactgccccagacaccatttccccagacaccccaatgtctttggattctgcagagcagatttgttctatgatgtagaagccttggacttggaaagcccgaaaaaccttgtcataaactgtgaagtcttcgaccctcaggaacatgagaacatcaatggtgtaccgcctcatttgggacatcccttccactggggtgggcatgagcgttcttctaccaccaagcctccattcaagccccatggatctagagatcatcatcatccccacaagccacacgaacatggacccccacctcctccagatgaaagagatcactcacatggacccccacttccacaaggccctcctccactattgcccatgtcctgctcaagttgtcaacatgccacttttggcacaaatggggcccaaagacattctcataataataattccagtgacctccatccccataagcatcattcccatgaacagcatccccacggacaccatccccatgcacaccatcctcatgaacatgatacccatagacagcatccccatggacaccacccccatggacaccatcctcatggacaccacccccatggacaccatccccatggacaccatccccactgccatgatttccaagactatggaccttgtgacccaccaccccataaccaaggtcactgttgccatggccacggcccaccacctgggcacttaagaaggcgaggcccaggtaaaggaccccgtcccttccattgcagacaaattggatctgtgtaccgactccctcctctaagaaaaggtgaggtgctgccacttcctgaggccaattttcccagcttcccattgccgcaccacaaacatcctctaaagccagacaatcagccctttcctcaatcagtctctgaatcatgtccagggaagttcaagagtgggtttccacaagtttccatgttttttacacatacatttccaaaataaaatgtgattcctttgaagaggaaaatgaataatacattgaattagaaacataaataaaatgaccagtaattgtgaaaattacagttcttttcaacctactttcatactgaagatgcagcaaaatgtgaatgggaaaagagatggcctgagaagagagatcaaatggaaaggagaggaaagaactcagtgctgcctattagtagttaattctgtcactcaccactacatcacttgagacaaatctatgccactcagaatctccttctttcctggacttaactctaattctagagtctctgttactgcttgggctatacctgggcatactaataaagtatggtattgaaactaaaaaaaaaaaaa

SEQ ID NO: 11407 - DNA, 2395 bp, Homo sapiens
agagcctcctagcccgtcggtgtctgcgcccatcgatccctttgtctatccccgaccatggcgaagctgattgcgctcaccctcttggggatgggactggcactcttcaggaaccaccagtcttcttaccaaacacgacttaatgctctccgagaggtacaacccgtagaacttcctaactgtaatttagttaaaggaatcgaaactggctctgaagacttggagatactgcctaatggactggctttcattagctctggattaaagtatcctggaataaagagcttcaaccccaacagtcctggaaaaatacttctgatggacctgaatgaagaagatccaacagtgttggaattggggatcactggaagtaaatttgatgtatcttcatttaaccctcatgggattagcacattcacagatgaagataatgccatgtacctcctggtggtgaaccatccagatgccaagtccacagtggagttgtttaaatttcaagaagaagaaaaatcgcttttgcatctaaaaaccatcagacataaacttctgcctaatttgaatgatattgttgctgtgggacctgagcacttttatggcacaaatgatcactattttcttgacccctacttacaatcctgggagatgtatttgggtttagcgtggtcgtatgttgtctactatagtccaagtgaagttcgagtggtggcagaaggatttgattttgctaatggaatcaacatttcacccgatggcaagtatgtctatatagctgagttgctggctcataagattcatgtgtatgaaaagcatgctaattggactttaactccattgaagtcccttgactttaataccctcgtggataacatatctgtggatcctgagacaggagacctttgggttggatgccatcccaatggcatgaaaatcttcttctatgactcagagaatcctcctgcatcagaggtgcttcgaatccagaacattctaacagaagaacctaaagtgacacaggtttatgcagaaaatggcacagtgttgcaaggcagtacagttgcctctgtgtacaaagggaaactgctgattggcacagtgtttcacaaagctctttactgtgagctctaacagaccgatttgcacccatgccatagaaactgaggccattatttcaaccgcttgccatattccgaggacccagtgttcttagctgaacaatgaatgctgaccctaaatgtggacatcatgaagcatcaaagcactgtttaactgggagtgatatgatgtgtagggcttttttttgagaatacactatcaaatcagtcttggaatacttgaaaacctcatttaccataaaaatccttctcactaaaatggataaatcagttatgtcaattgtcagatattaaataacagtgtgtgaccccaaaagtacttaccctaaaacatgtgttgcctgaaagcacatgtgtgtatcgctgccttgccatgtcttgttcagaagacacaggggagcagggttagctcacgtgtctttagaactccagtactcacccagggactccagttcacaggccagaaaacatatgcattatgaagttcccctctactccatgcacatagtaagtctgactatggcagtcagacttacttactcccattttcccttcgatatatgactttttctcagtaaatattaacctgaactattccaactccccttgtactcttgctttttcaattctcctgttgcaatgacacataggaaaatcttaaaattcttgggagtgttgtcacacctgaaaattatgagtctctatgatcttggcacaaattgtacatttgagtgtctttgacttggttaaaggaagtttgttcacttcgatgactggatacagaatgaatcccataattgacatgggcgacagtaaaagtgtccccaaagactacactgttgttgaggtggtggtagtgctggtgggtttttgtttaatatttaaacttcttgttgtggaggctgaaaagaaaaaaaataatagaaaggtaaacaaacaaataaatagaaaagatcaacaacccctttggctatctactgagacatgactaggaagaaaacatgactttatcattttgttatagaagctgatatataaggttacacattttcatttatttgtttttctgatttgaaggtataaccttcatgatgaattacttcttcagggtgttaaggcagtgactttagaaacaaatttttttcttgcttttgttttgtttttgagaccgaatctcactctgttgcccaggctggagtgcagtggtgcgatcttggctcactgcaacttctacctccgaggttcaagagattcttgtgcctcagcctcccggatagctgccg

SEQ ID NO: 11408 - DNA, 2920 bp, Homo sapiens
acagggcagcaggagccttagagcatggacggtgccatggggcctcgggggctgctgttgtgcatgtacctggtatctctcctcatcctgcaggccatgcctgccctgggctcggctacaggcaggtccaagagcagcgagaagcgacaggctgtggacaccgctgtcgatggcgtgttcatccggagtttgaaagtcaactgcaaagtcacctctcgcttcgcccactatgttgtcaccagccaagtggtcaacactgccaatgaagccagggaagtggccttcgacctggaaatccccaagacagcattcatcagtgactttgccgttacagcagatggaaacgcatttatcggagacataaaggacaaggtgactgcatggaagcagtaccggaaagcagctatctcaggagagaatgccggccttgtcagggcctcggggagaactatggagcaattcaccatccacctcaccgtcaatccccagagcaaggtcacgtttcagctgacttatgaggaagtgctgaagagaaaccatatgcagtatgaaattgtcatcaaagtcaagcccaagcagctggtgcatcattttgagattgatgtggacatcttcgagccccaggggatcagcaagctggatgcccaggcctctttcctgccgaaggaactggcagcccaaactatcaagaagtccttctcaggaaaaaagggtcatgtgctgttccgtcccaccgtgagccagcagcagtcctgccccacatgctctacatccttactgaacgggcacttcaaggtgacctacgatgtcactcgagacgagatctgcgacctcctggtggccaataaccactttgcccacttctttgccccccaaaacctgacaaacatgaacaagaacgtggtttttgtgattgacatcagtggctccatgagaggccagaaagtgaagcagaccaaggaggcactccttaaaattctgggggacatgcagccaggggactactttgacctggttctttttgggactcgagtacaatcgtggaagggctcgctggtgcaagcatctgaggccaacctacaagcagctcaagactttgtgcggggcttttccctggatgaggccacaaacctgaatggaggtttgctccggggaattgagatcttgaaccaagttcaggaaagcctcccagaactcagcaaccatgcctcaatactcatcatgttgacagatggcgatcccacagagggggtgacggaccgttcccaaatcctcaagaacgtccgcaacgccatccggggcaggttcccgctctacaacctgggtttcggccacaatgtggactttaactttctggaggtcatgtccatggagaacaacggacgggcccagagaatctacgaggaccatgatgccacccagcagctgcagggtttctacagccaggtagccaaacccctgctggtggatgtggatttgcagtacccccaggatgctgtcttggccctgacccagaaccaccataaacagtactacgaaggctcagagattgtggtggccgggcgcattgctgacaacaaacagagcagcttcaaggctgatgtgcaggcccatggggagggacaagaattcagtataacctgcctagtggatgaggaggagatgaagaaactgctccgagagcgtggccacatgctggagaaccacgtcgagcgcctctgggcctacctcaccatccaggagctgctggccaagcggatgaaggtggacagggaggtgagggccaacctgtcatcccaggccctgcggatgtcgctggactatgggtttgtgaccccactgacctccatgagcatcaggggcatggcggaccaggacggcctgaagcccaccatcgacaagccctcagaggattctccgcctttggagatgctgggacccagaaggacgttcgtgctgtcagccttgcagccttctcctactcattccagctccaatacccagcggctgccagaccgagtgaccggcgtggacacagaccctcacttcatcatccacgtgccccagaaagaggacaccctgtgcttcaacatcaatgaggagcctggtgttatcctgagcctggtacaggaccccaacacaggcttctcagtgaatggacagctcattggcaacaaggccaggagccctgggcagcatgacggcacgtacttcgggcggctgggaatcgcaaaccctgccacggactttcagttggaagtgactcctcagaacattacgctgaaccccggctttggtgggcctgtgttttcctggagggaccaagctgtgctgcggcaggacggggtggtggtgaccatcaacaagaagaggaacctggtggtgtctgtggacgacggtggcacctttgaggttgttttgcaccgagtgtggaaggggagctcggtccaccaggacttcctgggcttctatgtgctggacagtcatcggatgtcagcccggacgcacgggctgctggggcaatttttccaccccatcggttttgaagtgtctgacatccacccaggctccgaccccacaaagccagatgccacgatggtggtgaggaaccgccggctcacggtcaccaggggtttgcaaaaagactacagcaaggacccgtggcatggggccgaggtgtcctgctggttcattcacaacaatggggctggactcatcgatggtgcctacactgattatatcgtccccgacatcttctgagccctctggccagcacgcctgtcctcccccggggccaaggcagaggaggaggacgacatcctgacctgctgctgaggctgtacctccttgactaagctggttccttgtgtcaaagcacctcatgccttccattaaagagaggccgtgtccaaaaaaaaaa

SEQ ID NO: 11409 - DNA, 1678 bp, Homo sapiens
cagagctgagacagccacccagggggtccactccaggacagactgtgccgcctgagagtgcagaggatgcatcttatcgactacctgctcctcctgctggttggactactggccctttctcatggccagctgcacgttgagcatgatggtgagagttgcagtaacagctcccaccagcagattctggagacaggtgagggctcccccagcctcaagatagcccctgccaatgctgactttgccttccgcttctactacctgatcgcttcggagaccccggggaagaacatctttttctccccgctgagcatctcggcggcctacgccatgctttccctgggggcctgctcacacagccgcagccagatccttgagggcctgggcttcaacctcaccgagctgtctgagtccgatgtccataggggcttccagcacctcctgcacactctcaacctccccggccatgggctggaaacacgcgtgggcagtgctctgttcctgagccacaacctgaagttccttgcaaaattcctgaatgacaccatggccgtctatgaggctaaactcttccacaccaacttctacgacactgtgggcacaatccagcttatcaacgaccacgtcaagaaggaaactcgagggaagattgtggatttggtcagtgagctcaagaaggacgtcttgatggtgctggtgaattacatttacttcaaagccctgtgggagaaaccattcatttcctcaaggaccactcccaaagacttttatgttgatgagaacacaacagtccgggtgcccatgatgctgcaggaccaggagcatcactggtatcttcatgacagatacttgccctgctcggtgctacggatggattacaaaggagacgcaaccgtgtttttcattctccctaaccaaggcaaaatgagggagattgaagaggttctgactccagagatgctaatgaggtggaacaacttgttgcggaagaggaatttttacaagaagctagagttgcatcttcccaagttctccatttctggctcctatgtattagatcagattttgcccaggctgggcttcacggatctgttctccaagtgggctgacttatccggcatcaccaaacagcaaaaactggaggcatccaaaagtttccacaaggccaccttggacgtggatgaggctggcaccgaggctgcagcagccaccagcttcgcgatcaaattcttctctgcccagaccaatcgccacatcctgcgattcaaccggcccttccttgtggtgatcttttccaccagcacccagagtgtcctctttctgggcaaggtcgtcgaccccacgaaaccatagccctcccagggctgctcatctgttccaagcaggaggatgtggcaggggagggctgggagtgagtagctctgtgtttagagttggggacaaggatgacaccgaaggtccaggagtccaggacagcaggtgctggccggtggggagcggggaggggcactgagatgggcagggcctggacattccacaccctggtgctgtgcagcctctggcagagcatccgacctcttggagcaagtttctgcctctggaaagggggcgggcccttttcacaacaggctggttgtaccgagtaaacaacacgatgccatgaaaaaaaaaaaaaaaaaaa

SEQ ID NO: 11410 - DNA, 8449 bp, Homo sapiens
gcccgcgccggctgtgctgcacagggggaggagagggaaccccaggcgcgagcgggaagaggggacctgcagccacaacttctctggtcctctgcatcccttctgtccctccacccgtccccttccccaccctctggcccccaccttcttggaggcgacaacccccgggaggcattagaagggatttttcccgcaggttgcgaagggaagcaaacttggtggcaacttgcctcccggtgcgggcgtctctcccccaccgtctcaacatgcttaggggtccggggcccgggctgctgctgctggccgtccagtgcctggggacagcggtgccctccacgggagcctcgaagagcaagaggcaggctcagcaaatggttcagccccagtccccggtggctgtcagtcaaagcaagcccggttgttatgacaatggaaaacactatcagataaatcaacagtgggagcggacctacctaggcaatgcgttggtttgtacttgttatggaggaagccgaggttttaactgcgagagtaaacctgaagctgaagagacttgctttgacaagtacactgggaacacttaccgagtgggtgacacttatgagcgtcctaaagactccatgatctgggactgtacctgcatcggggctgggcgagggagaataagctgtaccatcgcaaaccgctgccatgaagggggtcagtcctacaagattggtgacacctggaggagaccacatgagactggtggttacatgttagagtgtgtgtgtcttggtaatggaaaaggagaatggacctgcaagcccatagctgagaagtgttttgatcatgctgctgggacttcctatgtggtcggagaaacgtgggagaagccctaccaaggctggatgatggtagattgtacttgcctgggagaaggcagcggacgcatcacttgcacttctagaaatagatgcaacgatcaggacacaaggacatcctatagaattggagacacctggagcaagaaggataatcgaggaaacctgctccagtgcatctgcacaggcaacggccgaggagagtggaagtgtgagaggcacacctctgtgcagaccacatcgagcggatctggccccttcaccgatgttcgtgcagctgtttaccaaccgcagcctcacccccagcctcctccctatggccactgtgtcacagacagtggtgtggtctactctgtggggatgcagtggctgaagacacaaggaaataagcaaatgctttgcacgtgcctgggcaacggagtcagctgccaagagacagctgtaacccagacttacggtggcaactcaaatggagagccatgtgtcttaccattcacctacaatggcaggacgttctactcctgcaccacagaagggcgacaggacggacatctttggtgcagcacaacttcgaattatgagcaggaccagaaatactctttctgcacagaccacactgttttggttcagactcgaggaggaaattccaatggtgccttgtgccacttccccttcctatacaacaaccacaattacactgattgcacttctgagggcagaagagacaacatgaagtggtgtgggaccacacagaactatgatgccgaccagaagtttgggttctgccccatggctgcccacgaggaaatctgcacaaccaatgaaggggtcatgtaccgcattggagatcagtgggataagcagcatgacatgggtcacatgatgaggtgcacgtgtgttgggaatggtcgtggggaatggacatgcattgcctactcgcagcttcgagatcagtgcattgttgatgacatcacttacaatgtgaacgacacattccacaagcgtcatgaagaggggcacatgctgaactgtacatgcttcggtcagggtcggggcaggtggaagtgtgatcccgtcgaccaatgccaggattcagagactgggacgttttatcaaattggagattcatgggagaagtatgtgcatggtgtcagataccagtgctactgctatggccgtggcattggggagtggcattgccaacctttacagacctatccaagctcaagtggtcctgtcgaagtatttatcactgagactccgagtcagcccaactcccaccccatccagtggaatgcaccacagccatctcacatttccaagtacattctcaggtggagacctaaaaattctgtaggccgttggaaggaagctaccataccaggccacttaaactcctacaccatcaaaggcctgaagcctggtgtggtatacgagggccagctcatcagcatccagcagtacggccaccaagaagtgactcgctttgacttcaccaccaccagcaccagcacacctgtgaccagcaacaccgtgacaggagagacgactcccttttctcctcttgtggccacttctgaatctgtgaccgaaatcacagccagtagctttgtggtctcctgggtctcagcttccgacaccgtgtcgggattccgggtggaatatgagctgagtgaggagggagatgagccacagtacctggatcttccaagcacagccacttctgtgaacatccctgacctgcttcctggccgaaaatacattgtaaatgtctatcagatatctgaggatggggagcagagtttgatcctgtctacttcacaaacaacagcgcctgatgcccctcctgacccgactgtggaccaagttgatgacacctcaattgttgttcgctggagcagaccccaggctcccatcacagggtacagaatagtctattcgccatcagtagaaggtagcagcacagaactcaaccttcctgaaactgcaaactccgtcaccctcagtgacttgcaacctggtgttcagtataacatcactatctatgctgtggaagaaaatcaagaaagtacacctgttgtcattcaacaagaaaccactggcaccccacgctcagatacagtgccctctcccagggacctgcagtttgtggaagtgacagacgtgaaggtcaccatcatgtggacaccgcctgagagtgcagtgaccggctaccgtgtggatgtgatccccgtcaacctgcctggcgagcacgggcagaggctgcccatcagcaggaacacctttgcagaagtcaccgggctgtcccctggggtcacctattacttcaaagtctttgcagtgagccatgggagggagagcaagcctctgactgctcaacagacaaccaaactggatgctcccactaacctccagtttgtcaatgaaactgattctactgtcctggtgagatggactccacctcgggcccagataacaggataccgactgaccgtgggccttacccgaagaggacagcccaggcagtacaatgtgggtccctctgtctccaagtacccactgaggaatctgcagcctgcatctgagtacaccgtatccctcgtggccataaagggcaaccaagagagccccaaagccactggagtctttaccacactgcagcctgggagctctattccaccttacaacaccgaggtgactgagaccaccattgtgatcacatggacgcctgctccaagaattggttttaagctgggtgtacgaccaagccagggaggagaggcaccacgagaagtgacttcagactcaggaagcatcgttgtgtccggcttgactccaggagtagaatacgtctacaccatccaagtcctgagagatggacaggaaagagatgcgccaattgtaaacaaagtggtgacaccattgtctccaccaacaaacttgcatctggaggcaaaccctgacactggagtgctcacagtctcctgggagaggagcaccaccccagacattactggttatagaattaccacaacccctacaaacggccagcagggaaattctttggaagaagtggtccatgctgatcagagctcctgcacttttgataacctgagtcccggcctggagtacaatgtcagtgtttacactgtcaaggatgacaaggaaagtgtccctatctctgataccatcatcccagctgttcctcctcccactgacctgcgattcaccaacattggtccagacaccatgcgtgtcacctgggctccacccccatccattgatttaaccaacttcctggtgcgttactcacctgtgaaaaatgaggaagatgttgcagagttgtcaatttctccttcagacaatgcagtggtcttaacaaatctcctgcctggtacagaatatgtagtgagtgtctccagtgtctacgaacaacatgagagcacacctcttagaggaagacagaaaacaggtcttgattccccaactggcattgacttttctgatattactgccaactcttttactgtgcactggattgctcctcgagccaccatcactggctacaggatccgccatcatcccgagcacttcagtgggagacctcgagaagatcgggtgccccactctcggaattccatcaccctcaccaacctcactccaggcacagagtatgtggtcagcatcgttgctcttaatggcagagaggaaagtcccttattgattggccaacaatcaacagtttctgatgttccgagggacctggaagttgttgctgcgacccccaccagcctactgatcagctgggatgctcctgctgtcacagtgagatattacaggatcacttacggagagacaggaggaaatagccctgtccaggagttcactgtgcctgggagcaagtctacagctaccatcagcggccttaaacctggagttgattataccatcactgtgtatgctgtcactggccgtggagacagccccgcaagcagcaagccaatttccattaattaccgaacagaaattgacaaaccatcccagatgcaagtgaccgatgttcaggacaacagcattagtgtcaagtggctgccttcaagttcccctgttactggttacagagtaaccaccactcccaaaaatggaccaggaccaacaaaaactaaaactgcaggtccagatcaaacagaaatgactattgaaggcttgcagcccacagtggagtatgtggttagtgtctatgctcagaatccaagcggagagagtcagcctctggttcagactgcagtaaccaacattgatcgccctaaaggactggcattcactgatgtggatgtcgattccatcaaaattgcttgggaaagcccacaggggcaagtttccaggtacagggtgacctactcgagccctgaggatggaatccatgagctattccctgcacctgatggtgaagaagacactgcagagctgcaaggcctcagaccgggttctgagtacacagtcagtgtggttgccttgcacgatgatatggagagccagcccctgattggaacccagtccacagctattcctgcaccaactgacctgaagttcactcaggtcacacccacaagcctgagcgcccagtggacaccacccaatgttcagctcactggatatcgagtgcgggtgacccccaaggagaagaccggaccaatgaaagaaatcaaccttgctcctgacagctcatccgtggttgtatcaggacttatggtggccaccaaatatgaagtgagtgtctatgctcttaaggacactttgacaagcagaccagctcagggagttgtcaccactctggagaatgtcagcccaccaagaagggctcgtgtgacagatgctactgagaccaccatcaccattagctggagaaccaagactgagacgatcactggcttccaagttgatgccgttccagccaatggccagactccaatccagagaaccatcaagccagatgtcagaagctacaccatcacaggtttacaaccaggcactgactacaagatctacctgtacaccttgaatgacaatgctcggagctcccctgtggtcatcgacgcctccactgccattgatgcaccatccaacctgcgtttcctggccaccacacccaattccttgctggtatcatggcagccgccacgtgccaggattaccggctacatcatcaagtatgagaagcctgggtctcctcccagagaagtggtccctcggccccgccctggtgtcacagaggctactattactggcctggaaccgggaaccgaatatacaatttatgtcattgccctgaagaataatcagaagagcgagcccctgattggaaggaaaaagacagacgagcttccccaactggtaacccttccacaccccaatcttcatggaccagagatcttggatgttccttccacagttcaaaagacccctttcgtcacccaccctgggtatgacactggaaatggtattcagcttcctggcacttctggtcagcaacccagtgttgggcaacaaatgatctttgaggaacatggttttaggcggaccacaccgcccacaacggccacccccataaggcataggccaagaccatacccgccgaatgtaggacaagaagctctctctcagacaaccatctcatgggccccattccaggacacttctgagtacatcatttcatgtcatcctgttggcactgatgaagaacccttacagttcagggttcctggaacttctaccagtgccactctgacaggcctcaccagaggtgccacctacaacatcatagtggaggcactgaaagaccagcagaggcataaggttcgggaagaggttgttaccgtgggcaactctgtcaacgaaggcttgaaccaacctacggatgactcgtgctttgacccctacacagtttcccattatgccgttggagatgagtgggaacgaatgtctgaatcaggctttaaactgttgtgccagtgcttaggctttggaagtggtcatttcagatgtgattcatctagatggtgccatgacaatggtgtgaactacaagattggagagaagtgggaccgtcagggagaaaatggccagatgatgagctgcacatgtcttgggaacggaaaaggagaattcaagtgtgaccctcatgaggcaacgtgttatgatgatgggaagacataccacgtaggagaacagtggcagaaggaatatctcggtgccatttgctcctgcacatgctttggaggccagcggggctggcgctgtgacaactgccgcagacctgggggtgaacccagtcccgaaggcactactggccagtcctacaaccagtattctcagagataccatcagagaacaaacactaatgttaattgcccaattgagtgcttcatgcctttagatgtacaggctgacagagaagattcccgagagtaaatcatctttccaatccagaggaacaagcatgtctctctgccaagatccatctaaactggagtgatgttagcagacccagcttagagttcttctttctttcttaagccctttgctctggaggaagttctccagcttcagctcaactcacagcttctccaagcatcaccctgggagtttcctgagggttttctcataaatgagggctgcacattgcctgttctgcttcgaagtattcaataccgctcagtattttaaatgaagtgattctaagatttggtttgggatcaataggaaagcatatgcagccaaccaagatgcaaatgttttgaaatgatatgaccaaaattttaagtaggaaagtcacccaaacacttctgctttcacttaagtgtctggcccgcaatactgtaggaacaagcatgatcttgttactgtgatattttaaatatccacagtactcactttttccaaatgatcctagtaattgcctagaaatatctttctcttacctgttatttatcaatttttcccagtatttttatacggaaaaaattgtattgaaaacacttagtatgcagttgataagaggaatttggtataattatggtgggtgattattttttatactgtatgtgccaaagctttactactgtggaaagacaactgttttaataaaagatttacattccacaacttgaagttcatctatttgatataagacaccttcgggggaaataattcctgtgaatattctttttcaattcagcaaacatttgaaaatctatgatgtgcaagtctaattgttgatttcagtacaagattttctaaatcagttgctacaaaaactgattggtttttgtcacttcatctcttcactaatggagatagctttacactttctgctttaatagatttaagtggaccccaatatttattaaaattgctagtttaccgttcagaagtataatagaaataatctttagttgctcttttctaaccattgtaattcttcccttcttccctccacctttccttcattgaataaacctctgttcaaagagattgcctgcaagggaaataaaaatgactaagatattaaaaaaaaaaaaaaaaaa

SEQ ID NO: 11411 - DNA, 1510 bp, Homo sapiens
atccaccgcaggcttactgtacacatgctagggtccaggacagcaggaccaagccagcagaaacagcctgagcccaccgcagactggcctggctatactggacaatgccactcctcctgtacacctgtcttctctggctgcccaccagcggcctctggaccgtccaggccatggatcctaacgctgcttatgtgaacatgagtaaccatcaccggggcctggcttcagccaacgttgactttgccttcagcctgtataagcacctagtggccttgagtcccaaaaagaacattttcatctcccctgtgagcatctccatggccttagctatgctgtccctgggcacctgtggccacacacgggcccagcttctccagggcctgggtttcaacctcactgagaggtctgagactgagatccaccagggtttccagcacctgcaccaactctttgcaaagtcagacaccagcttagaaatgaccatgggcaatgccttgtttcttgatggcagcctggagttgctggagtcattctcagcagacatcaagcactactatgagtcagaggtcttggctatgaatttccaggactgggcaacagccagcagacagatcaacagctatgtcaagaataagacacaggggaaaattgtcgacttgttttcagggctggatagcccagccatcctcgtcctggtcaactatatcttcttcaaaggcacatggacacagccctttgacctggcaagcaccagggaggagaacttctatgtggacgagacaactgtggtgaaggtgcccatgatgttgcagtcgagcaccatcagttaccttcatgacgcggagctcccctgccagctggtgcagatgaactacgtgggcaatgggactgtcttcttcatccttccggacaaggggaagatgaacacagtcatcgctgcactgagccgggacacgattaacaggtggtccgcaggcctgaccagcagccaggtggacctgtacattccaaaggtcaccatctctggagtctatgacctcggagatgtgctggaggaaatgggcattgcagacttgttcaccaaccaggcaaatttctcacgcatcacccaggacgcccagctgaagtcatcaaaggtggtccataaagctgtgctgcaactcaatgaggagggtgtggacacagctggctccactggggtcaccctaaacctgacgtccaagcctatcatcttgcgtttcaaccagcccttcatcatcatgatcttcgaccacttcacctggagcagccttttcctggcgagggttatgaacccagtgtaagagaccacccacccagagcctcagcactgtctgactttgggaaccagggatcccacagaaatgttttggagagcgggaggtttcccccaatctcctccaagttcttctccctccaaccagagttgtgtctaactttaggcatcttttaataaatgtcattgcgactctgaaaaaaaaaaaaaaaaaaa

SEQ ID NO: 11412 - DNA, 1542 bp, Homo sapiens
ggtcgctttaagaaaggagtagctgtaatctgaagcctgctggacgctggattagaaggcagcaaaaaaagctctgtgctggctggagccccctcagtgtgcaggcttagagggactaggctgggtgtggagctgcagcgtatccacaggccccaggatgcaggccctggtgctactcctctgcattggagccctcctcgggcacagcagctgccagaaccctgccagccccccggaggagggctccccagaccccgacagcacaggggcgctggtggaggaggaggatcctttcttcaaagtccccgtgaacaagctggcagcggctgtctccaacttcggctatgacctgtaccgggtgcgatccagcacgagccccacgaccaacgtgctcctgtctcctctcagtgtggccacggccctctcggccctctcgctgggagcggagcagcgaacagaatccatcattcaccgggctctctactatgacttgatcagcagcccagacatccatggtacctataaggagctccttgacacggtcactgccccccagaagaacctcaagagtgcctcccggatcgtctttgagaagaagctgcgcataaaatccagctttgtggcacctctggaaaagtcatatgggaccaggcccagagtcctgacgggcaaccctcgcttggacctgcaagagatcaacaactgggtgcaggcgcagatgaaagggaagctcgccaggtccacaaaggaaattcccgatgagatcagcattctccttctcggtgtggcgcacttcaaggggcagtgggtaacaaagtttgactccagaaagacttccctcgaggatttctacttggatgaagagaggaccgtgagggtccccatgatgtcggaccctaaggctgttttacgctatggcttggattcagatctcagctgcaagattgcccagctgcccttgaccggaagcatgagtatcatcttcttcctgcccctgaaagtgacccagaatttgaccttgatagaggagagcctcacctccgagttcattcatgacatagaccgagaactgaagaccgtgcaggcggtcctcactgtccccaagctgaagctgagttatgaaggcgaagtcaccaagtccctgcaggagatgaagctgcaatccttgtttgattcaccagactttagcaagatcacaggcaaacccatcaagctgactcaggtggaacaccgggctggctttgagtggaacgaggatggggcgggaaccacccccagcccagggctgcagcctgcccacctcaccttcccgctggactatcaccttaaccagcctttcatcttcgtactgagggacacagacacaggggcccttctcttcattggcaagattctggaccccaggggcccctaatatcccagtttaatattccaataccctagaagaaaacccgagggacagcagattccacaggacacgaaggctgcccctgtaaggtttcaatgcatacaataaaagagctttatccctaacttctgtta

SEQ ID NO: 11413 - DNA, 2082 bp, Homo sapiens
agattgctgcctatgcaaagcaggtaagaagccgaactctgaggcctctcgccattgtctccgagtcggccagctggagcgttttcggggctgtaaagggagaatggcgcatgcgcatattcagggcggaaggcgcgctaagagcagatttgtggtctgcattatgtctggagccagaagtaagcttgctcttttcctctgcggctgttacgtggttgccctgggagcccacaccggggaggagagcgtggctgaccatcacgaggctgaatattatgtggctgccgtgtatgagcatccatccatcctgagtctgaaccctctggctctcatcagccgccaagaggccttggagctcatgaaccagaaccttgacatctatgaacagcaagtgatgactgcagcccaaaaggatgtacagattatagtgtttccagaagatggcattcatggattcaactttacaagaacatccatttatccatttttggacttcatgccgtctccccaggtggtcaggtggaacccatgcctggagcctcaccgcttcaatgacacagaggtgctccagcgcctgagttgtatggccatcaggggagatatgttcttggtggccaatcttgggacaaaggagccttgtcatagcagtgacccaaggtgcccaaaagatgggagataccagttcaacacaaatgtcgtgttcagcaataatggaacccttgttgaccgctaccgtaaacacaacctctactttgaggcagcattcgatgttcctcttaaagtggatctcatcacctttgataccccctttgctggcaggtttggcatcttcacatgctttgatatattgttctttgaccctgccatcagagtcctcagagactacaaggtgaagcatgttgtgtacccaactgcctggatgaaccagctcccactcttggcagcaattgagattcagaaagcttttgctgttgcctttggcatcaacgttctggcagctaatgtccaccacccagttctggggatgacaggaagtggcatacacacccctctggagtccttttggtaccatgacatggaaaatcccaaaagtcaccttataattgcccaggtggccaaaaatccagtgggtctcattggtgcagagaatgcaacaggtgaaacggacccatcccatagtaagtttttaaaaattttgtcaggcgatccgtactgtgagaaggatgctcaggaagtccactgtgatgaggccaccaagtggaacgtgaatgctcctcccacatttcactctgagatgatgtatgacaatttcaccctggtccctgtctggggaaaggaaggctatctccacgtctgttccaatggcctctgctgttatttactttacgagaggcccaccttatccaaagagctgtatgccctgggggtctttgatgggcttcacacagtacatggcacttactacatccaagtgtgtgccctggtcaggtgtgggggtcttggcttcgacacctgtggacaggaaatcacagaggccacggggatatttgagtttcacctgtggggcaacttcagtacttcctatatctttcctttgtttctgacctcagggatgaccctagaagtccctgaccagcttggctgggagaatgaccactatttcctgaggaaaagtaggctgtcctctgggctggtgacggcggctctctatgggcgcttgtatgagagggactaggaaaagtgtgtggtctgtggggcggactctggccatcatgttgacagccttgcacttccacaggctacaagccctgggaccatctttctgccttaagggcaggagcccacttctgtggcaccagattccaccctgggaactgtggaaaaagtaggagaggcagattccctcagtgtcttcctcttaaacctcaatcatcgagacattagggggtattttctgttcacatttatctttttcaagccacatcttcctctaacaaatctctcagtatgcgattggtctcaagctaaaacaaaaataaatgtcagtttatattttacacatccaaaaaaaaaaaaaaaaaa

SEQ ID NO: 11414 - DNA, 2192 bp, Homo sapiens
gtgcacaggcagcctgggaacagctccatccccacccctcagctataaatagggcatcgtgacccggccgggggaagaagctgccgttgttctgggtactacagcagaagggtatgcggaagcgagcaccccagtctgagatggctcctgccggtgtgagcctgagggccaccatcctctgcctcctggcctgggctggcctggctgcaggtgaccgggtgtacatacaccccttccacctcgtcatccacaatgagagtacctgtgagcagctggcaaaggccaatgccgggaagcccaaagaccccaccttcatacctgctccaattcaggccaagacatcccctgtggatgaaaaggccctacaggaccagctggtgctagtcgctgcaaaacttgacaccgaagacaagttgagggccgcaatggtcgggatgctggccaacttcttgggcttccgtatatatggcatgcacagtgagctatggggcgtggtccatggggccaccgtcctctccccaacggctgtctttggcaccctggcctctctctatctgggagccttggaccacacagctgacaggctacaggcaatcctgggtgttccttggaaggacaagaactgcacctcccggctggatgcgcacaaggtcctgtctgccctgcaggctgtacagggcctgctagtggcccagggcagggctgatagccaggcccagctgctgctgtccacggtggtgggcgtgttcacagccccaggcctgcacctgaagcagccgtttgtgcagggcctggctctctatacccctgtggtcctcccacgctctctggacttcacagaactggatgttgctgctgagaagattgacaggttcatgcaggctgtgacaggatggaagactggctgctccctgatgggagccagtgtggacagcaccctggctttcaacacctacgtccacttccaagggaagatgaagggcttctccctgctggccgagccccaggagttctgggtggacaacagcacctcagtgtctgttcccatgctctctggcatgggcaccttccagcactggagtgacatccaggacaacttctcggtgactcaagtgcccttcactgagagcgcctgcctgctgctgatccagcctcactatgcctctgacctggacaaggtggagggtctcactttccagcaaaactccctcaactggatgaagaaactatctccccggaccatccacctgaccatgccccaactggtgctgcaaggatcttatgacctgcaggacctgctcgcccaggctgagctgcccgccattctgcacaccgagctgaacctgcaaaaattgagcaatgaccgcatcagggtgggggaggtgctgaacagcattttttttgagcttgaagcggatgagagagagcccacagagtctacccaacagcttaacaagcctgaggtcttggaggtgaccctgaaccgcccattcctgtttgctgtgtatgatcaaagcgccactgccctgcacttcctgggccgcgtggccaacccgctgagcacagcatgaggccagggccccagaacacagtgcctggcaaggcctctgcccctggcctttgaggcaaaggccagcagcagataacaaccccggacaaatcagcgatgtgtcacccccagtctcccaccttttcttctaatgagtcgactttgagctggaaagcagccgtttctccttggtctaagtgtgctgcatggagtgagcagtagaagcctgcagcggcacaaatgcacctcccagtttgctgggtttattttagagaatgggggtggggaggcaagaaccagtgtttagcgcgggactactgttccaaaaagaattccaaccgaccagcttgtttgtgaaacaaaaaagtgttcccttttcaagttgagaacaaaaattgggttttaaaattaaagtatacatttttgcattgccttcggtttgtatttagtgtcttgaatgtaagaacatgacctccgtgtagtgtctgtaataccttagttttttccacagatgcttgtgatttttgaacaatacgtgaaagatgcaagcacctgaatttctgtttgaatgcggaaccatagctggttatttctcccttgtgttagtaataaacgtcttgccacaataagcctccaaaaaaaa

SEQ ID NO: 11415 - DNA, 1413 bp, Homo sapiens
ccggcctcttggtactgctgaccccagccaggctacagggatcgattggagctgtccttggggctgtaattggccccagctgagcagggcaaacactgaggtcaactacaagccacaggccccttccccagcctcagttcacagctgccctgttgcagggaggcggtggcccttctgttgctagaccgagcctgtgggatataccaaggcagaggagcccatagccatgaggagcctcggggccctgctcttgctgctgagcgcctgcctggcggtgagcgctggccctgtgccaacgccgcccgacaacatccaagtgcaggaaaacttcaatatctctcggatctatgggaagtggtacaacctggccatcggttccacctgcccctggctgaagaagatcatggacaggatgacagtgagcacgctggtgctgggagagggcgctacagaggcggagatcagcatgaccagcactcgttggcggaaaggtgtctgtgaggagacgtctggagcttatgagaaaacagatactgatgggaagtttctctatcacaaatccaaatggaacataaccatggagtcctatgtggtccacaccaactatgatgagtatgccattttcctgaccaagaaattcagccgccatcatggacccaccattactgccaagctctacgggcgggcgccgcagctgagggaaactctcctgcaggacttcagagtggttgcccagggtgtgggcatccctgaggactccatcttcaccatggctgaccgaggtgaatgtgtccctggggagcaggaaccagagcccatcttaatcccgagagtccggagggctgtgctaccccaagaagaggaaggatcagggggtgggcaactggtaactgaagtcaccaagaaagaagattcctgccagctgggctactcggccggtccctgcatgggaatgaccagcaggtatttctataatggtacatccatggcctgtgagactttccagtacggcggctgcatgggcaacggtaacaacttcgtcacagaaaaggagtgtctgcagacctgccgaactgtggcggcctgcaatctccccatagtccggggcccctgccgagccttcatccagctctgggcatttgatgctgtcaaggggaagtgcgtcctcttcccctacgggggctgccagggcaacgggaacaagttctactcagagaaggagtgcagagagtactgcggtgtccctggtgatggtgatgaggagctgctgcgcttctccaactgacaactggccggtctgcaagtcagaggatggccagtgtctgtcccggggtcctgtggcaggcagcgccaagcaacctgggtccaaataaaaactaaattgtaaactcctgaaaaaaaaaaaaaaaaaaa

SEQ ID NO: 11416 - DNA, 2751 bp, Homo sapiens
attcgccgctggactttgacagtggtcaaaggctctgctcagttctctgtgcctgtctccctccagcactgccgaggttctctgccgaggccaaccagaaataccccttggaagctggaatcctgcaacaatggcccagggtgtcctctggatcctactcggattgctactgtggtcagacccagggacagcctccctgcccctgctcatggactctgtcatccaggccctggctgagctggagcagaaagtgccagctgccaagaccagacacacagcttctgcgtggctgatgtcagctccaaactctggcccccacaatcgcctctaccacttcctgctgggggcatggagcctcaatgctacagagttggatccctgcccactaagcccagagctgttaggcctgaccaaggaggtggcccgacatgacgtacgagaagggaaggaatatggggtggtgctggcacctgatggctcgaccgtggctgtggagcctctgctggcggggctggaggcagggctgcaagggcgcagggtcataaatttgcccttggacagcatggctgccccttgggagactggagatacctttccagatgttgtggccattgctccagatgtaagagccacctcctccccaggactcagggatggctctccagatgtcaccactgcagatattggagccaacactccagatgctacaaaaggctgtccagatgtccaagcttccttgccagatgccaaagccaagtccccaccgaccatggtggacagcctcctggcagtcaccctggctggaaacctgggcctgaccttcctccgaggttcccagacccagagccatccagacctgggaactgagggctgctgggaccagctctctgcccctcggacctttacgcttttggaccccaaggcatctctgttaaccatggccttcctcaatggcgccctggatggggtcatccttggagactacctgagccggactcctgagccccggccatccctcagccacttgctgagccagtactatggggctggggtggccagagacccagggttccgcagcaacttccgacggcagaacggtgctgctctgacttcagcctccatcctggcccagcaggtgtggggaacccttgtccttctacagaggctggagccagtacacctccagcttcagtgcatgagccaagaacagctggcccaggtggctgccaatgctaccaaggaattcactgaggccttcctgggatgcccggccatccacccccgctgccgctggggagcggcgccttatcggggccgcccgaagctgctgcagctgccgctgggattcttgtacgtgcatcacacctacgtgcctgcaccaccctgcacggacttcacgcgctgcgcagccaacatgcgctccatgcagcgctaccaccaggacacgcaaggctggggagacatcggctacggtttcgtggtgggctcggacggctacgtgtacgagggacgcggctggcactgggtgggcgcccacacgctcggccacaactcccggggcttcggcgtggccatagtgggcaactacaccgcggcgctgcccaccgaggccgctctgcgcacggtgcgcgacacgctcccgagttgtgcggtgcgcgccggcctcctgcggccagactacgcgctgctgggccaccgccagctggtgcgcaccgactgccccggcgacgcgctcttcgacctgctgcgcacctggccgcacttcaccgcggtgagtcttcgcagcctgcactacacggcccgccgcccctccgtctacacaagctccacgaggcccctgccccctgcctgtaacagctgtgcccgcacagcctcagccaggcccccaacttcccggcggcacgtctattcaggaaacctaggcccagcctttgcgggtcactctgcgggcaacatccctgatcctgtgacttctgcctatgcagcctcagctcagccccagacccagccagcctgtcctttccccagctcctaatacctctacctttccagccaaggcatggaccctgacacctgccaacagcccctctgccctcacaacctcagcctggccttcatgacttctctacccaagtcacaacctgtcaggctgcaccacctcatcctggcccgccgaaccttgacctcacccctgcccctacccgaaggccctctgtccacacaacatgaacctaggctgtgaccttttgccttcacaacctctgtccagtccttaatcctgtgttgcaattctctgtccagacaatctcaactctgaggttgcttgtttcgtccctgactccttaacccctgatgacaactcttatgccagcacaactttgacctgatgacctcatcccagcccttgatcgccatcactaaaacaattttagaatcacacctggacaatctcgtgctacctacatactgccactccatttcattaagctattgactagcacatccatctcggcctatagttggctttgtcctcactctctcactttgggccactgtcccctccctgatccagggttccaccaccaggagggcagacccagccacataccacaaccacccccaagcctcacactcccttgtctttttccagactgttaagccaagacctgccaggagtgtctctaagagatccaggagggagccacccccaaggaccctgccagccacagacctccaataaagacagcatgg

SEQ ID NO: 11417 - DNA, 1997 bp, Homo sapiens
actttcttttgtaaatgtggtttctacaaagatgaaactactaaaacttacaggttttatttttttcttgttttttttgactgaatccctaaccctgcccacacaacctcgggatatagagaacttcaatagtactcaaaaatttatagaagataatattgaatacatcaccatcattgcatttgctcagtatgttcaggaagcaacctttgaagaaatggaaaagctggtgaaagacatggtagaatacaaagacagatgtatggctgacaagacgctcccagagtgttcaaaattacctaataatgttttacaggaaaaaatatgtgctatggaggggctgccacaaaagcataatttctcacactgctgcagtaaggttgatgctcaaagaagactctgtttcttctataacaagaaatctgatgtgggatttctgcctcctttccctaccctggatcccgaagagaaatgccaggcttatgaaagtaacagagaatcccttttaaatcactttttatatgaagttgccagaaggaacccatttgtcttcgcccctacacttctaactgttgctgttcattttgaggaggtggccaaatcatgttgtgaagaacaaaacaaagtcaactgccttcaaacaagggcaatacctgtcacacaatatttaaaagcattttcttcttatcaaaaacatgtctgtggggcacttttgaaatttggaaccaaagttgtacactttatatatattgcgatactcagtcaaaaattccccaagattgaatttaaggagcttatttctcttgtagaagatgtttcttccaactatgatggatgctgtgaaggggatgttgtgcagtgcatccgtgacacgagcaaggttatgaaccatatttgttcaaaacaagattctatctccagcaaaatcaaagagtgctgtgaaaagaaaataccagagcgcggccagtgcataattaactcaaacaaagatgatagaccaaaggatttatctctaagagaaggaaaatttactgacagtgaaaatgtgtgtcaagaacgagatgctgacccagacaccttctttgcgaagtttacttttgaatactcaaggagacatccagacctgtctataccagagcttttaagaattgttcaaatatacaaagatctcctgagaaattgctgcaacacagaaaaccctccaggttgttaccgttacgcggaagacaaattcaatgagacaactgagaaaagcctcaagatggtacaacaagaatgtaaacatttccagaatttggggaaggatggtttgaaataccattacctcatcaggctcacgaagatagctccccaactctccactgaagaactggtgtctcttggcgagaaaatggtgacagctttcactacttgctgtacgctaagtgaagagtttgcctgtgttgataatttggcagatttagtttttggagagttatgtggagtaaatgaaaatcgaactatcaaccctgctgtggaccactgctgtaaaacaaactttgccttcagaaggccctgctttgagagtttgaaagctgataaaacatatgtgcctccacctttctctcaagatttatttacctttcacgcagacatgtgtcaatctcagaatgaggagcttcagaggaagacagacaggtttcttgtcaacttagtgaagctgaagcatgaactcacagatgaagagctgcagtctttgtttacaaatttcgcaaatgtagtggataagtgctgcaaagcagagagtcctgaagtctgctttaatgaagagagtccaaaaattggcaactgaagccagctgctggagatatgtaaagaaaaaagcaccaaagggaaggcttcctatctgtgtggtgatgaatcgcatttcctgagaacaaaataaaaggatttttctgtaactgtcacctgaaataatacattgcagcaagcaataaacacaacattttgtaaagtta

SEQ ID NO: 11418 - DNA, 14121 bp, Homo sapiens
attcccaccgggacctgcggggctgagtgcccttctcggttgctgccgctgaggagcccgcccagccagccagggccgcgaggccgaggccaggccgcagcccaggagccgccccaccgcagctggcgatggacccgccgaggcccgcgctgctggcgctgctggcgctgcctgcgctgctgctgctgctgctggcgggcgccagggccgaagaggaaatgctggaaaatgtcagcctggtctgtccaaaagatgcgacccgattcaagcacctccggaagtacacatacaactatgaggctgagagttccagtggagtccctgggactgctgattcaagaagtgccaccaggatcaactgcaaggttgagctggaggttccccagctctgcagcttcatcctgaagaccagccagtgcaccctgaaagaggtgtatggcttcaaccctgagggcaaagccttgctgaagaaaaccaagaactctgaggagtttgctgcagccatgtccaggtatgagctcaagctggccattccagaagggaagcaggttttcctttacccggagaaagatgaacctacttacatcctgaacatcaagaggggcatcatttctgccctcctggttcccccagagacagaagaagccaagcaagtgttgtttctggataccgtgtatggaaactgctccactcactttaccgtcaagacgaggaagggcaatgtggcaacagaaatatccactgaaagagacctggggcagtgtgatcgcttcaagcccatccgcacaggcatcagcccacttgctctcatcaaaggcatgacccgccccttgtcaactctgatcagcagcagccagtcctgtcagtacacactggacgctaagaggaagcatgtggcagaagccatctgcaaggagcaacacctcttcctgcctttctcctacaacaataagtatgggatggtagcacaagtgacacagactttgaaacttgaagacacaccaaagatcaacagccgcttctttggtgaaggtactaagaagatgggcctcgcatttgagagcaccaaatccacatcacctccaaagcaggccgaagctgttttgaagactctccaggaactgaaaaaactaaccatctctgagcaaaatatccagagagctaatctcttcaataagctggttactgagctgagaggcctcagtgatgaagcagtcacatctctcttgccacagctgattgaggtgtccagccccatcactttacaagccttggttcagtgtggacagcctcagtgctccactcacatcctccagtggctgaaacgtgtgcatgccaacccccttctgatagatgtggtcacctacctggtggccctgatccccgagccctcagcacagcagctgcgagagatcttcaacatggcgagggatcagcgcagccgagccaccttgtatgcgctgagccacgcggtcaacaactatcataagacaaaccctacagggacccaggagctgctggacattgctaattacctgatggaacagattcaagatgactgcactggggatgaagattacacctatttgattctgcgggtcattggaaatatgggccaaaccatggagcagttaactccagaactcaagtcttcaatcctcaaatgtgtccaaagtacaaagccatcactgatgatccagaaagctgccatccaggctctgcggaaaatggagcctaaagacaaggaccaggaggttcttcttcagactttccttgatgatgcttctccgggagataagcgactggctgcctatcttatgttgatgaggagtccttcacaggcagatattaacaaaattgtccaaattctaccatgggaacagaatgagcaagtgaagaactttgtggcttcccatattgccaatatcttgaactcagaagaattggatatccaagatctgaaaaagttagtgaaagaagctctgaaagaatctcaacttccaactgtcatggacttcagaaaattctctcggaactatcaactctacaaatctgtttctcttccatcacttgacccagcctcagccaaaatagaagggaatcttatatttgatccaaataactaccttcctaaagaaagcatgctgaaaactaccctcactgcctttggatttgcttcagctgacctcatcgagattggcttggaaggaaaaggctttgagccaacattggaagctctttttgggaagcaaggatttttcccagacagtgtcaacaaagctttgtactgggttaatggtcaagttcctgatggtgtctctaaggtcttagtggaccactttggctataccaaagatgataaacatgagcaggatatggtaaatggaataatgctcagtgttgagaagctgattaaagatttgaaatccaaagaagtcccggaagccagagcctacctccgcatcttgggagaggagcttggttttgccagtctccatgacctccagctcctgggaaagctgcttctgatgggtgcccgcactctgcaggggatcccccagatgattggagaggtcatcaggaagggctcaaagaatgacttttttcttcactacatcttcatggagaatgcctttgaactccccactggagctggattacagttgcaaatatcttcatctggagtcattgctcccggagccaaggctggagtaaaactggaagtagccaacatgcaggctgaactggtggcaaaaccctccgtgtctgtggagtttgtgacaaatatgggcatcatcattccggacttcgctaggagtggggtccagatgaacaccaacttcttccacgagtcgggtctggaggctcatgttgccctaaaagctgggaagctgaagtttatcattccttccccaaagagaccagtcaagctgctcagtggaggcaacacattacatttggtctctaccaccaaaacggaggtgatcccacctctcattgagaacaggcagtcctggtcagtttgcaagcaagtctttcctggcctgaattactgcacctcaggcgcttactccaacgccagctccacagactccgcctcctactatccgctgaccggggacaccagattagagctggaactgaggcctacaggagagattgagcagtattctgtcagcgcaacctatgagctccagagagaggacagagccttggtggataccctgaagtttgtaactcaagcagaaggtgcgaagcagactgaggctaccatgacattcaaatataatcggcagagtatgaccttgtccagtgaagtccaaattccggattttgatgttgacctcggaacaatcctcagagttaatgatgaatctactgagggcaaaacgtcttacagactcaccctggacattcagaacaagaaaattactgaggtcgccctcatgggccacctaagttgtgacacaaaggaagaaagaaaaatcaagggtgttatttccataccccgtttgcaagcagaagccagaagtgagatcctcgcccactggtcgcctgccaaactgcttctccaaatggactcatctgctacagcttatggctccacagtttccaagagggtggcatggcattatgatgaagagaagattgaatttgaatggaacacaggcaccaatgtagataccaaaaaaatgacttccaatttccctgtggatctctccgattatcctaagagcttgcatatgtatgctaatagactcctggatcacagagtccctgaaacagacatgactttccggcacgtgggttccaaattaatagttgcaatgagctcatggcttcagaaggcatctgggagtcttccttatacccagactttgcaagaccacctcaatagcctgaaggagttcaacctccagaacatgggattgccagacttccacatcccagaaaacctcttcttaaaaagcgatggccgggtcaaatataccttgaacaagaacagtttgaaaattgagattcctttgccttttggtggcaaatcctccagagatctaaagatgttagagactgttaggacaccagccctccacttcaagtctgtgggattccatctgccatctcgagagttccaagtccctacttttaccattcccaagttgtatcaactgcaagtgcctctcctgggtgttctagacctctccacgaatgtctacagcaacttgtacaactggtccgcctcctacagtggtggcaacaccagcacagaccatttcagccttcgggctcgttaccacatgaaggctgactctgtggttgacctgctttcctacaatgtgcaaggatctggagaaacaacatatgaccacaagaatacgttcacactatcatgtgatgggtctctacgccacaaatttctagattcgaatatcaaattcagtcatgtagaaaaacttggaaacaacccagtctcaaaaggtttactaatattcgatgcatctagttcctggggaccacagatgtctgcttcagttcatttggactccaaaaagaaacagcatttgtttgtcaaagaagtcaagattgatgggcagttcagagtctcttcgttctatgctaaaggcacatatggcctgtcttgtcagagggatcctaacactggccggctcaatggagagtccaacctgaggtttaactcctcctacctccaaggcaccaaccagataacaggaagatatgaagatggaaccctctccctcacctccacctctgatctgcaaagtggcatcattaaaaatactgcttccctaaagtatgagaactacgagctgactttaaaatctgacaccaatgggaagtataagaactttgccacttctaacaagatggatatgaccttctctaagcaaaatgcactgctgcgttctgaatatcaggctgattacgagtcattgaggttcttcagcctgctttctggatcactaaattcccatggtcttgagttaaatgctgacatcttaggcactgacaaaattaatagtggtgctcacaaggcgacactaaggattggccaagatggaatatctaccagtgcaacgaccaacttgaagtgtagtctcctggtgctggagaatgagctgaatgcagagcttggcctctctggggcatctatgaaattaacaacaaatggccgcttcagggaacacaatgcaaaattcagtctggatgggaaagccgccctcacagagctatcactgggaagtgcttatcaggccatgattctgggtgtcgacagcaaaaacattttcaacttcaaggtcagtcaagaaggacttaagctctcaaatgacatgatgggctcatatgctgaaatgaaatttgaccacacaaacagtctgaacattgcaggcttatcactggacttctcttcaaaacttgacaacatttacagctctgacaagttttataagcaaactgttaatttacagctacagccctattctctggtaactactttaaacagtgacctgaaatacaatgctctggatctcaccaacaatgggaaactacggctagaacccctgaagctgcatgtggctggtaacctaaaaggagcctaccaaaataatgaaataaaacacatctatgccatctcttctgctgccttatcagcaagctataaagcagacactgttgctaaggttcagggtgtggagtttagccatcggctcaacacagacatcgctgggctggcttcagccattgacatgagcacaaactataattcagactcactgcatttcagcaatgtcttccgttctgtaatggccccgtttaccatgaccatcgatgcacatacaaatggcaatgggaaactcgctctctggggagaacatactgggcagctgtatagcaaattcctgttgaaagcagaacctctggcatttactttctctcatgattacaaaggctccacaagtcatcatctcgtgtctaggaaaagcatcagtgcagctcttgaacacaaagtcagtgccctgcttactccagctgagcagacaggcacctggaaactcaagacccaatttaacaacaatgaatacagccaggacttggatgcttacaacactaaagataaaattggcgtggagcttactggacgaactctggctgacctaactctactagactccccaattaaagtgccacttttactcagtgagcccatcaatatcattgatgctttagagatgagagatgccgttgagaagccccaagaatttacaattgttgcttttgtaaagtatgataaaaaccaagatgttcactccattaacctcccattttttgagaccttgcaagaatattttgagaggaatcgacaaaccattatagttgtagtggaaaacgtacagagaaacctgaagcacatcaatattgatcaatttgtaagaaaatacagagcagccctgggaaaactcccacagcaagctaatgattatctgaattcattcaattgggagagacaagtttcacatgccaaggagaaactgactgctctcacaaaaaagtatagaattacagaaaatgatatacaaattgcattagatgatgccaaaatcaactttaatgaaaaactatctcaactgcagacatatatgatacaatttgatcagtatattaaagatagttatgatttacatgatttgaaaatagctattgctaatattattgatgaaatcattgaaaaattaaaaagtcttgatgagcactatcatatccgtgtaaatttagtaaaaacaatccatgatctacatttgtttattgaaaatattgattttaacaaaagtggaagtagtactgcatcctggattcaaaatgtggatactaagtaccaaatcagaatccagatacaagaaaaactgcagcagcttaagagacacatacagaatatagacatccagcacctagctggaaagttaaaacaacacattgaggctattgatgttagagtgcttttagatcaattgggaactacaatttcatttgaaagaataaatgatgttcttgagcatgtcaaacactttgttataaatcttattggggattttgaagtagctgagaaaatcaatgccttcagagccaaagtccatgagttaatcgagaggtatgaagtagaccaacaaatccaggttttaatggataaattagtagagttgacccaccaatacaagttgaaggagactattcagaagctaagcaatgtcctacaacaagttaagataaaagattactttgagaaattggttggatttattgatgatgctgtgaagaagcttaatgaattatcttttaaaacattcattgaagatgttaacaaattccttgacatgttgataaagaaattaaagtcatttgattaccaccagtttgtagatgaaaccaatgacaaaatccgtgaggtgactcagagactcaatggtgaaattcaggctctggaactaccacaaaaagctgaagcattaaaactgtttttagaggaaaccaaggccacagttgcagtgtatctggaaagcctacaggacaccaaaataaccttaatcatcaattggttacaggaggctttaagttcagcatctttggctcacatgaaggccaaattccgagagactctagaagatacacgagaccgaatgtatcaaatggacattcagcaggaacttcaacgatacctgtctctggtaggccaggtttatagcacacttgtcacctacatttctgattggtggactcttgctgctaagaaccttactgactttgcagagcaatattctatccaagattgggctaaacgtatgaaagcattggtagagcaagggttcactgttcctgaaatcaagaccatccttgggaccatgcctgcctttgaagtcagtcttcaggctcttcagaaagctaccttccagacacctgattttatagtccccctaacagatttgaggattccatcagttcagataaacttcaaagacttaaaaaatataaaaatcccatccaggttttccacaccagaatttaccatccttaacaccttccacattccttcctttacaattgactttgtcgaaatgaaagtaaagatcatcagaaccattgaccagatgcagaacagtgagctgcagtggcccgttccagatatatatctcagggatctgaaggtggaggacattcctctagcgagaatcaccctgccagacttccgtttaccagaaatcgcaattccagaattcataatcccaactctcaaccttaatgattttcaagttcctgaccttcacataccagaattccagcttccccacatctcacacacaattgaagtacctacttttggcaagctatacagtattctgaaaatccaatctcctcttttcacattagatgcaaatgctgacatagggaatggaaccacctcagcaaacgaagcaggtatcgcagcttccatcactgccaaaggagagtccaaattagaagttctcaattttgattttcaagcaaatgcacaactctcaaaccctaagattaatccgctggctctgaaggagtcagtgaagttctccagcaagtacctgagaacggagcatgggagtgaaatgctgttttttggaaatgctattgagggaaaatcaaacacagtggcaagtttacacacagaaaaaaatacactggagcttagtaatggagtgattgtcaagataaacaatcagcttaccctggatagcaacactaaatacttccacaaattgaacatccccaaactggacttctctagtcaggctgacctgcgcaacgagatcaagacactgttgaaagctggccacatagcatggacttcttctggaaaagggtcatggaaatgggcctgccccagattctcagatgagggaacacatgaatcacaaattagtttcaccatagaaggacccctcacttcctttggactgtccaataagatcaatagcaaacacctaagagtaaaccaaaacttggtttatgaatctggctccctcaacttttctaaacttgaaattcaatcacaagtcgattcccagcatgtgggccacagtgttctaactgctaaaggcatggcactgtttggagaagggaaggcagagtttactgggaggcatgatgctcatttaaatggaaaggttattggaactttgaaaaattctcttttcttttcagcccagccatttgagatcacggcatccacaaacaatgaagggaatttgaaagttcgttttccattaaggttaacagggaagatagacttcctgaataactatgcactgtttctgagtcccagtgcccagcaagcaagttggcaagtaagtgctaggttcaatcagtataagtacaaccaaaatttctctgctggaaacaacgagaacattatggaggcccatgtaggaataaatggagaagcaaatctggatttcttaaacattcctttaacaattcctgaaatgcgtctaccttacacaataatcacaactcctccactgaaagatttctctctatgggaaaaaacaggcttgaaggaattcttgaaaacgacaaagcaatcatttgatttaagtgtaaaagctcagtataagaaaaacaaacacaggcattccatcacaaatcctttggctgtgctttgtgagtttatcagtcagagcatcaaatcctttgacaggcattttgaaaaaaacagaaacaatgcattagattttgtcaccaaatcctataatgaaacaaaaattaagtttgataagtacaaagctgaaaaatctcacgacgagctccccaggacctttcaaattcctggatacactgttccagttgtcaatgttgaagtgtctccattcaccatagagatgtcggcattcggctatgtgttcccaaaagcagtcagcatgcctagtttctccatcctaggttctgacgtccgtgtgccttcatacacattaatcctgccatcattagagctgccagtccttcatgtccctagaaatctcaagctttctcttccacatttcaaggaattgtgtaccataagccatatttttattcctgccatgggcaatattacctatgatttctcctttaaatcaagtgtcatcacactgaataccaatgctgaactttttaaccagtcagatattgttgctcatctcctttcttcatcttcatctgtcattgatgcactgcagtacaaattagagggcaccacaagattgacaagaaaaaggggattgaagttagccacagctctgtctctgagcaacaaatttgtggagggtagtcataacagtactgtgagcttaaccacgaaaaatatggaagtgtcagtggcaaaaaccacaaaagccgaaattccaattttgagaatgaatttcaagcaagaacttaatggaaataccaagtcaaaacctactgtctcttcctccatggaatttaagtatgatttcaattcttcaatgctgtactctaccgctaaaggagcagttgaccacaagcttagcttggaaagcctcacctcttacttttccattgagtcatctaccaaaggagatgtcaagggttcggttctttctcgggaatattcaggaactattgctagtgaggccaacacttacttgaattccaagagcacacggtcttcagtgaagctgcagggcacttccaaaattgatgatatctggaaccttgaagtaaaagaaaattttgctggagaagccacactccaacgcatatattccctctgggagcacagtacgaaaaaccacttacagctagagggcctctttttcaccaacggagaacatacaagcaaagccaccctggaactctctccatggcaaatgtcagctcttgttcaggtccatgcaagtcagcccagttccttccatgatttccctgaccttggccaggaagtggccctgaatgctaacactaagaaccagaagatcagatggaaaaatgaagtccggattcattctgggtctttccagagccaggtcgagctttccaatgaccaagaaaaggcacaccttgacattgcaggatccttagaaggacacctaaggttcctcaaaaatatcatcctaccagtctatgacaagagcttatgggatttcctaaagctggatgtaaccaccagcattggtaggagacagcatcttcgtgtttcaactgcctttgtgtacaccaaaaaccccaatggctattcattctccatccctgtaaaagttttggctgataaattcattactcctgggctgaaactaaatgatctaaattcagttcttgtcatgcctacgttccatgtcccatttacagatcttcaggttccatcgtgcaaacttgacttcagagaaatacaaatctataagaagctgagaacttcatcatttgccctcaacctaccaacactccccgaggtaaaattccctgaagttgatgtgttaacaaaatattctcaaccagaagactccttgattcccttttttgagataaccgtgcctgaatctcagttaactgtgtcccagttcacgcttccaaaaagtgtttcagatggcattgctgctttggatctaaatgcagtagccaacaagatcgcagactttgagttgcccaccatcatcgtgcctgagcagaccattgagattccctccattaagttctctgtacctgctggaattgtcattccttcctttcaagcactgactgcacgctttgaggtagactctcccgtgtataatgccacttggagtgccagtttgaaaaacaaagcagattatgttgaaacagtcctggattccacatgcagctcaaccgtacagttcctagaatatgaactaaatgttttgggaacacacaaaatcgaagatggtacgttagcctctaagactaaaggaacacttgcacaccgtgacttcagtgcagaatatgaagaagatggcaaatttgaaggacttcaggaatgggaaggaaaagcgcacctcaatatcaaaagcccagcgttcaccgatctccatctgcgctaccagaaagacaagaaaggcatctccacctcagcagcctccccagccgtaggcaccgtgggcatggatatggatgaagatgacgacttttctaaatggaacttctactacagccctcagtcctctccagataaaaaactcaccatattcaaaactgagttgagggtccgggaatctgatgaggaaactcagatcaaagttaattgggaagaagaggcagcttctggcttgctaacctctctgaaagacaacgtgcccaaggccacaggggtcctttatgattatgtcaacaagtaccactgggaacacacagggctcaccctgagagaagtgtcttcaaagctgagaagaaatctgcagaacaatgctgagtgggtttatcaaggggccattaggcaaattgatgatatcgacgtgaggttccagaaagcagccagtggcaccactgggacctaccaagagtggaaggacaaggcccagaatctgtaccaggaactgttgactcaggaaggccaagccagtttccagggactcaaggataacgtgtttgatggcttggtacgagttactcaaaaattccatatgaaagtcaagcatctgattgactcactcattgattttctgaacttccccagattccagtttccggggaaacctgggatatacactagggaggaactttgcactatgttcataagggaggtagggacggtactgtcccaggtatattcgaaagtccataatggttcagaaatactgttttcctatttccaagacctagtgattacacttcctttcgagttaaggaaacataaactaatagatgtaatctcgatgtatagggaactgttgaaagatttatcaaaagaagcccaagaggtatttaaagccattcagtctctcaagaccacagaggtgctacgtaatcttcaggaccttttacaattcattttccaactaatagaagataacattaaacagctgaaagagatgaaatttacttatcttattaattatatccaagatgagatcaacacaatcttcaatgattatatcccatatgtttttaaattgttgaaagaaaacctatgccttaatcttcataagttcaatgaatttattcaaaacgagcttcaggaagcttctcaagagttacagcagatccatcaatacattatggcccttcgtgaagaatattttgatccaagtatagttggctggacagtgaaatattatgaacttgaagaaaagatagtcagtctgatcaagaacctgttagttgctcttaaggacttccattctgaatatattgtcagtgcctctaactttacttcccaactctcaagtcaagttgagcaatttctgcacagaaatattcaggaatatcttagcatccttaccgatccagatggaaaagggaaagagaagattgcagagctttctgccactgctcaggaaataattaaaagccaggccattgcgacgaagaaaataatttctgattaccaccagcagtttagatataaactgcaagatttttcagaccaactctctgattactatgaaaaatttattgctgaatccaaaagattgattgacctgtccattcaaaactaccacacatttctgatatacatcacggagttactgaaaaagctgcaatcaaccacagtcatgaacccctacatgaagcttgctccaggagaacttactatcatcctctaattttttaaaagaaatcttcatttattcttcttttccaattgaactttcacatagcacagaaaaaattcaaactgcctatattgataaaaccatacagtgagccagccttgcagtaggcagtagactataagcagaagcacatatgaactggacctgcaccaaagctggcaccagggctcggaaggtctctgaactcagaaggatggcattttttgcaagttaaagaaaatcaggatctgagttattttgctaaacttgggggaggaggaacaaataaatggagtctttattgtgtatcata

SEQ ID NO: 11419 - DNA, 2402 bp, Homo sapiens
gcccgcgccggctgtgctgcacagggggaggagagggaaccccaggcgcgagcgggaagaggggacctgcagccacaacttctctggtcctctgcatcccttctgtccctccacccgtccccttccccaccctctggcccccaccttcttggaggcgacaacccccgggaggcattagaagggatttttcccgcaggttgcgaagggaagcaaacttggtggcaacttgcctcccggtgcgggcgtctctcccccaccgtctcaacatgcttaggggtccggggcccgggctgctgctgctggccgtccagtgcctggggacagcggtgccctccacgggagcctcgaagagcaagaggcaggctcagcaaatggttcagccccagtccccggtggctgtcagtcaaagcaagcccggttgttatgacaatggaaaacactatcagataaatcaacagtgggagcggacctacctaggcaatgcgttggtttgtacttgttatggaggaagccgaggttttaactgcgagagtaaacctgaagctgaagagacttgctttgacaagtacactgggaacacttaccgagtgggtgacacttatgagcgtcctaaagactccatgatctgggactgtacctgcatcggggctgggcgagggagaataagctgtaccatcgcaaaccgctgccatgaagggggtcagtcctacaagattggtgacacctggaggagaccacatgagactggtggttacatgttagagtgtgtgtgtcttggtaatggaaaaggagaatggacctgcaagcccatagctgagaagtgttttgatcatgctgctgggacttcctatgtggtcggagaaacgtgggagaagccctaccaaggctggatgatggtagattgtacttgcctgggagaaggcagcggacgcatcacttgcacttctagaaatagatgcaacgatcaggacacaaggacatcctatagaattggagacacctggagcaagaaggataatcgaggaaacctgctccagtgcatctgcacaggcaacggccgaggagagtggaagtgtgagaggcacacctctgtgcagaccacatcgagcggatctggccccttcaccgatgttcgtgcagctgtttaccaaccgcagcctcacccccagcctcctccctatggccactgtgtcacagacagtggtgtggtctactctgtggggatgcagtggctgaagacacaaggaaataagcaaatgctttgcacgtgcctgggcaacggagtcagctgccaagagacagctgtaacccagacttacggtggcaactcaaatggagagccatgtgtcttaccattcacctacaatggcaggacgttctactcctgcaccacagaagggcgacaggacggacatctttggtgcagcacaacttcgaattatgagcaggaccagaaatactctttctgcacagaccacactgttttggttcagactcgaggaggaaattccaatggtgccttgtgccacttccccttcctatacaacaaccacaattacactgattgcacttctgagggcagaagagacaacatgaagtggtgtgggaccacacagaactatgatgccgaccagaagtttgggttctgccccatggctgcccacgaggaaatctgcacaaccaatgaaggggtcatgtaccgcattggagatcagtgggataagcagcatgacatgggtcacatgatgaggtgcacgtgtgttgggaatggtcgtggggaatggacatgcattgcctactcgcagcttcgagatcagtgcattgttgatgacatcacttacaatgtgaacgacacattccacaagcgtcatgaagaggggcacatgctgaactgtacatgcttcggtcagggtcggggcaggtggaagtgtgatcccgtcgaccaatgccaggattcagagactgggacgttttatcaaattggagattcatgggagaagtatgtgcatggtgtcagataccagtgctactgctatggccgtggcattggggagtggcattgccaacctttacagacctatccaagctcaagtggtcctgtcgaagtatttatcactgagactccgagtcagcccaactcccaccccatccagtggaatgcaccacagccatctcacatttccaagtacattctcaggtggagacctgtgagtatcccacccagaaaccttggatactgagtctcctaatcttatcaattctgatggtttctttttttcccagcttttgagccaacaactctgattaactattcctatagcatttactatatttgtttagtgaacaaacaatatgtggtcaattaaattgacttgtagactgaaaaaaaaaaaaaaaaaaaa

SEQ ID NO: 11420 - DNA, 1963 bp, Homo sapiens
cgaacacctccaacatgaagcttcttcatgttttcctgttatttctgtgcttccacttaaggttttgcaaggtcacttatacatctcaagaggatctggtggagaaaaagtgcttagcaaaaaaatatactcacctctcctgcgataaagtcttctgccagccatggcagagatgcattgagggcacctgtgtttgtaaactaccgtatcagtgcccaaagaatggcactgcagtgtgtgcaactaacaggagaagcttcccaacatactgtcaacaaaagagtttggaatgtcttcatccagggacaaagtttttaaataacggaacatgcacagccgaaggaaagtttagtgtttccttgaagcatggaaatacagattcagagggaatagttgaagtaaaacttgtggaccaagataagacaatgttcatatgcaaaagcagctggagcatgagggaagccaacgtggcctgccttgaccttgggtttcaacaaggtgctgatactcaaagaaggtttaagttgtctgatctctctataaattccactgaatgtctacatgtgcattgccgaggattagagaccagtttggctgaatgtacttttactaagagaagaactatgggttaccaggatttcgctgatgtggtttgttatacacagaaagcagattctccaatggatgacttctttcagtgtgtgaatgggaaatacatttctcagatgaaagcctgtgatggtatcaatgattgtggagaccaaagtgatgaactgtgttgtaaagcatgccaaggcaaaggcttccattgcaaatcgggtgtttgcattccaagccagtatcaatgcaatggtgaggtggactgcattacaggggaagatgaagttggctgtgcaggctttgcatctgtggctcaagaagaaacagaaattttgactgctgacatggatgcagaaagaagacggataaaatcattattacctaaactatcttgtggagttaaaaacagaatgcacattcgaaggaaacgaattgtgggaggaaagcgagcacaactgggagacctcccatggcaggtggcaattaaggatgccagtggaatcacctgtgggggaatttatattggtggctgttggattctgactgctgcacattgtctcagagccagtaaaactcatcgttaccaaatatggacaacagtagtagactggatacaccccgaccttaaacgtatagtaattgaatacgtggatagaattattttccatgaaaactacaatgcaggcacttaccaaaatgacatcgctttgattgaaatgaaaaaagacggaaacaaaaaagattgtgagctgcctcgttccatccctgcctgtgtcccctggtctccttacctattccaacctaatgatacatgcatcgtttctggctggggacgagaaaaagataacgaaagagtcttttcacttcagtggggtgaagttaaactaataagcaactgctctaagttttacggaaatcgtttctatgaaaaagaaatggaatgtgcaggtacatatgatggttccatcgatgcctgtaaaggggactctggaggccccttagtctgtatggatgccaacaatgtgacttatgtctggggtgttgtgagttggggggaaaactgtggaaaaccagagttcccaggtttttacaccaaagtggccaattattttgactggattagctaccatgtaggaaggccttttatttctcagtacaatgtataaaattgtgatctctctcttcattctattctttttctctcaagagttccatttaatggaaataaaacggtataattaataattctctaggggggaaaaatgaagcaaatctcattggatatttttaaaggtctccacagagtttatgccatattggaattttgttgtataattctcaaataaatattttggtgaagcat

SEQ ID NO: 11421 - DNA, 2252 bp, Homo sapiens
agaacagcttgaagaccgttcatttttaagtgacaagagactcacctccaagaagcaattgtgttttcagaatgattttattcaagcaagcaacttatttcatttccttgtttgctacagtttcctgtggatgtctgactcaactctatgaaaacgccttcttcagaggtggggatgtagcttccatgtacaccccaaatgcccaatactgccagatgaggtgcacattccacccaaggtgtttgctattcagttttcttccagcaagttcaatcaatgacatggagaaaaggtttggttgcttcttgaaagatagtgttacaggaaccctgccaaaagtacatcgaacaggtgcagtttctggacattccttgaagcaatgtggtcatcaaataagtgcttgccatcgagacatttataaaggagttgatatgagaggagtcaattttaatgtgtctaaggttagcagtgttgaagaatgccaaaaaaggtgcaccagtaacattcgctgccagtttttttcatatgccacgcaaacatttcacaaggcagagtaccggaacaattgcctattaaagtacagtcccggaggaacacctaccgctataaaggtgctgagtaacgtggaatctggattctcactgaagccctgtgccctttcagaaattggttgccacatgaacatcttccagcatcttgcgttctcagatgtggatgttgccagggttctcactccagatgcttttgtgtgtcggaccatctgcacctatcaccccaactgcctcttctttacattctatacaaatgtatggaaaatcgagtcacaaagaaatgtttgtcttcttaaaacatctgaaagtggcacaccaagttcctctactcctcaagaaaacaccatatctggatatagccttttaacctgcaaaagaactttacctgaaccctgccattctaaaatttacccgggagttgactttggaggagaagaattgaatgtgacttttgttaaaggagtgaatgtttgccaagagacttgcacaaagatgattcgctgtcagtttttcacttattctttactcccagaagactgtaaggaagagaagtgtaagtgtttcttaagattatctatggatggttctccaactaggattgcgtatgggacacaagggagctctggttactctttgagattgtgtaacactggggacaactctgtctgcacaacaaaaacaagcacacgcattgttggaggaacaaactcttcttggggagagtggccctggcaggtgagcctgcaggtgaagctgacagctcagaggcacctgtgtggagggtcactcataggacaccagtgggtcctcactgctgcccactgctttgatgggcttcccctgcaggatgtttggcgcatctatagtggcattttaaatctgtcagacattacaaaagatacacctttctcacaaataaaagagattattattcaccaaaactataaagtctcagaagggaatcatgatatcgccttgataaaactccaggctcctttgaattacactgaattccaaaaaccaatatgcctaccttccaaaggtgacacaagcacaatttataccaactgttgggtaaccggatggggcttctcgaaggagaaaggtgaaatccaaaatattctacaaaaggtaaatattcctttggtaacaaatgaagaatgccagaaaagatatcaagattataaaataacccaacggatggtctgtgctggctataaagaagggggaaaagatgcttgtaagggagattcaggtggtcccttagtttgcaaacacaatggaatgtggcgtttggtgggcatcaccagctggggtgaaggctgtgcccgcagggagcaacctggtgtctacaccaaagtcgctgagtacatggactggattttagagaaaacacagagcagtgatggaaaagctcagatgcagtcaccagcatgagaagcagtccagagtctaggcaatttttacaacctgagttcaagtcaaattctgagcctggggggtcctcatctgcaaagcatggagagtggcatcttctttgcatcctaaggacgaaaaacacagtgcactcagagctgctgaggacaatgtctggctgaagcccgctttcagcacgccgtaaccaggggctgacaatgcgaggtcgcaactgagatctccatgactgtgtgttgtgaaataaaatggtgaaagatcaaaaaa

SEQ ID NO: 11422 - DNA, 2094 bp, Homo sapiens
gcttgttccctgtcctctggccctttgcaaataaatgccttaccagacctgccctgccaccccactcgcagccacccagcaagagcagcatgtcagcctgccggagctttgcagttgcaatctgcattttagaaataagcatcctcacagcacagtacacgaccagttatgacccagagctaacagaaagcagtggctctgcatcacacatagactgcagaatgagcccctggagtgaatggtcacaatgcgatccttgtctcagacaaatgtttcgttcaagaagcattgaggtctttggacaatttaatgggaaaagatgcaccgacgctgtgggagacagacgacagtgtgtgcccacagagccctgtgaggatgctgaggatgactgcggaaatgactttcaatgcagtacaggcagatgcataaagatgcgacttcggtgtaatggtgacaatgactgcggagacttttcagatgaggatgattgtgaaagtgagccccgtcccccctgcagagacagagtggtagaagagtctgagctggcacgaacagcaggctatgggatcaacattttagggatggatcccctaagcacaccttttgacaatgagttctacaatggactctgtaaccgggatcgggatggaaacactctgacatactaccgaagaccttggaacgtggcttctttgatctatgaaaccaaaggcgagaaaaatttcagaaccgaacattacgaagaacaaattgaagcatttaaaagtatcatccaagagaagacatcaaattttaatgcagctatatctctaaaatttacacccactgaaacaaataaagctgaacaatgttgtgaggaaacagcctcctcaatttctttacatggcaagggtagttttcggttttcatattccaaaaatgaaacttaccaactatttttgtcatattcttcaaagaaggaaaaaatgtttctgcatgtgaaaggagaaattcatctgggaagatttgtaatgagaaatcgcgatgttgtgctcacaacaacttttgtggatgatataaaagctttgccaactacctatgaaaagggagaatattttgcctttttggaaacctatggaactcactacagtagctctgggtctctaggaggactctatgaactaatatatgttttggataaagcttccatgaagcggaaaggtgttgaactaaaagacataaagagatgccttgggtatcatctggatgtatctctggctttctctgaaatctctgttggagctgaatttaataaagatgattgtgtaaagaggggagagggtagagctgtaaacatcaccagtgaaaacctcatagatgatgttgtttcactcataagaggtggaaccagaaaatatgcatttgaactgaaagaaaagcttctccgaggaaccgtgattgatgtgactgactttgtcaactgggcctcttccataaatgatgctcctgttctcattagtcaaaaactgtctcctatatataatctggttccagtgaaaatgaaaaatgcacacctaaagaaacaaaacttggaaagagccattgaagactatatcaatgaatttagtgtaagaaaatgccacacatgccaaaatggaggtacagtgattctaatggatggaaagtgtttgtgtgcctgcccattcaaatttgagggaattgcctgtgaaatcagtaaacaaaaaatttctgaaggattgccagccctagagttccccaatgaaaaatagagctgttggcttctctgagctccagtggaagaagaaaacactagtaccttcagatcctacccctgaagataatcttagctgccaagtaaatagcaacatgcttcatgaaaatcctaccaacctctgaagtctcttctctcttaggtctataattttttttttaatttttcttccttaaactcctgtgatgtttccattttttgttccctaatgagaagtcaacagtgaaatacgccagaactgctttatcccacggaaaatgccaatctcttctaaaaaaaaacaaaattaaactaaaaaaaaaaaaaaaaaaaaaaaaaaaaaa

SEQ ID NO: 11423 - DNA, 1266 bp, Homo sapiens
tgttaatgaaagcagattcaaagcaacaccaccaccactgaagtatttttagttatataagattggaactaccaagcatgtggctcctggtcagtgtaattctaatctcacggatatcctctgttgggggagaagcaacattttgtgattttccaaaaataaaccatggaattctatatgatgaagaaaaatataagccattttcccaggttcctacaggggaagttttctattactcctgtgaatataattttgtgtctccttcaaaatcattttggactcgcataacatgcacagaagaaggatggtcaccaacaccaaagtgtctcagactgtgtttctttccttttgtggaaaatggtcattctgaatcttcaggacaaacacatctggaaggtgatactgtgcaaattatttgcaacacaggatacagacttcaaaacaatgagaacaacatttcatgtgtagaacggggctggtccacccctcccaaatgcaggtccactgacacttcctgtgtgaatccgcccacagtacaaaatgcttatatagtgtcgagacagatgagtaaatatccatctggtgagagagtacgttatcaatgtaggagcccttatgaaatgtttggggatgaagaagtgatgtgtttaaatggaaactggacggaaccacctcaatgcaaagattctacgggaaaatgtgggccccctccacctattgacaatggggacattacttcattcccgttgtcagtatatgctccagcttcatcagttgagtaccaatgccagaacttgtatcaacttgagggtaacaagcgaataacatgtagaaatggacaatggtcagaaccaccaaaatgcttacatccgtgtgtaatatcccgagaaattatggaaaattataacatagcattaaggtggacagccaaacagaagctttatttgagaacaggtgaatcagctgaatttgtgtgtaaacggggatatcgtctttcatcacgttctcacacattgcgaacaacatgttgggatgggaaactggagtatccaacttgtgcaaaaagatagaatcaatcataaaatgcacacctttattcagaactttagtattaaatcagttcttaatttaatttttaagtattgttttactcctttttattcatacgtaaaattttggattaatttgtgaaaatgtaattataagctgagaccggtggctctcttcttaaaagcaccatattaaaacttggaaaactggaaaact

SEQ ID NO: 11424 - DNA, 1997 bp, Homo sapiens
aattcctcagtgacccaggagctgacacactatggcgcacgtccgaggcttgcagctgcctggctgcctggccctggctgccctgtgtagccttgtgcacagccagcatgtgttcctggctcctcagcaagcacggtcgctgctccagcgggtccggcgagccaacaccttcttggaggaggtgcgcaagggcaacctagagcgagagtgcgtggaggagacgtgcagctacgaggaggccttcgaggctctggagtcctccacggctacggatgtgttctgggccaagtacacagcttgtgagacagcgaggacgcctcgagataagcttgctgcatgtctggaaggtaactgtgctgagggtctgggtacgaactaccgagggcatgtgaacatcacccggtcaggcattgagtgccagctatggaggagtcgctacccacataagcctgaaatcaactccactacccatcctggggccgacctacaggagaatttctgccgcaaccccgacagcagcaccacgggaccctggtgctacactacagaccccaccgtgaggaggcaggaatgcagcatccctgtctgtggccaggatcaagtcactgtagcgatgactccacgctccgaaggctccagtgtgaatctgtcacctccattggagcagtgtgtccctgatcgggggcagcagtaccaggggcgcctggcggtgaccacacatgggctcccctgcctggcctgggccagcgcacaggccaaggccctgagcaagcaccaggacttcaactcagctgtgcagctggtggagaacttctgccgcaacccagacggggatgaggagggcgtgtggtgctatgtggccgggaagcctggcgactttgggtactgcgacctcaactattgtgaggaggccgtggaggaggagacaggagatgggctggatgaggactcagacagggccatcgaagggcgtaccgccaccagtgagtaccagactttcttcaatccgaggacctttggctcgggagaggcagactgtgggctgcgacctctgttcgagaagaagtcgctggaggacaaaaccgaaagagagctcctggaatcctacatcgacgggcgcattgtggagggctcggatgcagagatcggcatgtcaccttggcaggtgatgcttttccggaagagtccccaggagctgctgtgtggggccagcctcatcagtgaccgctgggtcctcaccgccgcccactgcctcctgtacccgccctgggacaagaacttcaccgagaatgaccttctggtgcgcattggcaagcactcccgcacaaggtacgagcgaaacattgaaaagatatccatgttggaaaagatctacatccaccccaggtacaactggcgggagaacctggaccgggacattgccctgatgaagctgaagaagcctgttgccttcagtgactacattcaccctgtgtgtctgcccgacagggagacggcagccagcttgctccaggctggatacaaggggcgggtgacaggctggggcaacctgaaggagacgtggacagccaacgttggtaaggggcagcccagtgtcctgcaggtggtgaacctgcccattgtggagcggccggtctgcaaggactccacccggatccgcatcactgacaacatgttctgtgctggttacaagcctgatgaagggaaacgaggggatgcctgtgaaggtgacagtgggggaccctttgtcatgaagagcccctttaacaaccgctggtatcaaatgggcatcgtctcatggggtgaaggctgtgaccgggatgggaaatatggcttctacacacatgtgttccgcctgaagaagtggatacagaaggtcattgatcagtttggagagtaggggccactcatattctgggctcctggaaccaatcccgtgaaagaattatttttgtgtttctaaaactatggttcccaataaaagtgactctcagcgg

SEQ ID NO: 11425 - DNA, 2164 bp, Homo sapiens
ataaatatcagagtgtgctgctgtggctttgtggagctgccagagtaaagcaaagagaaaggaagcaggcccgttggaagtggttgtgacaaccccagcaatgtggagaagcctggggcttgccctggctctctgtctcctcccatcgggaggaacagagagccaggaccaaagctccttatgtaagcaacccccagcctggagcataagagatcaagatccaatgctaaactccaatggttcagtgactgtggttgctcttcttcaagccagctgatacctgtgcatactgcaggcatctaaattagaagacctgcgagtaaaactgaagaaagaaggatattctaatatttcttatattgttgttaatcatcaaggaatctcttctcgattaaaatacacacatcttaagaataaggtttcagagcatattcctgtttatcaacaagaagaaaaccaaacagatgtctggactcttttaaatggaagcaaagatgacttcctcatatatgatagatgtggccgtcttgtatatcatcttggtttgcctttttccttcctaactttcccatatgtagaagaagccattaagattgcttactgtgaaaagaaatgtggaaactgctctctcacgactctcaaagatgaagacttttgtaaacgtgtatctttggctactgtggataaaacagttgaaactccatcgcctcattaccatcatgagcatcatcacaatcatggacatcagcaccttggcagcagtgagctttcagagaatcagcaaccaggagcaccaaatgctcctactcatcctgctcctccaggccttcatcaccaccataagcacaagggtcagcataggcagggtcacccagagaaccgagatatgccagcaagtgaagatttacaagatttacaaaagaagctctgtcgaaagagatgtataaatcaattactctgtaaattgcccacagattcagagttggctcctaggagctgatgctgccattgtcgacatctgatatttgaaaaaacagggtctgcaatcacctgacagtgtaaagaaaacctcccatctttatgtagctgacagggacttcgggcagaggagaacataactgaatcttgtcagtgacgtttgcctccagctgcctgacaaataagtcagcagcttatacccacagaagccagtgccagttgacgctgaaagaatcaggcaaaaaagtgagaatgaccttcaaactaaatatttaaaataggacatactccccaatttagtctagacacaatttcatttccagcatttttataaactaccaaattagtgaaccaaaaatagaaattagatttgtgcaaacatggagaaatctactgaattggcttccagattttaaattttatgtcatagaaatattgactcaaaccatattttttatgatggagcaactgaaaggtgattgcagcttttggttaatatgtctttttttttctttttccagtgttctatttgctttaatgagaatagaaacgtaaactatgacctaggggtttctgttggataattagcagtttagaatggaggaagaacaacaaagacatgctttccatttttttctttacttatctctcaaaacaatattactttgtcttttcaatcttctacttttaactaataaaataagtggattttgtattttaagatccagaaatacttaacacgtgaatattttgctaaaaaagcatatataactattttaaatatccatttatcttttgtatatctaagactcatcctgatttttactatcacacatgaataaagcctttgtatctttctttctctaatgttgtatcatactcttctaaaacttgagtggctgtcttaaaagatataaggggaaagataatattgtctgtctctatattgcttagtaagtatttccatagtcaatgatggtttaataggtaaaccaaaccctataaacctgacctcctttatggttaatactattaagcaagaatgcagtacagaattggatacagtacggatttgtccaaataaattcaataaaaaccttaaagctgaaaaaaaaaaaaaaaaaaaaaaaaaaaaaaaaaaaaaaaaaaaaaaaaaaaaaaaaaaaaaaaaaaaaaaaaaaaaaaa

SEQ ID NO: 11426 - DNA, 2256 bp, Homo sapiens
tgaaattcagggactctttggtggagcaattaccagtcaacttcagggtattatgataaactctgatctggggaggaaccaggactacatagatcaaggcagttttcttctttgagaaactatcccagatatcatcatagagtcttctgctcttcctcaactaccaaagaaaaacatcagcgaagcagcaggccatgcaccccccaaaaactccatctggggctcttcatagaaaaaggaaaatggcagcctggcccttctccaggctgtggaaagtctctgatccaattctcttccaaatgaccttgatcgctgctctgttgcctgctgttcttggcaattgtggtcctccacccactttatcatttgctgccccgatggatattacgttgactgagacacgcttcaaaactggaactactctgaaatacacctgcctccctggctacgtcagatcccattcaactcagacgcttacctgtaattctgatggcgaatgggtgtataacaccttctgtatctacaaacgatgcagacacccaggagagttacgtaatgggcaagtagagattaagacagatttatcttttggatcacaaatagaattcagctgttcagaaggatttttcttaattggctcaaccactagtcgttgtgaagtccaagatagaggagttggctggagtcatcctctcccacaatgtgaaattgtcaagtgtaagcctcctccagacatcaggaatggaaggcacagcggtgaagaaaatttctacgcatacggcttttctgtcacctacagctgtgacccccgcttctcactcttgggccatgcctccatttcttgcactgtggagaatgaaacaataggtgtttggagaccaagccctcctacctgtgaaaaaatcacctgtcgcaagccagatgtttcacatggggaaatggtctctggatttggacccatctataattacaaagacactattgtgtttaagtgccaaaaaggttttgttctcagaggcagcagtgtaattcattgtgatgctgatagcaaatggaatccttctcctcctgcttgtgagcccaatagttgtattaatttaccagacattccacatgcttcctgggaaacatatcctaggccgacaaaagaggatgtgtatgttgttgggactgtgttaaggtaccgctgtcatcctggctacaaacccactacagatgagcctacgactgtgatttgtcagaaaaatttgagatggaccccataccaaggatgtgaggcgttatgttgccctgaaccaaagctaaataatggtgaaatcactcaacacaggaaaagtcgtcctgccaatcactgtgtttatttctatggagatgagatttcattttcatgtcatgagaccagtaggttttcagctatatgccaaggagatggcacgtggagtccccgaacaccatcatgtggagacatttgcaattttcctcctaaaattgcccatgggcattataaacaatctagttcatacagctttttcaaagaagagattatatatgaatgtgataaaggctacattctggtcggacaggcgaaactctcctgcagttattcacactggtcagctccagcccctcaatgtaaagctctgtgtcggaaaccagaattagtgaatggaaggttgtctgtggataaggatcagtatgttgagcctgaaaatgtcaccatccaatgtgattctggctatggtgtggttggtccccaaagtatcacttgctctgggaacagaacctggtacccagaggtgcccaagtgtgagtgggagacccccgaaggctgtgaacaagtgctcacaggcaaaagactcatgcagtgtctcccaaacccagaggatgtgaaaatggccctggaggtatataagctgtctctggaaattgaacaactggaactacagagagacagcgcaagacaatccactttggataaagaactataatttttctcaaaagaaggaggaaaaggtgtcttgctggcttgcctcttgcaattcaatacagatcagtttagcaaatctactgtcaatttggcagtgatattcatcataataaatatctagaaatgataatttgctaaagtttagtgctttgagattgtgaaattattaatcatcctctgtgtggctcatgtttttgcttttcaacacacaaagcacaaattttttttcgattaaaaatgtatgtataaaaaactaaaaaaaaaaaaaa

SEQ ID NO: 11427 - DNA, 1559 bp, Homo sapiens
attaacttccttccaaaatgtcaccattcctgtacctggttctcttggtacttgggcttcatgctacaatccactgtgcatcacctgaaggcaaagtaacagcctgccattcatcccaaccaaatgccactctctacaagatgtcatccattaatgctgactttgcattcaatctgtaccggaggttcactgtggagaccccagataagaacatcttcttttcccctgtgagcatttctgcagctttggttatgctttcctttggggcctgctgcagcacccaaactgagattgtggagaccttggggttcaacctcacagacactccaatggtagagatccagcatggcttccagcatctgatctgttcactgaattttccaaagaaggaactggaattgcagataggaaatgccctcttcattggcaagcatctgaaaccactggcaaagttcttgaatgatgtcaagaccctctatgagactgaagtcttttctaccgacttctccaacatttctgcagccaagcaggagattaacagtcatgtggagatgcaaaccaaagggaaagttgtgggtctaattcaagacctcaagccaaacaccactatggtcttagtgaactatattcactttaaagcccagtgggcaaatccttttgatccatccaagacagaagacagttccagcttcttaatagacaagaccaccactgttcaagtgcccatgatgcaccagatggaacaatactatcacctagtggatatggaattgaactgcacagttctgcaaatggactacagcaagaatgctctggcactctttgttcttcccaaggagggacagatggagtcagtggaagctgccatgtcatctaaaacactgaagaagtggaaccgcttactacagaagggatgggttgacttgtttgttccaaagttttccatttctgccacatatgaccttggagccacacttttgaagatgggcattcagcatgcctattctgaaaatgctgatttttctggactcacagaggacaatggtctgaaactttccaatgctgcccataaggctgtgctgcacattggtgaaaagggaactgaagctgcagctgtccctgaagttgaactttcggatcagcctgaaaacactttcctacaccctattatccaaattgatagatctttcatgttgttgattttggagagaagcacaaggagtattctctttctagggaaagttgtgaacccaacggaagcgtagttgggaaaaaggccattggctaattgcacgtgtgtattgcaatgggaaataaataaataatatagcctggtgtgattgatgtgagcttggacttgcattcccttatgatgggatgaagattgaaccctggctgaactttgttggctgtggaagaggccaatcctatggcagagcattcagaatgtcaatgagtaattcattattatccaaagcataggaaggctctatgtttgtatatttctctttgtcagaatacccctcaactcatttgctctaataaatttgactgggttg

SEQ ID NO: 11428 - DNA, 1043 bp, Homo sapiens
tgttaatgaaagcagattcaaagcaacaccaccaccactgaagtatttttagttatataagattggaactaccaagcatgtggctcctggtcagtgtaattctaatctcacggatatcctctgttgggggagaagcaatgttctgtgattttccaaaaataaaccatggaattctatatgatgaagaaaaatataagccattttcccaagttcctacaggggaagttttctattactcctgtgaatataattttgtgtctccttcaaaatccttttggactcgcataacgtgcgcagaagaaggatggtcaccaacaccaaagtgtctcagactgtgtttctttccttttgtggaaaatggtcattctgaatcttcaggacaaacacatctggaaggtgatactgtacaaattatttgcaacacaggatacagacttcaaaacaatgagaacaacatttcatgtgtagaacggggctggtccactcctcccaaatgcaggtccactatttctgcagaaaaatgtgggccccctccacctattgacaatggagacattacttcattcctgttgtcagtatatgctccaggttcatcagttgagtaccagtgccagaacttgtatcaacttgagggtaacaatcaaataacatgtagaaacggacaatggtcagaaccaccaaaatgcttagatccatgtgtaatatcacaagaaattatggaaaaatataacataaaattaaagtggacaaaccaacaaaagctttattcaagaacaggtgacatagttgaatttgtttgtaaatctggatatcatccaacaaaatctcattcatttcgagcaatgtgtcagaatgggaaactggtatatcccagttgtgaagaaaaatagaatcaatggcattactattagtaaaatgcacacctttttctgaatttactattatatttgttttcaatttcatttttcaagtactgttttactcatttttattcataaataaagttttgtgttgatttgtgaaaatgcaattacaagagccaa

SEQ ID NO: 11429 - DNA, 1665 bp, Homo sapiens
cttctggtaaggaggccccgtgatcagctccagccatttgcagtcctggctatcccaggagcttacataaagggacaattggagcctgagaggtgacagtgctgacactacaaggctcggagctccgggcactcagacatcatgagttggtccttgcacccccggaatttaattctctacttctatgctcttttatttctctcttcaacatgtgtagcatatgttgctaccagagacaactgctgcatcttagatgaaagattcggtagttattgtccaactacctgtggcattgcagatttcctgtctacttatcaaaccaaagtagacaaggatctacagtctttggaagacatcttacatcaagttgaaaacaaaacatcagaagtcaaacagctgataaaagcaatccaactcacttataatcctgatgaatcatcaaaaccaaatatgatagacgctgctactttgaagtccaggaaaatgttagaagaaattatgaaatatgaagcatcgattttaacacatgactcaagtattcgatatttgcaggaaatatataattcaaataatcaaaagattgttaacctgaaagagaaggtagcccagcttgaagcacagtgccaggaaccttgcaaagacacggtgcaaatccatgatatcactgggaaagattgtcaagacattgccaataagggagctaaacagagcgggctttactttattaaacctctgaaagctaaccagcaattcttagtctactgtgaaatcgatgggtctggaaatggatggactgtgtttcagaagagacttgatggcagtgtagatttcaagaaaaactggattcaatataaagaaggatttggacatctgtctcctactggcacaacagaattttggctgggaaatgagaagattcatttgataagcacacagtctgccatcccatatgcattaagagtggaactggaagactggaatggcagaaccagtactgcagactatgccatgttcaaggtgggacctgaagctgacaagtaccgcctaacatatgcctacttcgctggtggggatgctggagatgcctttgatggctttgattttggcgatgatcctagtgacaagtttttcacatcccataatggcatgcagttcagtacctgggacaatgacaatgataagtttgaaggcaactgtgctgaacaggatggatctggttggtggatgaacaagtgtcacgctggccatctcaatggagtttattaccaaggtggcacttactcaaaagcatctactcctaatggttatgataatggcattatttgggccacttggaaaacccggtggtattccatgaagaaaaccactatgaagataatcccattcaacagactcacaattggagaaggacagcaacaccacctggggggagccaaacaggctggagacgtttaaaagaccgtttcaaaagagatttacttttttaaaggactttatctgaacagagagatataatatttttcctattggacaatggacttgcaaagcttcacttcattttaagagcaaaagaccccatgttgaaaactccataacagttttatgctgatgataatttatctacatgcatttcaataaaccttttgtttcctaagactagaaaaa

SEQ ID NO: 11430 - DNA, 1763 bp, Homo sapiens
cttctggtaaggaggccccgtgatcagctccagccatttgcagtcctggctatcccaggagcttacataaagggacaattggagcctgagaggtgacagtgctgacactacaaggctcggagctccgggcactcagacatcatgagttggtccttgcacccccggaatttaattctctacttctatgctcttttatttctctcttcaacatgtgtagcatatgttgctaccagagacaactgctgcatcttagatgaaagattcggtagttattgtccaactacctgtggcattgcagatttcctgtctacttatcaaaccaaagtagacaaggatctacagtctttggaagacatcttacatcaagttgaaaacaaaacatcagaagtcaaacagctgataaaagcaatccaactcacttataatcctgatgaatcatcaaaaccaaatatgatagacgctgctactttgaagtccaggaaaatgttagaagaaattatgaaatatgaagcatcgattttaacacatgactcaagtattcgatatttgcaggaaatatataattcaaataatcaaaagattgttaacctgaaagagaaggtagcccagcttgaagcacagtgccaggaaccttgcaaagacacggtgcaaatccatgatatcactgggaaagattgtcaagacattgccaataagggagctaaacagagcgggctttactttattaaacctctgaaagctaaccagcaattcttagtctactgtgaaatcgatgggtctggaaatggatggactgtgtttcagaagagacttgatggcagtgtagatttcaagaaaaactggattcaatataaagaaggatttggacatctgtctcctactggcacaacagaattttggctgggaaatgagaagattcatttgataagcacacagtctgccatcccatatgcattaagagtggaactggaagactggaatggcagaaccagtactgcagactatgccatgttcaaggtgggacctgaagctgacaagtaccgcctaacatatgcctacttcgctggtggggatgctggagatgcctttgatggctttgattttggcgatgatcctagtgacaagtttttcacatcccataatggcatgcagttcagtacctgggacaatgacaatgataagtttgaaggcaactgtgctgaacaggatggatctggttggtggatgaacaagtgtcacgctggccatctcaatggagtttattaccaaggtggcacttactcaaaagcatctactcctaatggttatgataatggcattatttgggccacttggaaaacccggtggtattccatgaagaaaaccactatgaagataatcccattcaacagactcacaattggagaaggacagcaacaccacctggggggagccaaacaggtcagaccagagcaccctgcggaaacagaatatgactcactttaccctgaggatgatttgtagaaaattaactgctaacttctattgacccacaaagtttcagaaattctctgaaagtttcttccttttttctcttactatatttattgatttcaagtcttctattaaggacatttagccttcaatggaaattaaaactcatttaggactgtatttccaaattactgatatcagagttatttaaaaattgtttatttgaggagataacatttcaactttgttcctaaatatataataataaaatgattgactttatttgcaaa

SEQ ID NO: 11431 - DNA, 790 bp, Homo sapiens
agagtggactgagcagccagtaggggagagagcagttaaggcacacagagcaccagctccctcctgcctgaagatgttccaccaaatttgggcagctctgctctacttctatggtattatccttaactccatctaccagtgccctgagcacagtcaactgacaactctgggcgtggatgggaaggagttcccagaggtccacttgggccagtggtactttatcgcaggggcagctcccaccaaggaggagttggcaacttttgaccctgtggacaacattgtcttcaatatggctgctggctctgccccgatgcagctccaccttcgtgctaccatccgcatgaaagatgggctctgtgtgccccggaaatggatctaccacctgactgaagggagcacagatctcagaactgaaggccgccctgacatgaagactgagctcttttccagctcatgcccaggtggaatcatgctgaatgagacaggccagggttaccagcgctttctcctctacaatcgctcaccacatcctcccgaaaagtgtgtggaggaattcaagtccctgacttcctgcctggactccaaagccttcttattgactcctaggaatcaagaggcctgtgagctgtccaataactgacctgtaacttcatctaagtccccagatgggtacaatgggagctgagttgttggagggagaagctggagacttccagctccagctcccactcaagataataaagataatttttcaatcctcaaaaaaaaaaaaaaaaaaaaaaaaaaaaaa

SEQ ID NO: 11432 - DNA, 959 bp, Homo sapiens
gggcatgaatatcagacgctagggggacagccactgtgttgtctgctaccctcatcctggtcactgcttctgctataacagccctaggccaggaatatgaacaagccgctgctttggatctctgtcctcaccagcctcctggaagcctttgctcacacagacctcagtgggaaggtgtttgtatttcctagagaatctgttactgatcatgtaaacttgatcacaccgctggagaagcctctacagaactttaccttgtgttttcgagcctatagtgatctctctcgtgcctacagcctcttctcctacaatacccaaggcagggataatgagctactagtttataaagaaagagttggagagtatagtctatacattggaagacacaaagttacatccaaagttatcgaaaagttcccggctccagtgcacatctgtgtgagctgggagtcctcatcaggtattgctgaattttggatcaatgggacacctttggtgaaaaagggtctgcgacagggttactttgtggaagctcagcccaagattgtcctggggcaggaacaggattcctatgggggcaagtttgataggagccagtcctttgtgggagagattggggatttgtacatgtgggactctgtgctgcccccagaaaatatcctgtctgcctatcagggtacccctctccctgccaatatcctggactggcaggctctgaactatgaaatcagaggatatgtcatcatcaaacccttggtgtgggtctgaggtcttgactcaacgagagcacttgaaaatgaaatgactgtctaagagatctggtcaaagcaactggatactagatcttacatctgcagtctttcttctttgaatttcctatctgtatgtctgcctaattaaaaaaatatatattgtattatgctacctgcaaaaaaaaaaaaaaaaaaaaaaaaaaaaaa

SEQ ID NO: 11433 - DNA, 3489 bp, Homo sapiens
gtgacctgcttagagagaagcggtgggtctgcacctggattttggagtcccagtgctgctgcagctctgagcattcccacgtcaccagagaagccggtgggcaatgagatcatgtctgctttcaggttgtggcctggcctgctgatcatgttgggttctctctgccatagaggttcaccgtgtggcctttcaacacacgtagaaataggacacagagctctggagtttcttcagcttcacaatgggcgtgttaactacagagagctgttactagaacaccaggatgcgtatcaggctggaatcgtgtttcctgattgtttttaccctagcatctgcaaaggaggaaaattccatgatgtgtctgagagcactcactggactccgtttcttaatgcaagcgttcattatatccgagagaactatccccttccctgggagaaggacacagagaaactggtagctttcttgtttggaattacttctcacatggcggcagatgtcagctggcatagtctgggccttgaacaaggattccttaggaccatgggagctattgattttcacggctcctattcagaggctcattcggctggtgattttggaggagatgtgttgagccagtttgaatttaattttaattaccttgcacgacgctggtatgtgccagtcaaagatctactgggaatttatgagaaactgtatggtcgaaaagtcatcaccgaaaatgtaatcgttgattgttcacatatccagttcttagaaatgtatggtgagatgctagctgtttccaagttatatcccacttactctacaaagtccccgtttttggtggaacaattccaagagtattttcttggaggactggatgatatggcattttggtccactaatatttaccatctaacaagcttcatgttggagaatgggaccagtgactgcaacctgcctgagaaccctctgttcattgcatgtggcggccagcaaaaccacacccagggctcaaaaatgcagaaaaatgattttcacagaaatttgactacatccctaactgaaagtgttgacaggaatataaactatactgaaagaggagtgttctttagtgtaaattcctggaccccggattccatgtcctttatctacaaggctttggaaaggaacataaggacaatgttcataggtggctctcagttgtcacaaaagcacgtctccagccccttagcatcttacttcttgtcatttccttatgcgaggcttggctgggcaatgacctcagctgacctcaaccaggatgggcacggtgacctcgtggtgggcgcaccaggctacagccgccccggccacatccacatcgggcgcgtgtacctcatctacggcaatgacctgggcctgccacctgttgacctggacctggacaaggaggcccacaggatccttgaaggcttccagccctcaggtcggtttggctcggccttggctgtgttggactttaacgtggacggcgtgcctgacctggccgtgggagctccctcggtgggctccgagcagctcacctacaaaggtgccgtgtatgtctactttggttccaaacaaggaggaatgtcttcttcccctaacatcaccatttcttgccaggacatctactgtaacttgggctggactctcttggctgcagatgtgaatggagacagtgaacccgatctggtcatcggctccccttttgcaccaggtggagggaagcagaagggaattgtggctgcgttttattctggccccagcctgagcgacaaagaaaaactgaacgtggaggcagccaactggacggtgagaggcgaggaagacttctcctggtttggatattcccttcacggtgtcactgtggacaacagaaccttgctgttggttgggagcccgacctggaagaatgccagcaggctgggccatttgttacacatccgagatgagaaaaagagccttgggagggtgtatggctacttcccaccaaacggccaaagctggtttaccatttctggagacaaggcaatggggaaactgggtacttccctttccagtggccacgtactgatgaatgggactctgaaacaagtgctgctggttggagcccctacgtacgatgacgtgtctaaggtggcattcctgaccgtgaccctacaccaaggcggagccactcgcatgtacgcactcacatctgacgcgcagcctctgctgctcagcaccttcagcggagaccgccgcttctcccgatttggtggcgttctgcacttgagtgacctggatgatgatggcttagatgaaatcatcatggcagcccccctgaggatagcagatgtaacctctggactgattgggggagaagacggccgagtatatgtatataatggcaaagagaccacccttggtgacatgactggcaaatgcaaatcatggataactccatgtccagaagaaaaggcccaatatgtattgatttctcctgaagccagctcaaggtttgggagctccctcatcaccgtgaggtccaaggcaaagaaccaagtcgtcattgctgctggaaggagttctttgggagcccgactctccggggcacttcacgtctatagccttggctcagattgaagatttcactgcatttccccactctgcccacctctctcatgctgaatcacatccatggtgagcattttgatggacaaagtggcacatccagtggagcggtggtagatcctgatagacatggggctcctgggagtagagagacacactaacagccacaccctctggaaatctgatacagtaaatatatgactgcaccagaaatatgtgaaatagcagacattctgcttactcatgtctccttccacagtttacttcctcgctccctttgcatctaaacctttcttctttcccaacttattgcctgtagtcagacctgctgtacaacctatttcctcttcctcttgaatgtctttccaatggctggaaaggtccctctgtggttatctgttagaacagtctctgtacacaattcctcctaaaaacatccttttttaaaaaaagaattgttcagccataaagaaagaacaagatcatgccctttgcagggacatggatggagctggaggccattatccttcataaactattgcaggaacagaaaaccaaacactccatattctcacttgtaagtgggagctaaatgagaacacgtggacacatagagggaaacaacacacactggggcctatgagagggcggaaggtgggaggagggagagatcaggaaaaataactaatggatacttagggtgatgaaataatctgtgtaacaaacccccatgacacacctttatgtatgtaacaaaccagcacttcctgcgcatgtacccctgaacttaaaagttaaaaaaaagttgaacttaaaaataacagattggcccatgccaatcaaagtataatagaaagcatagtatac

SEQ ID NO: 11434 - DNA, 2208 bp, Homo sapiens
cttattgataacctcagacgttcccaccactgaagatgaggttgaaaaacctgacttttatcatcatattgataatctcaggagaactctatgcagaagagaaaccctgtggttttcctcatgtggaaaatggaagaattgcccaatattactatacttttaaaagcttttactttccaatgagcatagacaaaaaattgtcatttttctgcttggctggttataccactgaaagtggaagacaagaagagcaaaccacgtgtacaacagaaggctggtctccagagccaaggtgcttcaaaaaatgcactaagcctgacctgagtaatggttacatctctgatgtaaagttattgtataaaattcaagagaacatgcattatggttgcgcttcagggtacaaaaccactggagggaaggatgaagaagtggttcaatgtctctctgatggatggtcttctcaaccaacctgtaggaaagaacatgaaacgtgtttggctcctgaattatataatggaaattattccacaacacagaaaacattcaaagtgaaggacaaagtacaatacgaatgtgctactggctactacacagctggaggaaagaagacagaggaggtagaatgtctcacatacggatggtctctcacaccaaaatgtaccaaattaaagtgctcttctttaagattaattgaaaatggttattttcatcctgtaaagcaaacctatgaagaaggagatgtcgttcagtttttctgtcatgaaaattattatctaagtggatctgatttaattcaatgctataactttggttggtacccagaatctcctgtatgcgaaggaagaagaaacagatgtcctcctccacctctgcccataaactccaaaattcaaacacattcaacaacttatcgtcatggagaaatagttcatatagaatgtgaacttaattttgagatccatgggtcagcagaaatacgttgtgaagatggaaaatggacagaacctccaaaatgcattgaaggacaggagaaggtagcctgtgaggaaccacccttcattgaaaatggtgcagcaaatttacactctaagatttattacaatggggataaagtgacatatgcatgtaaaagcggctaccttctccatggatcgaatgagataacttgtaatcgtggaaaatggacacttcctcctgagtgtgttgaaaataatgagaattgtaagcatcctcctgttgtaatgaatggggctgttgcagacgggatattggcaagctatgcaacaggatcctcagtggaatatagatgcaatgaatattacttactgaggggatcaaaaatatctcgttgcgaacaaggaaaatggtcatccccacctgtttgcttggaaccatgtactgttaatgtggattacatgaacagaaataacatagaaatgaagtggaaatatgaagggaaagtcttacatggagatttaatagattttgtatgtaaacagggatatgacttatctccattaaccccattgtctgaattatctgtgcagtgcaacagaggagaagtgaaatatcctttatgtactagaaaagaatctaaaggaatgtgcacatctcctcctcttattaaacatggagtcattattagttcaacagtagacacctatgaaaatggctcttcagtagaatacagatgttttgatcaccatttcctagaaggatctagggaggcctattgtttagatggaatgtggactacaccaccattgtgtttagagccatgcacattatcttttactgaaatggaaaagaataatttacttctgaaatgggattttgacaacagaccacacattttgcatggtgaatatattgagtttatttgtagaggagatacttatccagctgaattatatattactggatctatacttagaatgcaatgtgacagagggcagttaaaatatccaagatgtattccaagacaaagcactctgtcttatcaagaacccttaagaacatagaaatgaatggcagaaagaggagtcatatttcaatacatcatgaaattccttataaaatataattttgaggaaataagttaaaaacttcggagtttttccttgcttaaatatttgaatctaaattatttgtgctgaacatttcattatttataaatgaaaaccaataaatgtctaatttttagtttgt

SEQ ID NO: 11435 - DNA, 2053 bp, Homo sapiens
ggcactcacagcacaggcttgttatgggtctagcagcctctgtggcatctcctgtcacattgggaaaatgaagaattccaggacatgggcttggagggcgccggtggagctatttcttctctgtgctgccctgggctgtctcagtttgcctggctccagaggtgaaaggccacattcctttgggtcaaatgcagtcaacaagagctttgctaagagcagacagatgcggagtgtggatgttaccctgatgcccattgattgtgagctgtctagttggtcctcttggaccacatgtgacccctgtcagaagaaaaggtacaggtatgcctacttgctccagccctctcagttccatggggaaccgtgcaacttctctgacaaggaagtcgaagactgtgttaccaacagaccatgcggaagtcaagtgcgatgtgaaggctttgtgtgtgcacagacaggaaggtgtgtaaaccgcagacttctttgcaatggggacaatgactgtggagaccagtcagatgaagcaaactgtagaaggatttataaaaaatgtcagcatgaaatggaccaatactggggaattggcagtctggccagtgggataaatttgttcacaaacagttttgagggcccagttcttgatcacaggtattatgcaggtggatgctccccgcattacatcctgaacacgaggtttaggaagccctacaatgtggaaagctacacgccacagacccaaggcaaatacgaattcatattaaaagagtatgaatcatactcagattttgaacgcaatgtcacagagaaaatggcaagcaagtctggtttcagttttggttttaaaatacctggaatatttgaacttggcatcagtagtcaaagtgatcgaggcaaacactatattaggagaaccaaacgattctctcatactaaaagcgtatttctgcatgcacgctctgaccttgaagtagcacattacaagctgaaacccagaagcctcatgctccattacgagttccttcagagagttaagcggctgcccctggagtacagctacggggaatacagagatctcttccgtgattttgggacccactacatcacagaggctgtgcttgggggcatttatgaatacaccctcgttatgaacaaagaggccatggagagaggagattatactcttaacaacgtccatgcctgtgccaaaaatgattttaaaattggtggtgccattgaagaggtctacgtcagtctgggtgtgtctgtaggcaaatgcagaggtattctgaatgaaataaaagacagaaacaagagggacaccatggtggaggacttggtggtcctggtacgaggaggggcaagtgagcacatcaccaccctggcataccaggagctgccgacggcggacctgatgcaggagtggggagacgctgtgcagtacaacccagccatcatcaaagttaaggtggagcctctgtatgaactagtgacagccacagattttgcctattccagcacagtgaggcagaacatgaagcaggcactggaggagttccagaaggaagttagttcctgccactgtgctccctgccaaggaaatggagtccctgtcctgaaaggatcacgctgtgactgcatctgtcctgttggatcccaaggcctagcctgtgaggtctcctatcggaagaatacccccattgatgggaagtggaattgctggtcaaattggtcttcatgctctggaagacgtaagacaagacaaaggcagtgtaacaatccacctcctcaaaatgggggtagcccctgttcaggccctgcttcagaaacacttgactgctcctagcagatgatacagcagtgggctacatacaatgagagccctgagccctcaagaactcatgccagctcagccctacaccagtttccacctggagttcatgcaagggcaaaaggcagtgccatgcaagctgtttaaaataaagatgttaccttgtaaaatgcaagttgatttaaataaatactgagttaaaggcttaaaaaaaaaaaaaaaaaa

SEQ ID NO: 11436 - DNA, 2237 bp, Homo sapiens
atgaccttggctgctttcatctctgaagcgccacttctcagaaacacagagctttagctccgccaaaatgaaacactcattaaacgcacttctcattttcctcatcataacatctgcgtggggtgggagcaaaggcccgctggatcagctagagaaaggaggggaaactgctcagtctgcagatccccagtgggagcagttaaataacaaaaacctgagcatgcctcttctccctgccgacttccacaaggaaaacaccgtcaccaacgactggattccagagggggaggaggacgacgactatctggacctggagaagatattcagtgaagacgacgactacatcgacatcgtcgacagtctgtcagtttccccgacagactctgatgtgagtgctgggaacatcctccagctttttcatggcaagagccggatccagcgtcttaacatcctcaacgccaagttcgctttcaacctctaccgagtgctgaaagaccaggtcaacactttcgataacatcttcatagcacccgttggcatttctactgcgatgggtatgatttccttaggtctgaagggagagacccatgaacaagtgcactcgattttgcattttaaagactttgttaatgccagcagcaagtatgaaatcacgaccattcataatctcttccgtaagctgactcatcgcctcttcaggaggaattttgggtacacactgcggtcagtcaatgacctttatatccagaagcagtttccaatcctgcttgacttcaaaactaaagtaagagagtattactttgctgaggcccagatagctgacttctcagaccctgccttcatatcaaaaaccaacaaccacatcatgaagctcaccaagggcctcataaaagatgctctggagaatatagaccctgctacccagatgatgattctcaactgcatctacttcaaaggatcctgggtgaataaattcccagtggaaatgacacacaaccacaacttccggctgaatgagagagaggtagttaaggtttccatgatgcagaccaaggggaacttcctcgcagcaaatgaccaggagctggactgcgacatcctccagctggaatacgtggggggcatcagcatgctaattgtggtcccacacaagatgtctgggatgaagaccctcgaagcgcaactgacaccccgggtggtggagagatggcaaaaaagcatgacaaacagaactcgagaagtgcttctgccgaaattcaagctggagaagaactacaatctagtggagtccctgaagttgatggggatcaggatgctgtttgacaaaaatggcaacatggcaggcatctcagaccaaaggatcgccatcgacctgttcaagcaccaaggcacgatcacagtgaacgaggaaggcacccaagccaccactgtgaccacggtggggttcatgccgctgtccacccaagtccgcttcactgtcgaccgcccctttcttttcctcatctacgagcatcgcaccagctgcctgctcttcatgggaagagtggccaaccccagcaggtcctagaggtggaggtctaggtgtctgaagtgccttgggggcaccctcattttgtttccattccaacaacgagaacagagatgttctggcatcatttacgtagtttacgctaccaatctgaattcgaggcccatatgagaggagcttagaaacgaccaagaagagaggcttgttggaatcaattctgcacaatagcccatgctgtaagctcatagaagtcactgtaactgtagtgtgtctgctgttacctagagggtctcacctccccactcttcacagcaaacctgagcagcgcgtcctaagcacctcccgctccggtgaccccatccttgcacacctgactctgtcactcaagcctttctccaccaggcccctcatctgaataccaagcacagaaatgagtggtgtgactaattccttacctctcccaaggagggtacacaactagcaccattcttgatgtccagggaagaagccacctcaagacatatgaggggtgccctgggctaatgttagggcttaattttctcaaagcctgacctttcaaatccatgatgaatgccatcagtccctcctgctgttgcctccctgtgacctggaggacagtgtgtgccatgtctcccatactagagataaataaatgtagccacatttactgtgaaaaaaaaaaaaaaaa

SEQ ID NO: 11437 - DNA, 2397 bp, Homo sapiens
ttttttttttcatcctactttgttttattgggcgttgattgttacaggtcccagcctgtagacatcttttactccaatttcctgaatagatagctttattccttcaaggtaatatagtgcggtggcttctggctgagatgtttgctgttgttttcttcatcttgtctttgatgacttgtcagcctggggtaactgcacaggagaaggtgaaccagagagtaagacgggcagctacacccgcagcagttacctgccagctgagcaactggtcagagtggacagattgctttccgtgccaggacaaaaagtaccgacaccggagcctcttgcagccaaacaagtttgggggaaccatctgcagtggtgacatctgggatcaagccagctgctccagttctacaacttgtgtaaggcaagcacagtgtggacaggatttccagtgtaaggagacaggtcgctgcctgaaacgccaccttgtgtgtaatggagaccaggactgccttgatggctctgatgaggacgactgtgaagatgtcagggccattgacgaagactgcagccagtatgaaccaattccaggatcacagaaggcagccttggggtacaatatcctgacccaggaagatgctcagagtgtgtacgatgccagttattatgggggccagtgtgagacggtatacaatggggaatggagggagcttcgatatgactccacctgtgaacgtctctactatggagatgatgagaaatactttcggaaaccctacaactttctgaagtaccactttgaagccctggcagatactggaatctcctcagagttttatgataatgcaaatgaccttctttccaaagttaaaaaagacaagtctgactcatttggagtgaccatcggcataggcccagccggcagccctttattggtgggtgtaggtgtatcccactcacaagacacttcattcttgaacgaattaaacaagtataatgagaagaaattcattttcacaagaatcttcacaaaggtgcagactgcacattttaagatgaggaaggatgacattatgctggatgaaggaatgctgcagtcattaatggagcttccagatcagtacaattatggcatgtatgccaagttcatcaatgactatggcacccattacatcacatctggatccatgggtggcatttatgaatatatcctggtgattgacaaagcaaaaatggaatcccttggtattaccagcagagatatcacgacatgttttggaggctccttgggcattcaatatgaagacaaaataaatgttggtggaggtttatcaggagaccattgtaaaaaatttggaggtggcaaaactgaaagggccaggaaggccatggctgtggaagacattatttctcgggtgcgaggtggcagttctggctggagcggtggcttggcacagaacaggagcaccattacataccgttcctgggggaggtcattaaagtataatcctgttgttatcgattttgagatgcagcctatccacgaggtgctgcggcacacaagcctggggcctctggaggccaagcgccagaacctgcgccgcgccttggaccagtatctgatggaattcaatgcctgccgatgtgggccttgcttcaacaatggggtgcccatcctcgagggcaccagctgcaggtgccagtgccgcctgggtagcttgggtgctgcctgtgagcaaacacagacagaaggagccaaagcagatgggagctggagttgctggagctcctggtctgtatgcagagcaggcatccaggaaaggagaagagagtgtgacaatccagcacctcagaatggaggggcctcgtgtccagggcggaaagtacagacgcaggcttgctgagggcctctggacacaggctggaccagatgctgtggatgtcgacccctgcactgactattggataaagacttctttcaactaagagaagatgcaaatcagcacacttttttctttgttctgccagcttccaggcctaagactaggttttgctgtctacagccaactattctattagttacaaaactcaatcattttattcagcaactggatgttgactgttaactagaagctctgtcctacttacagcactttggatcatcaaaaaaataaagtaaaatagaaaactgagaaaactcaatccatgaccagggagaacttacaggatgttagagacaaaacaagcagacacctgaaacaatcaacgcccaataaaacaaagtaggatgaaaattctcttagttctttgataacaatttgttcactcatagaaacattattaattggtagggtaagcagacactctgaaacaatgagaaaaatactaaaaattgacttgagttatttc

SEQ ID NO: 11438 - DNA, 1131 bp, Homo sapiens
attcccagaaaccaggaaatttctgaaactgagttttaaacctggcaactcttttaccatccctttgtatttttgcagttcctccctataccagcttccttacagctgttctgatttcctgtcgtaagattttttcttttcattttctccagggagggtaaatcaatataacctcttctctagagaggaggtggttaggttggtcttaagcagtgttagaagatctattttttttcaaaccaggtgtctgagctgggtgaattccagcctggggagaggactttgatcaccagatgtttttttggtgtgcgtgctgtcttatggttgcgtggcgagtttctgcttcagatgcagagcactgtccagagcttcctccagtggacaatagcatatttgtcgcaaaggaggtggaaggacagattctggggacttacgtttgtatcaagggctaccacctggtaggaaagaagacccttttttgcaatgcctctaaggagtgggataacaccactactgagtgccgcttgggccactgtcctgatcctgtgctggtgaatggagagttcagttcttcagggcctgtgaatgtaagtgacaaaatcacgtttatgtgcaatgaccactacatcctcaagggcagcaatcggagccagtgtctagaggaccacacctgggcacctccctttcccatctgcaaaagtagggactgtgaccctcctgggaatccagttcatggctattttgaaggaaataacttcaccttaggatccaccattagttattactgtgaagacaggtactacttagtgggcgtgcaggagcagcaatgcgttgatggggagtggagcagtgcacttccagtctgcaagttgatccaggaagctcccaaaccagagtgtgagaaggcacttcttgcctttcaggagagtaagaacctctgcgaagccatggagaactttatgcaacaattaaaggaaagtggcatgacaatggaggagctaaaatattctctggagctgaagaaagctgagttgaaggcaaaattgttgtaacactacagctgagcagatgtaatagaaataaacctatgaataaattttcttcttggttctgaaaaaaaaaaaaaaaaaa

SEQ ID NO: 11439 - DNA, 1354 bp, Homo sapiens
ccagggctggaatggggccgcccggctccccatggcagtgggtgacgctgctgctggggctgctgctccctcctgccgcccccttctggctcctcaatgtgctcttccccccgcacaccacgcccaaggctgagctcagtaaccacacacggcccgtcatcctcgtgcccggctgcctggggaatcagctagaagccaagctggacaaaccagatgtggtgaactggatgtgctaccgcaagacagaggacttcttcaccatctggctggatctcaacatgttcctaccccttggggtagactgctggatcgataacaccagggttgtctacaaccggagctctgggctcgtgtccaacgcccctggtgtccagatccgcgtccctggctttggcaagacctactctgtggagtacctggacagcagcaagctggcagggtacctgcacacactggtgcagaacctggtcaacaatggctacgtgcgggacgagactgtgcgcgccgccccctatgactggcggctggagcccggccagcaggaggagtactaccgcaagctcgcagggctggtggaggagatgcacgctgcctatgggaagcctgtcttcctcattggccacagcctcggctgtctacacttgctctatttcctgctgcgccagccccaggcctggaaggaccgctttattgatggcttcatctctcttggggctccctggggtggctccatcaagcccatgctggtcttggcctcaggtgacaaccagggcatccccatcatgtccagcatcaagctgaaagaggagcagcgcataaccaccacctccccctggatgtttccctctcgcatggcgtggcctgaggaccacgtgttcatttccacacccagcttcaactacacaggccgtgacttccaacgcttctttgcagacctgcactttgaggaaggctggtacatgtggctgcagtcacgtgacctcctggcaggactcccagcacctggtgtggaagtatactgtctttacggcgtgggcctgcccacgccccgcacctacatctacgaccacggcttcccctacacggaccctgtgggtgtgctctatgaggatggtgatgacacggtggcgacccgcagcaccgagctctgtggcctgtggcagggccgccagccacagcctgtgcacctgctgcccctgcacgggatacagcatctcaacatggtcttcagcaacctgaccctggagcacatcaatgccatcctgctgggtgcctaccgccagggtccccctgcatccccgactgccagcccagagcccccgcctcctgaataaagaccttcctttgctaccgt

SEQ ID NO: 11440 - DNA, 1640 bp, Homo sapiens
gttgtaacaaaaccgctcaagtctgccttaaagagccttacaagccagccagtccctgcagctccacaaactgacccatcctgggccttgttctccacagaatgggtctgctccttcccctggcactctgcatcctagtcctgtgctgcggagcaatgtctccaccccagctggccctcaacccctcggctctgctctcccggggctgcaatgactcagatgtgctggcagttgcaggctttgccctgcgggatattaacaaagacagaaaggatggctatgtgctgagactcaaccgagtgaacgacgcccaggaatacagacggggtggcctgggatctctgttctatcttacactggatgtgctagagactgactgccatgtgctcagaaagaaggcatggcaagactgtggaatgaggatattttttgaatcagtttatggtcaatgcaaagcaatattttatatgaacaacccaagtagagttctctatttagctgcttataactgtactcttcgcccagtttcaaaaaaaaagatttacatgacgtgccctgactgcccaagctccatacccactgactcttccaatcaccaagtgctggaggctgccaccgagtctcttgcgaaatacaacaatgagaacacatccaagcagtattctctcttcaaagtcaccagggcttctagccagtgggtggtcggcccttcttactttgtggaatacttaattaaagaatcaccatgtactaaatcccaggccagcagctgttcacttcagtcctccgactctgtgcctgttggtctttgcaaaggttctctgactcgaacacactgggaaaagtttgtctctgtgacttgtgacttctttgaatcacaggctccagccactggaagtgaaaactctgctgttaaccagaaacctacaaaccttcccaaggtggaagaatcccagcagaaaaacacccccccaacagactccccctccaaagctgggccaagaggatctgtccaatatcttcctgacttggatgataaaaattcccaggaaaagggccctcaggaggcctttcctgtgcatctggacctaaccacgaatccccagggagaaaccctggatatttccttcctcttcctggagcctatggaggagaagctggtggtcctgcctttccccaaagaaaaagcacgcactgctgagtgcccagggccagcccagaatgccagccctcttgtccttccgccatgagaatcacacagagtcttctgtaggggtatggtgcgccgcatgacatgggaggcgatggggacgatggacagagacagagcgtgcacacgtagagtggctagtgaaggacgcctttttgactcttcttggtctcagcatgttgactgggattggaaataatgagactgagccctcggcttgggctgcactctaccctgtacactgccttgtaccctgagctgcatcacctcctaaactgagcagtctcataccatggagagatgcctctcttatgtcttcagccactcacttataaagatacttatcttttcagcagtatatatgtgctgaaatctcagcatgaaagcattgcatgagtaaagatactttccctaacaaaaaaaaaaaaaa

SEQ ID NO: 11441 - DNA, 1723 bp, Homo sapiens
gttgtacagaaaattgctgttgggatgaagctttgcagccttgcagtccttgtacccattgttctcttctgtgagcagcatgtcttcgcgtttcagagtggccaagttctagctgctcttcctagaacctctaggcaagttcaagttctacagaatcttactacaacatatgagattgttctctggcagccggtaacagctgaccttattgtgaagaaaaaacaagtccatttttttgtaaatgcatctgatgtcgacaatgtgaaagcccatttaaatgtgagcggaattccatgcagtgtcttgctggcagacgtggaagatcttattcaacagcagatttccaacgacacagtcagcccccgagcctccgcatcgtactatgaacagtatcactcactaaatgaaatctattcttggatagaatttataactgagaggcatcctgatatgcttacaaaaatccacattggatcctcatttgagaagtacccactctatgttttaaaggtttctggaaaagaacaaacagccaaaaatgccatatggattgactgtggaatccatgccagagaatggatctctcctgctttctgcttgtggttcataggccatataactcaattctatgggataatagggcaatataccaatctcctgaggcttgtggatttctatgttatgccggtggttaatgtggacggttatgactactcatggaaaaagaatcgaatgtggagaaagaaccgttctttctatgcgaacaatcattgcatcggaacagacctgaataggaactttgcttccaaacactggtgtgaggaaggtgcatccagttcctcatgctcggaaacctactgtggactttatcctgagtcagaaccagaagtgaaggcagtggctagtttcttgagaagaaatatcaaccagattaaagcatacatcagcatgcattcatactcccagcatatagtgtttccatattcctatacacgaagtaaaagcaaagaccatgaggaactgtctctagtagccagtgaagcagttcgtgctattgagaaaactagtaaaaataccaggtatacacatggccatggctcagaaaccttatacctagctcctggaggtggggacgattggatctatgatttgggcatcaaatattcgtttacaattgaacttcgagatacgggcacatacggattcttgctgccggagcgttacatcaaacccacctgtagagaagcttttgccgctgtctctaaaatagcttggcatgtcattaggaatgtttaatgcccctgattttatcattctgcttccgtattttaatttactgattccagcaagaccaaatcattgtatcagattatttttaagttttatccgtagttttgataaaagattttcctattccttggttctgtcagagaacctaataagtgctactttgccattaaggcagactagggttcatgtctttttaccctttaaaaaaaattgtaaaagtctagttacctactttttctttgattttcgacgtttgactagccatctcaagcaactttcgacgtttgactagccatctcaagcaagtttaatcaaagatcatctcacgctgatcattggatcctactcaacaaaaggaagggtggtcagaagtacattaaagatttctgctccaaattttcaataaatttctgcttgtgcctttagaaataca

SEQ ID NO: 11442 - DNA, 1560 bp, Homo sapiens
gttgtacagaaaattgctgttgggatgaagctttgcagccttgcagtccttgtacccattgttctcttctgtgagcagcatgtcttcgcgtttcagagtggccaagttctagctgctcttcctagaacctctaggcaagttcaagttctacagaatcttactacaacatatgagattgttctctggcagccggtaacagctgaccttattgtgaagaaaaaacaagtccatttttttgtaaatgcatctgatgtcgacaatgtgaaagcccatttaaatgtgagcggaattccatgcagtgtcttgctggcagatgtggaagatcttattcaacagcagatttccaacgacacagtcagcccccgagcctccgcatcgtactatgaacagtatcactcactaaatgaaatctattcttggatagaatttataactgagaggcatcctgatatgcttacaaaaatccacattggatcctcatttgagaagtacccactctatgttttaaaggtttctggaaaagaacaagcagccaaaaatgccatatggattgactgtggaatccatgccagagaatggatctctcctgctttctgcttgtggttcataggccataatcgaatgtggagaaagaaccgttctttctatgcgaacaatcattgcatcggaacagacctgaataggaactttgcttccaaacactggtgtgaggaaggtgcatccagttcctcatgctcggaaacctactgtggactttatcctgagtcagaaccagaagtgaaggcagtggctagtttcttgagaagaaatatcaaccagattaaagcatacatcagcatgcattcatactcccagcatatagtgtttccatattcctatacacgaagtaaaagcaaagaccatgaggaactgtctctagtagccagtgaagcagttcgtgctattgagaaaattagtaaaaataccaggtatacacatggccatggctcagaaaccttatacctagctcctggaggtggggacgattggatctatgatttgggcatcaaatattcgtttacatcaaacccacctgtagagaagcttttgccgctgtctctaaaatagcttggcatgtcattaggaatgtttaatgcccctgattttatcattctgcttccgtattttaatttactgattccagcaagaccaaatcattgtatcagattatttttaagttttatccgtagttttgataaaagattttcctattccttggttctgtcagagaacctaataagtgctactttgccattaaggcagactagggttcatgtctttttaccctttaaaaaaaattgtaaaagtctagttacctactttttctttgattttcgacgtttgactagccatctcaagcaactttcgacgtttgactagccatctcaagcaagtttaatcaaagatcatctcacgctgatcattggatcctactcaacaaaaggaagggtggtcagaagtacattaaagatttctgctccaaattttcaataaatttctgcttgtgcctttagaaataca

SEQ ID NO: 11443 - DNA, 2526 bp, Homo sapiens
gcacacagtgcacgaagacgctgtcgggagagcccaggattcaacacgggccttgagaaatgtggctcttgtacctcctggtgccggccctgttctgcagggcaggaggctccattcccatccctcagaagttatttggggaggtgacttcccctctgttccccaagccttaccccaacaactttgaaacaaccactgtgatcacagtccccacgggatacagggtgaagctcgtcttccagcagtttgacctggagccttctgaaggctgcttctatgattatgtcaagatctctgctgataagaaaagcctggggaggttctgtgggcaactgggttctccactgggcaaccccccgggaaagaaggaatttatgtcccaagggaacaagatgctgctgaccttccacacagacttctccaacgaggagaatgggaccatcatgttctacaagggcttcctggcctactaccaagctgtggaccttgatgaatgtgcttcccggagcaaattaggggaggaggatccccagccccagtgccagcacctgtgtcacaactacgttggaggctacttctgttcctgccgtccaggctatgagcttcaggaagacaggcattcctgccaggctgagtgcagcagcgagctgtacacggaggcatcaggctacatctccagcctggagtaccctcggtcctacccccctgacctgcgctgcaactacagcatccgggtggagcggggcctcaccctgcacctcaagttcctggagccttttgatattgatgaccaccagcaagtacactgcccctatgaccagctacagatctatgccaacgggaagaacattggcgagttctgtgggaagcaaaggccccccgacctcgacaccagcagcaatgctgtggatctgctgttcttcacagatgagtcgggggacagccggggctggaagctgcgctacaccaccgagatcatcaagtgcccccagcccaagaccctagacgagttcaccatcatccagaacctgcagcctcagtaccagttccgtgactacttcattgctacctgcaagcaaggctaccagctcatagaggggaaccaggtgctgcattccttcacagctgtctgccaggatgatggcacgtggcatcgtgccatgcccagatgcaagatcaaggactgtgggcagccccgaaacctgcctaatggtgacttccgttacaccaccacaatgggagtgaacacctacaaggcccgtatccagtactactgccatgagccatattacaagatgcagaccagagctggcagcagggagtctgagcaaggggtgtacacctgcacagcacagggcatttggaagaatgaacagaagggagagaagattcctcggtgcttgccagtgtgtgggaagcccgtgaaccccgtggaacagaggcagcgcatcatcggagggcaaaaagccaagatgggcaacttcccctggcaggtgttcaccaacatccacgggcgcgggggcggggccctgctgggcgaccgctggatcctcacagctgcccacaccctgtatcccaaggaacacgaagcgcaaagcaacgcctctttggatgtgttcctgggccacacaaatgtggaagagctcatgaagctaggaaatcaccccatccgcagggtcagcgtccacccggactaccgtcaggatgagtcctacaattttgagggggacatcgccctgctggagctggaaaatagtgtcaccctgggtcccaacctcctccccatctgcctccctgacaacgataccttctacgacctgggcttgatgggctatgtcagtggcttcggggtcatggaggagaagattgctcatgacctcaggtttgtccgtctgcccgtagctaatccacaggcctgtgagaactggctccggggaaagaataggatggatgtgttctctcaaaacatgttctgtgctggacacccatctctaaagcaggacgcctgccagggggatagtgggggcgtttttgcagtaagggacccgaacactgatcgctgggtggccacgggcatcgtgtcctggggcatcgggtgcagcaggggctatggcttctacaccaaagtgctcaactacgtggactggatcaagaaagagatggaggaggaggactgagcccagaattcactaggttcgaatccagagagcagtgtggaaaaaaaaaaacaaaaaacaactgaccagttgttgataaccactaagagtctctattaaaattactgatgcagaaagaccgtgtgtgaaattctctttcctgtagtcccattgatgtactttacctgaaacaacccaaagggcccctttctttcttctgaggattgcagaggatatagttatcaatctctagttgtcactttcctcttccactttgataccattgggtcattgaatataactttttccaaataaagttttatgagaaatgccagtgtgcaaaaaaaaaaaaaaaaaaaaaaaaaaaaaa

SEQ ID NO: 11444 - DNA, 2254 bp, Homo sapiens
aatcgaaagtagactcttttctgaagcatttcctgggatcagcctgaccacgctccatactgggagaggcttctgggtcaaaggaccagtctgcagagggatcctgtggctggaagcgaggaggctccacacggccgttgcagctaccgcagccaggatctgggcatccaggcacggccatgacccctccgaggctcttctgggtgtggctgctggttgcaggaacccaaggcgtgaacgatggtgacatgcggctggccgatgggggcgccaccaaccagggccgcgtggagatcttctacagaggccagtggggcactgtgtgtgacaacctgtgggacctgactgatgccagcgtcgtctgccgggccctgggcttcgagaacgccacccaggctctgggcagagctgccttcgggcaaggatcaggccccatcatgctggacgaggtccagtgcacgggaaccgaggcctcactggccgactgcaagtccctgggctggctgaagagcaactgcaggcacgagagagacgctggtgtggtctgcaccaatgaaaccaggagcacccacaccctggacctctccagggagctctcggaggcccttggccagatctttgacagccagcggggctgcgacctgtccatcagcgtgaatgtgcagggcgaggacgccctgggcttctgtggccacacggtcatcctgactgccaacctggaggcccaggccctgtggaaggagccgggcagcaatgtcaccatgagtgtggatgctgagtgtgtgcccatggtcagggaccttctcaggtacttctactcccgaaggattgacatcaccctgtcgtcagtcaagtgcttccacaagctggcctctgcctatggggccaggcagctgcagggctactgcgcaagcctctttgccatcctcctcccccaggacccctcgttccagatgcccctggacctgtatgcctatgcagtggccacaggggacgccctgctggagaagctctgcctacagttcctggcctggaacttcgaggccttgacgcaggccgaggcctggcccagtgtccccacagacctgctccaactgctgctgcccaggagcgacctggcggtgcccagcgagctggccctactgaaggccgtggacacctggagctggggggagcgtgcctcccatgaggaggtggagggcttggtggagaagatccgcttccccatgatgctccctgaggagctctttgagctgcagttcaacctgtccctgtactggagccacgaggccctgttccagaagaagactctgcaggccctggaattccacactgtgcccttccagttgctggcccggtacaaaggcctgaacctcaccgaggatacctacaagccccggatttacacctcgcccacctggagtgcctttgtgacagacagttcctggagtgcacggaagtcacaactggtctatcagtccagacgggggcctttggtcaaatattcttctgattacttccaagccccctctgactacagatactacccctaccagtccttccagactccacaacaccccagcttcctcttccaggacaagagggtgtcctggtccctggtctacctccccaccatccagagctgctggaactacggcttctcctgctcctcggacgagctccctgtcctgggcctcaccaagtctggcggctcagatcgcaccattgcctacgaaaacaaagccctgatgctctgcgaagggctcttcgtggcagacgtcaccgatttcgagggctggaaggctgcgattcccagtgccctggacaccaacagctcgaagagcacctcctccttcccctgcccggcagggcacttcaacggcttccgcacggtcatccgccccttctacctgaccaactcctcaggtgtggactagacgcgtggccaagggtggtgagaaccggagaaccccaggacgccctcactgcaggctcccctcctcggcttccttcctctctgcaatgaccttcaacaaccggccaccagatgtcgccctactcacctgaggctcagcttcaagaaattactggaaggcttccactagggtccaccaggagttctcccaccacctcaccagtttccaggtggtaagcaccaggaggccctcgaggttgctctggatccccccacagcccctggtcagtctgcccttgtcactggtctgaggtcattaaaattacattgaggttccta

SEQ ID NO: 11445 - DNA, 2714 bp, Homo sapiens
aatcttatgaacagaaccaggacagggaggctggccggaggttcctgcagagggagcgtcaaggccctgtgctgctgtccctgggggccagaggggttgcccagcatgcccactggcaggagagagggaactgacccacttgctcctaccagcttctgaaggctccaaagtccggaggtgcagaaagccaggaccaagagacaggcagctcaccagggtggacaaatcgccagagatgtggtgcattgtcctgttttcacttttggcatgggtttatgctgagcctaccatgtatggggagatcctgtcccctaactatcctcaggcatatcccagtgaggtagagaaatcttgggacatagaagttcctgaagggtatgggattcacctctacttcacccatctggacattgagctgtcagagaactgtgcgtatgactcagtgcagataatctcaggagacactgaagaagggaggctctgtggacagaggagcagtaacaatccccactctccaattgtggaagagttccaagtcccatacaacaaactccaggtgatctttaagtcagacttttccaatgaagagcgttttacggggtttgctgcatactatgttgccacagacataaatgaatgcacagattttgtagatgtcccttgtagccacttctgcaacaatttcattggtggttacttctgctcctgccccccggaatatttcctccatgatgacatgaagaattgcggagttaattgcagtggggatgtattcactgcactgattggggagattgcaagtcccaattatcccaaaccatatccagagaactcaaggtgtgaataccagatccggttggagaaagggttccaagtggtggtgaccttgcggagagaagattttgatgtggaagcagctgactcagcgggaaactgccttgacagtttagtttttgttgcaggagatcggcaatttggtccttactgtggtcatggattccctgggcctctaaatattgaaaccaagagtaatgctcttgatatcatcttccaaactgatctaacagggcaaaaaaagggctggaaacttcgctatcatggagatccaatgccctgccctaaggaagacactcccaattctgtttgggagcctgcgaaggcaaaatatgtctttagagatgtggtgcagataacctgtctggatgggtttgaagttgtggagggacgtgttggtgcaacatctttctattcgacttgtcaaagcaatggaaagtggagtaattccaaactgaaatgtcaacctgtggactgtggcattcctgaatccattgagaatggtaaagttgaagacccagagagcactttgtttggttctgtcatccgctacacttgtgaggagccatattactacatggaaaatggaggaggtggggagtatcactgtgctggtaacgggagctgggtgaatgaggtgctgggcccggagctgccgaaatgtgttccagtctgtggagtccccagagaaccctttgaagaaaaacagaggataattggaggatccgatgcagatattaaaaacttcccctggcaagtcttctttgacaacccatgggctggtggagcgctcattaatgagtactgggtgctgacggctgctcatgttgtggagggaaacagggagccaacaatgtatgttgggtccacctcagtgcagacctcacggctggcaaaatccaagatgctcactcctgagcatgtgtttattcatccgggatggaagctgctggaagtcccagaaggacgaaccaattttgataatgacattgcactggtgcggctgaaagacccagtgaaaatgggacccaccgtctctcccatctgcctaccaggcacctcttccgactacaacctcatggatggggacctgggactgatctcaggctggggccgaacagagaagagagatcgtgctgttcgcctcaaggcggcaaggttacctgtagctcctttaagaaaatgcaaagaagtgaaagtggagaaacccacagcagatgcagaggcctatgttttcactcctaacatgatctgtgctggaggagagaagggcatggatagctgtaaaggggacagtggtggggcctttgctgtacaggatcccaatgacaagaccaaattctacgcagctggcctggtgtcctgggggccccagtgtgggacctatgggctctacacacgggtaaagaactatgttgactggataatgaagactatgcaggaaaatagcaccccccgtgaggactaatccagatacatcccaccagcctctccaagggtggtgaccaatgcattaccttctgttccttatgatattctcattatttcatcatgactgaaagaagacacgagcgaatgatttaaatagaacttgattgttgagacgccttgctagaggtagagtttgatcatagaattgtgctggtcatacatttgtggtctgactccttggggtcctttccccggagtacctattgtagataacactatgggtggggcactcctttcttgcactattccacagggataccttaattctttgtttcctctttacctgttcaaaattccatttacttgatcattctcagtatccactgtctatgtacaataaaggatgtttataagcaaaaaaaaaaaaaaaaaaaaaaaaaaaaaaaaaa

SEQ ID NO: 11446 - DNA, 2609 bp, Homo sapiens
ggctctctacctctcgccgcccctagggaggacaccatgggcccactgatggttcttttttgcctgctgttcctgtacccaggtctggcagactcggctccctcctgccctcagaacgtgaatatctcgggtggcaccttcaccctcagccatggctgggctcctgggagccttctcacctactcctgcccccagggcctgtacccatccccagcatcacggctgtgcaagagcagcggacagtggcagaccccaggagccacccggtctctgtctaaggcggtctgcaaacctgtgcgctgtccagcccctgtctcctttgagaatggcatttataccccacggctggggtcctatcccgtgggtggcaatgtgagcttcgagtgtgaggatggcttcatattgcggggctcgcctgtgcgtcagtgtcgccccaacggcatgtgggatggagaaacagctgtgtgtgataatggggctggccactgccccaacccaggcatttcactgggcgcagtgcggacaggcttccgctttggtcatggggacaaggtccgctatcgctgctcctcgaatcttgtgctcacggggtcttcggagcgggagtgccagggcaacggggtctggagtggaacggagcccatctgccgccaaccctactcttatgacttccctgaggacgtggcccctgccctgggcacttccttctcccacatgcttggggccaccaatcccacccagaagacaaaggaaagcctgggccgtaaaatccaaatccagcgctctggtcatctgaacctctacctgctcctggactgttcgcagagtgtgtcggaaaatgactttctcatcttcaaggagagcgcctccctcatggtggacaggatcttcagctttgagatcaatgtgagcgttgccattatcacctttgcctcagagcccaaagtcctcatgtctgtcctgaacgacaactcccgggatatgactgaggtgatcagcagcctggaaaatgccaactataaagatcatgaaaatggaactgggactaacacctatgcagccttaaacagtgtctatctcatgatgaacaaccaaatgcgactcctcggcatggaaacgatggcctggcaggaaatccgacatgccatcatccttctgacagatggaaagtccaatatgggtggctctcccaagacagctgttgaccatatcagagagatcctgaacatcaaccagaagaggaatgactatctggacatctatgccatcggggtgggcaagctggatgtggactggagagaactgaatgagctagggtccaagaaggatggtgagaggcatgccttcattctgcaggacacaaaggctctgcaccaggtctttgaacatatgctggatgtctccaagctcacagacaccatctgcggggtggggaacatgtcagcaaacgcctctgaccaggagaggacaccctggcatgtcactattaagcccaagagccaagagacctgccggggggccctcatctccgaccaatgggtcctgacagcagctcattgcttccgcgatggcaacgaccactccctgtggagggtcaatgtgggagaccccaaatcccagtggggcaaagaattccttattgagaaggcggtgatctccccagggtttgatgtctttgccaaaaagaaccagggaatcctggagttctatggtgatgacatagctctgctgaagctggcccagaaagtaaagatgtccacccatgccaggcccatctgccttccctgcacgatggaggccaatctggctctgcggagacctcaaggcagcacctgtagggaccatgagaatgaactgctgaacaaacagagtgttcctgctcattttgtcgccttgaatgggagcaaactgaacattaaccttaagatgggagtggagtggacaagctgtgccgaggttgtctcccaagaaaaaaccatgttccccaacttgacagatgtcagggaggtggtgacagaccagttcctatgcagtgggacccaggaggatgagagtccctgcaagggagaatctgggggagcagttttccttgagcggagattcaggttttttcaggtgggtctggtgagctggggtctttacaacccctgccttggctctgctgacaaaaactcccgcaaaagggcccctcgtagcaaggtcccgccgccacgagactttcacatcaatctcttccgcatgcagccctggctgaggcagcacctgggggatgtcctgaattttttacccctctagccatggccactgagccctctgctgccctgccagaatctgccgcccctccatcttctacctctgaatggccacccttagaccctgtgatccatcctctctcctagctgagtaaatccgggtctctaggatgccagaggcagcgcacacaagctgggaaatcctcagggctcctaccagcaggactgcctcgctgccccacctcccgctccttggcctgtccccagattccttccctggttgacttgactcatgcttgtttcactttcacatggaatttcccagttatgaaattaataaaaatcaatggtttccac

SEQ ID NO: 11447 - DNA, 1745 bp, Homo sapiens
ccgtcgcccggatcccctgagctgcccgccatcccacgtgaccgcgccgccccccagctccaccgctgagcccgctcgccatggccctcttcggggccctcttcctagcgctgctggcaggcgcacatgcagagttcccaggctgcaagatccgcgtcacctccaaggcgctggagctggtgaagcaggaggggctgcgctttctggagcaagagctggagactatcaccattccggacctgcggggcaaagaaggccacttctactacaacatctctgaggtgaaggtcacagagctgcaactgacatcttccgagctcgatttccagccacagcaggagctgatgcttcaaatcaccaatgcctccttggggctgcgcttccggagacagctgctctactggttcttctatgatgggggctacatcaacgcctcagctgagggtgtgtccatccgcactggtctggagctctcccgggatcccgctggacggatgaaagtgtccaatgtctcctgccaggcctctgtctccagaatgcacgcggccttcgggggaaccttcaagaaggtgtatgattttctctccacgttcatcacctcagggatgcgcttcctcctcaaccagcagatctgccctgtcctctaccacgcagggacggtcctgctcaactccctcctggacaccgtgcctgtgcgcagttctgtggacgagcttgttggcattgactattccctcatgaaggatcctgtggcttccaccagcaacctggacatggacttccggggggccttcttccccctgactgagaggaactggagcctccccaaccgggcagtggagccccagctgcaggaggaagagcggatggtgtatgtggccttctctgagttcttcttcgactctgccatggagagctacttccgggcgggggccctgcagctgttgctggtgggggacaaggtgccccacgacctggacatgctgctgagggccacctactttgggagcattgtcctgctgagcccagcagtgattgactccccattgaagctggagctgcgggtcctggccccaccgcgctgcaccatcaagccctctggcaccaccatctctgtcactgctagcgtcaccattgccctggtcccaccagaccagcctgaggtccagctgtccagcatgactatggacgcccgtctcagcgccaagatggctctccgggggaaggccctgcgcacgcagctggacctgcgcaggttccgaatctattccaaccattctgcactggagtcgctggctctgatcccattacaggcccctctgaagaccatgctgcagattggggtgatgcccatgctcaatgagcggacctggcgtggggtgcagatcccactacctgagggcatcaactttgtgcatgaggtggtgacgaaccatgcgggattcctcaccatcggggctgatctccactttgccaaagggctgcgagaggtgattgagaagaaccggcctgctgatgtcagggcgtccactgcccccacaccgtccacagcagctgtctgagccctcaatccccaagctggcagctgtcattcaggaccccaacccctctcagcccctcttttcccacattcatagcctgtagtgccccctctaacccccagtgccacagagaagacgggatttgaagctgtacccaatttaattccataatcaatctatcaattacagtccgtccaccacctc

SEQ ID NO: 11448 - DNA, 1589 bp, Homo sapiens
ccgtcgcccggatcccctgagctgcccgccatcccacgtgaccgcgccgccccccagctccaccgctgagcccgctcgccatggccctcttcggggccctcttcctagcgctgctggcaggcgcacatgcagagttcccaggctgcaagatccgcgtcacctccaaggcgctggagctggtgaagcaggaggggctgcgctttctggagcaagagctggagactatcaccattccggacctgcggggcaaagaaggccacttctactacaacatctctgaggtgaaggtcacagagctgcaactgacatcttccgagctcgatttccagccacagcaggagctgatgcttcaaatcaccaatgcctccttggggctgcgcttccggagacagctgctctactggttcttgaaggtgtatgattttctctccacgttcatcacctcagggatgcgcttcctcctcaaccagcagatctgccctgtcctctaccacgcagggacggtcctgctcaactccctcctggacaccgtgcctgtgcgcagttctgtggacgagcttgttggcattgactattccctcatgaaggatcctgtggcttccaccagcaacctggacatggacttccggggggccttcttccccctgactgagaggaactggagcctccccaaccgggcagtggagccccagctgcaggaggaagagcggatggtgtatgtggccttctctgagttcttcttcgactctgccatggagagctacttccgggcgggggccctgcagctgttgctggtgggggacaaggtgccccacgacctggacatgctgctgagggccacctactttgggagcattgtcctgctgagcccagcagtgattgactccccattgaagctggagctgcgggtcctggccccaccgcgctgcaccatcaagccctctggcaccaccatctctgtcactgctagcgtcaccattgccctggtcccaccagaccagcctgaggtccagctgtccagcatgactatggacgcccgtctcagcgccaagatggctctccgggggaaggccctgcgcacgcagctggacctgcgcaggttccgaatctattccaaccattctgcactggagtcgctggctctgatcccattacaggcccctctgaagaccatgctgcagattggggtgatgcccatgctcaatgagcggacctggcgtggggtgcagatcccactacctgagggcatcaactttgtgcatgaggtggtgacgaaccatgcgggattcctcaccatcggggctgatctccactttgccaaagggctgcgagaggtgattgagaagaaccggcctgctgatgtcagggcgtccactgcccccacaccgtccacagcagctgtctgagccctcaatccccaagctggcagctgtcattcaggaccccaacccctctcagcccctcttttcccacattcatagcctgtagtgccccctctaacccccagtgccacagagaagacgggatttgaagctgtacccaatttaattccataatcaatctatcaattacagtccgtccaccacctc

SEQ ID NO: 11449 - DNA, 2620 bp, Homo sapiens
agatgcgagcactgcggctgggcgctgaggatcagccgcttcctgcctggattccacagcttcgcgccgtgtactgtcgccccatccctgcgcgcccagcctgccaagcagcgtgccccggttgcaggcgtcatgcagcgggcgcgacccacgctctgggccgctgcgctgactctgctggtgctgctccgcgggccgccggtggcgcgggctggcgcgagctcggcgggcttgggtcccgtggtgcgctgcgagccgtgcgacgcgcgtgcactggcccagtgcgcgcctccgcccgccgtgtgcgcggagctggtgcgcgagccgggctgcggctgctgcctgacgtgcgcactgagcgagggccagccgtgcggcatctacaccgagcgctgtggctccggccttcgctgccagccgtcgcccgacgaggcgcgaccgctgcaggcgctgctggacggccgcgggctctgcgtcaacgctagtgccgtcagccgcctgcgcgcctacctgctgccagcgccgccagctccaggaaatgctagtgagtcggaggaagaccgcagcgccggcagtgtggagagcccgtccgtctccagcacgcaccgggtgtctgatcccaagttccaccccctccattcaaagataatcatcatcaagaaagggcatgctaaagacagccagcgctacaaagttgactacgagtctcagagcacagatacccagaacttctcctccgagtccaagcgggagacagaatatggtccctgccgtagagaaatggaagacacactgaatcacctgaagttcctcaatgtgctgagtcccaggggtgtacacattcccaactgtgacaagaagggattttataagaaaaagcagtgtcgcccttccaaaggcaggaagcggggcttctgctggtgtgtggataagtatgggcagcctctcccaggctacaccaccaaggggaaggaggacgtgcactgctacagcatgcagagcaagtagacgcctgccgcaaggttaatgtggagctcaaatatgccttattttgcacaaaagactgccaaggacatgaccagcagctggctacagcctcgatttatatttctgtttgtggtgaactgattttttttaaaccaaagtttagaaagaggtttttgaaatgcctatggtttctttgaatggtaaacttgagcatcttttcactttccagtagtcagcaaagagcagtttgaattttcttgtcgcttcctatcaaaatattcagagactcgagcacagcacccagacttcatgcgcccgtggaatgctcaccacatgttggtcgaagcggccgaccactgactttgtgacttaggcggctgtgttgcctatgtagagaacacgcttcacccccactccccgtacagtgcgcacaggctttatcgagaataggaaaacctttaaaccccggtcatccggacatcccaacgcatgctcctggagctcacagccttctgtggtgtcatttctgaaacaagggcgtggatccctcaaccaagaagaatgtttatgtcttcaagtgacctgtactgcttggggactattggagaaaataaggtggagtcctacttgtttaaaaaatatgtatctaagaatgttctagggcactctgggaacctataaaggcaggtatttcgggccctcctcttcaggaatcttcctgaagacatggcccagtcgaaggcccaggatggcttttgctgcggccccgtggggtaggagggacagagagacagggagagtcagcctccacattcagaggcatcacaagtaatggcacaattcttcggatgactgcagaaaatagtgttttgtagttcaacaactcaagacgaagcttatttctgaggataagctctttaaaggcaaagctttattttcatctctcatcttttgtcctccttagcacaatgtaaaaaagaatagtaatatcagaacaggaaggaggaatggcttgctggggagcccatccaggacactgggagcacatagagattcacccatgtttgttgaacttagagtcattctcatgcttttctttataattcacacatatatgcagagaagatatgttcttgttaacattgtatacaacatagccccaaatatagtaagatctatactagataatcctagatgaaatgttagagatgctatatgatacaactgtggccatgactgaggaaaggagctcacgcccagagactgggctgctctcccggaggccaaacccaagaaggtctggcaaagtcaggctcagggagactctgccctgctgcagacctcggtgtggacacacgctgcatagagctctccttgaaaacagaggggtctcaagacattctgcctacctattagcttttctttatttttttaactttttggggggaaaagtatttttgagaagtttgtcttgcaatgtatttataaatagtaaataaagtttttaccattaaaaaaatatctttccctttgttattgaccatctctgggctttgtatcactaattattttattttattatataataattattttattataataaaatcctgaaaggggaaaataaaaaaaa

SEQ ID NO: 11450 - DNA, 3345 bp, Homo sapiens
cagatgtccagttccagatgcctggacccagagtgtgggggaaatatctctggagaagccctcactccaaaggctgtccaggcgcaatgtggtggctgcttctctggggagtcctccaggcttgcccaacccggggctccgtcctcttggcccaagagctaccccagcagctgacatcccccgggtacccagagccgtatggcaaaggccaagagagcagcacggacatcaaggctccagagggctttgctgtgaggctcgtcttccaggacttcgacctggagccgtcccaggactgtgcaggggactctgtcacaatctcattcgtcggttcggatccaagccagttctgtggtcagcaaggctcccctctgggcaggccccctggtcagagggagtttgtatcctcagggaggagtttgcggctgaccttccgcacacagccttcctcggagaacaagactgcccaccttcacaagggctttctggccctctaccaaaccgtggctgtgaactatagtcagcccatcagcgaggccagcaggggctctgaggccatcaacgcacctggagacaaccctgccaaggtccagaaccactgccaggagccctattatcaggccgcggcagcaggggcactcacctgtgcaaccccagggacctggaaagacagacaggatggggaggaggttcttcagtgtatgcctgtctgcggacggccagtcacccccattgcccagaatcagacgaccctcggttcttccagagccaagctgggcaacttcccctggcaagccttcaccagtatccacggccgtgggggcggggccctgctgggggacagatggatcctcactgctgcccacaccgtctaccccaaggacagtgtttctctcaggaagaaccagagtgtgaatgtgttcttgggccacacagccatagatgagatgctgaaactggggaaccaccctgtccaccgtgtcgttgtgcaccccgactaccgtcagaatgagtcccataactttagcggggacatcgccctcctggagctgcagcacagcatccccctgggccccaacgtcctcccggtctgtctgcccgataatgagaccctctaccgcagcggcttgttgggctacgtcagtgggtttggcatggagatgggctggctaactactgagctgaagtactcgaggctgcctgtagctcccagggaggcctgcaacgcctggctccaaaagagacagagacccgaggtgttttctgacaatatgttctgtgttggggatgagacgcaaaggcacagtgtctgccagggggacagtggcagcgtctatgtggtatgggacaatcatgcccatcactgggtggccacgggcattgtgtcctggggcatagggtgtggcgaagggtatgacttctacaccaaggtgctcagctatgtggactggatcaagggagtgatgaatggcaagaattgaccctgggggcttgaacagggactgaccagcacagtggaggccccaggcaacagagggcctggagtgaggactgaacactggggtaggggttgggggtggggggttgggggaggcagggaaatcctattcacatcactgttgcaccaagccactgcaagagaaacccccacccggcaagcccgccccatcccagacaggaagcagagtcccacagaccgctcctcctcaccctctacctccctgtgctcatgcactaggccccgggaagcctgtacatctcaacaactttcgccttgaatgtccttagaaccaccttcccctacttcatctgttgacacagcttttatactcacctgtggaagagtcagctactcacccgctattagagtatggaggaaggggttttcattgcattgcatttctgaaacattcctaagaccctttagttgaccttcaaatattcaagctattctgcagctccaagatgcaattatagaaacagctccttttttattttatgtcctctatatgccaggtgcttcacctgttatttcacttaatcctcataccatatttgcaaaggatgtgttattatctatgtgtgacaaatgaggaaactgaggctcaggggataaagggacttgcccaagtcccacagctggtgtgtgactgcagagactgtgctcttcccagtgtgctgcaatacttctcaaccctcctctaacctgctgtgtcacccgctttccctcccagcccccacatccttaccattttccctccctgggaattcctgcttctgcgaaaatggtatcctctagctcacactttcctaatggccccatctcctgcagaagccaggtgagcccagcactggactgaagttcttgcagacaccccacctgtgcccctatcatcaggggaactgctccacctgagaggaccaactctttaatttttagtaaaacctgaaggtgatgggccgggcgcagtggctcacgcctgtaatcccaacaccttaggagtccgaggtgggtggatcacgaggtcaggagatccagcccatcctggccaacatggtgaaaccccatctctactaaaaatacaaaaattagccgggcgtggtgacacgtgcctgtagtcccagctactcgggaggctgaggcaggagaatcacttgaacctgggaggcggaggttgcagtgagctaagatcacgccactgcactccagcctgcggacagaccaagacttcatcccccccaaaaaaaaaagattggaggtgatttacagtgaaagacacaaataaaatacaactgttcaatggaaatagaaaataaacaccataaaagagagaagagaggtaatttgttagcatcaagagtcaagttgctatatggtcaaaggttaaatttatctctaaaaaatggcaggattcaaagttgtacatacatgtgattacttctgttttttacacccacatacagtacaaaagattattaaaaatattcccaaaaggcaggtgcaatgatgcacacttatacccccagccactcaggaggctgatgcaagaggatcgcttgagcccaggagttgaagtccagcctaagcaacatagtgaaaccccatctccaaaaatataataataattctctcaaaatactaaacagaggtggttttattgataagattttggctgtttggttttccactattctctattggctaaaatttgtttaatgagcatgaaatgtttttattttattttgcttatttttatgattgcaaaaaatgatatgagtttctccctgccaaggcaaaaaatatatatatatacctataaaaaaaaaaaaaaaaaaaaaaaaaaa

SEQ ID NO: 11451 - DNA, 2287 bp, Homo sapiens
gaattccggctggcaggggagaacatggcgctgctctgggggctcctggtgctcagctggtcctgcctgcaaggcccctgctccgtgttctcccctgtgagcgccatggagcccttgggctggcagctaactagcgggccgaaccaggagcaggtgtccccacttaccctcctcaagttgggcaaccaggagcctggtggccagactgccctgaagagtcccccaggagtctgcagcagagaccccaccccagagcagacccacaggctggcccgggccatgatggccttcactgccgacctgttctccctggtggctcaaacgtccacctgccccaacctcatcctgtcacccctgagtgtggccctggcgctgtctcacctggcactaggtgctcagaaccacacgttgcagaggctgcaacaggtgctgcacgcaggctcagggccctgcctcccccatctgctgagccgcctctgccaggacctgggccccggcgcgttccgactggctgccaggatgtacctgcagaaaggatttcccatcaaagaagatttcctggaacaatccgaacagctatttggggcaaagcccgtgagcctgacgggaaagcaggaagatgacctggcaaacatcaaccaatgggtgaaggaggccacggaggggaagattcaggaattcctctctgggctgccggaagacaccgtgttgcttctcctcaacgccatccacttccagggtttctggaggaacaagtttgacccgagccttacccagagagactccttccacctggacgagcagttcacggtgcccgtggaaatgatgcaggcccgcacgtacccgctgcgctggttcttgctggagcagcctgagatccaggtggctcatttcccctttaagaacaacatgagctttgtggtccttgtacccacccactttgaatggaacgtgtcccaggtactggccaacctgagttgggacaccctgcacccacctctggtgtgggagaggcccaccaaggtccggctgcctaagctgtatctgaaacaccaaatggacctggtggccaccctcagccagctgggcctgcaggagttgttccaggccccagacctgcgtgggatctccgagcagagcctggtggtgtccggcgtgcagcatcagtccaccctggagctcagcgaggtcggcgtggaggcggcggcggccaccagcattgccatgtcccgcatgtccctgtcctccttcagcgtgaaccgccccttcctcttcttcatcttcgaggacaccacaggccttcccctcttcgtgggcagcgtgaggaaccccaaccccagtgcaccgcgggagctcaaggaacagcaggattccccgggcaacaaggacttcctccagagcctgaaaggcttcccccgcggagacaagcttttcggccctgacttaaaacttgtgccccccatggaggaggattacccccagtttggcagccccaagtgaggggccgtggctgtggcatccagactccctgcctggaccagcctctccactcatgtgactctttccaacctgctttgtggcactggggcaggggccgggggcagtctgagagaggccattctttcccaacacctcttggggagtttagggtgggggggggcgcggctgggaggagggcaggcatcggggagccgggagcctgaccctcatctttcttccaaacaggctcagagggtgtcctgcaccggggcctgggcaggagggaggtgcttctagttctgccaggagacaggttagctgctccccacgtcagctgggacaccccgacttttgtttaccagagaaaaagggagggggagagggctgcctttggacttgtcccgggacacctaggctagggtggggagagacgggccctggtggtggctcgggaggcgaagcgttgtcctcagccccgcgtggaactcgtgtctggcacagcctggctgtggcctaacctgccgagagtccatcagcctccatcctaccccctgtgccttgtcacgccagacttcccacggctcctcgagatcccaacactgccagcatttcccttccttcctctcctgtctccctcctctgcccgggagctcaggaaccgaggcagggaaggatcccatgagctccttaaggctcttttgtaaggtttttgtagtgatttttatgccacctgaataaagaatgaatgggcaaaaaaaaaaaaaaaaaaaaaaaaaaaaaaaaaaaaaaaaaaaaaaaaaaggaattc

SEQ ID NO: 11452 - DNA, 4116 bp, Homo sapiens
ccgcacggccaggcgaagcggagccggccgtgcggtgtgtgtgtatgtgttcgcggggcgccgtctcagccccgggaagatggtggctgcagcggcggcaactgaggcaaggctgaggaggaggacggcggcgacggcagcgctcgcgggcaggagcggcgggccgcactgggactgggacgtgaccagggctgggaggccggggctgggggccgggctgcgcctcccgcggctgctgtctccaccgctgcggccacggctgctgctgctgctgttgttgctctcgccgccgctgctgctgctgctgctgccctgtgaggccgaggccgcggcggcggcggcggcggtgtcgggctcagccgcagccgaggccaaggaatgtgaccggccctgtgtcaacggcggtcgctgcaaccctggcaccggccagtgcgtctgccccgccggctgggtgggcgagcaatgccagcactgcgggggccgcttcagactaactggatcttctgggtttgtgacagatggacctggaaattataaatacaaaacgaagtgcacgtggctcattgaaggacagccaaatagaataatgagacttcgtttcaatcattttgctacagagtgtagttgggaccatttatatgtttatgatggggactcaatttatgcaccgctagttgctgcatttagtggcctcattgttcctgagagagatggcaatgagactgtccctgaggttgttgccacatcaggttatgccttgctgcatttttttagtgatgctgcttataatttgactggatttaatattacttacagttttgatatgtgtccaaataactgctcaggccgaggagagtgtaagatcagtaatagcagcgatactgttgaatgtgaatgttctgaaaactggaaaggtgaagcatgtgacattcctcactgtacagacaactgtggttttcctcatcgaggcatctgcaattcaagtgatgtcagaggatgctcctgcttctcagactggcagggtcctggatgttcagttcctgtaccagctaaccagtcattttggactcgagaggaatattctaacttaaagctccccagagcatctcataaagctgtggtcaatggaaacattatgtgggttgttggaggatatatgttcaaccactcagattataacatggttctagcgtatgaccttgcttctagggagtggcttccactaaaccgttctgtgaacaatgtggttgttagatatggtcattctttggcattatacaaggataaaatttacatgtatggaggaaaaattgattcaactgggaatgtgaccaatgagttgagagtttttcacattcataatgagtcatgggtgttgttgacccctaaggcaaaggagcagtatgcagtggttgggcactctgcacacattgttacactgaagaatggccgagtggtcatgctggtcatctttggtcactgccctctctatggatatataagcaatgtgcaggaatatgatttggataagaacacatggagtatattacacacccagggtgcccttgtgcaagggggttacggccatagcagtgtttacgaccataggaccagggccctatacgttcatggtggctacaaggctttcagtgccaataagtaccggcttgcagatgatctctaccgatatgatgtggatacccagatgtggaccattcttaaggacagccgatttttccgttacttgcacacagctgtgatagtgagtggaaccatgctggtgtttggaggaaacacacacaatgacacatctatgagccatggcgccaaatgcttctcttcagatttcatggcctatgacattgcctgtgaccgctggtcagtgcttcccagacctgatctccaccatgatgtcaacagatttggccattcagcagtcttacacaacagcaccatgtatgtgttcggtggtttcaatagtctcctcctcagcgacatcctggtattcacctcggaacagtgtgatgcgcatcggagtgaagccgcttgtttagcagcaggacctggtattcggtgtgtgtggaacacagggtcgtctcagtgtatctcgtgggcgctggcaactgatgaacaagaagaaaagttaaaatcagaatgtttttccaaaagaactcttgaccatgacagatgtgaccagcacacagattgttacagctgcacagccaacaccaatgactgccactggtgcaatgaccattgtgtccccaggaaccacagctgctcagaaggccagatctccatttttaggtatgagaattgccccaaggataaccccatgtactactgtaacaagaagaccagctgcaggagctgtgccctggaccagaactgccagtgggagccccggaatcaggagtgcattgccctgcccgaaaatatctgtggcattggctggcatttggttggaaactcatgtttgaaaattactactgccaaggagaattatgacaatgctaaattgttctgtaggaaccacaatgcccttttggcttctcttacaacccagaagaaggtagaatttgtccttaagcagctgcgaataatgcagtcatctcagagcatgtccaagctcaccttaaccccatgggtcggccttcggaagatcaatgtgtcctactggtgctgggaagatatgtccccatttacaaatagtttactacagtggatgccgtctgagcccagtgatgctggattctgtggaattttatcagaacccagtactcggggactgaaggctgcaacctgcatcaacccactcaatggtagtgtctgtgaaaggcctgcaaaccacagtgctaagcagtgccggacaccatgtgccttgaggacagcatgtggagattgcaccagcggcagctctgagtgcatgtggtgcagcaacatgaagcagtgtgtggactccaatgcctatgtggcctccttcccttttggccagtgtatggaatggtatacgatgagcacctgcccccctgaaaattgttcaggctactgtacctgtagtcattgcttggagcaaccaggctgtggctggtgtactgatcccagcaatactggcaaagggaaatgcatagagggttcctataaaggaccagtgaagatgccttcgcaagcccctacaggaaatttctatccacagcccctgctcaattccagcatgtgtctagaggacagcagatacaactggtctttcattcactgtccagcttgccaatgcaacggccacagtaaatgcatcaatcagagcatctgtgagaagtgtgagaacctgaccacaggcaagcactgcgagacctgcatatctggcttctacggtgatcccaccaatggagggaaatgtcagccatgcaagtgcaatgggcacgcgtctctgtgcaacaccaacacgggcaagtgcttctgcaccaccaagggcgtcaagggggacgagtgccagctatgtgaggtagaaaatcgataccaaggaaaccctctcagaggaacatgttattatactcttcttattgactatcagttcacctttagtctatcccaggaagatgatcgctattacacagctatcaattttgtggctactcctgacgaacaaaacagggatttggacatgttcatcaatgcctccaagaatttcaacctcaacatcacctgggctgccagtttctcagctggaacccaggctggagaagagatgcctgttgtttcaaaaaccaacattaaggagtacaaagatagtttctctaatgagaagtttgattttcgcaaccacccaaatatcactttctttgtttatgtcagtaatttcacctggcccatcaaaattcaggtgcaaactgaacaatgaggacgcatggacacaggaaggggaacatcacacaccagggcctgttgtggggtggggggaaggggaagggatagcattaggggatatacctaatgttaaatgacgagttaatgggtgcagcacaccaacatggcatatgtatacatatgtaacaaacctgcatgttgtgcacatgtaccctaaaacttaaagtataattaaaaaaaaaaaaagaaaaa

SEQ ID NO: 11453 - DNA, 8645 bp, Homo sapiens
ccgcacggccaggcgaagcggagccggccgtgcggtgtgtgtgtatgtgttcgcggggcgccgtctcagccccgggaagatggtggctgcagcggcggcaactgaggcaaggctgaggaggaggacggcggcgacggcagcgctcgcgggcaggagcggcgggccgcactgggactgggacgtgaccagggctgggaggccggggctgggggccgggctgcgcctcccgcggctgctgtctccaccgctgcggccacggctgctgctgctgctgttgttgctctcgccgccgctgctgctgctgctgctgccctgtgaggccgaggccgcggcggcggcggcggcggtgtcgggctcagccgcagccgaggccaaggaatgtgaccggccctgtgtcaacggcggtcgctgcaaccctggcaccggccagtgcgtctgccccgccggctgggtgggcgagcaatgccagcactgcgggggccgcttcagactaactggatcttctgggtttgtgacagatggacctggaaattataaatacaaaacgaagtgcacgtggctcattgaaggacagccaaatagaataatgagacttcgtttcaatcattttgctacagagtgtagttgggaccatttatatgtttatgatggggactcaatttatgcaccgctagttgctgcatttagtggcctcattgttcctgagagagatggcaatgagactgtccctgaggttgttgccacatcaggttatgccttgctgcatttttttagtgatgctgcttataatttgactggatttaatattacttacagttttgatatgtgtccaaataactgctcaggccgaggagagtgtaagatcagtaatagcagcgatactgttgaatgtgaatgttctgaaaactggaaaggtgaagcatgtgacattcctcactgtacagacaactgtggttttcctcatcgaggcatctgcaattcaagtgatgtcagaggatgctcctgcttctcagactggcagggtcctggatgttcagttcctgtaccagctaaccagtcattttggactcgagaggaatattctaacttaaagctccccagagcatctcataaagctgtggtcaatggaaacattatgtgggttgttggaggatatatgttcaaccactcagattataacatggttctagcgtatgaccttgcttctagggagtggcttccactaaaccgttctgtgaacaatgtggttgttagatatggtcattctttggcattatacaaggataaaatttacatgtatggaggaaaaattgattcaactgggaatgtgaccaatgagttgagagtttttcacattcataatgagtcatgggtgttgttgacccctaaggcaaaggagcagtatgcagtggttgggcactctgcacacattgttacactgaagaatggccgagtggtcatgctggtcatctttggtcactgccctctctatggatatataagcaatgtgcaggaatatgatttggataagaacacatggagtatattacacacccagggtgcccttgtgcaagggggttacggccatagcagtgtttacgaccataggaccagggccctatacgttcatggtggctacaaggctttcagtgccaataagtaccggcttgcagatgatctctaccgatatgatgtggatacccagatgtggaccattcttaaggacagccgatttttccgttacttgcacacagctgtgatagtgagtggaaccatgctggtgtttggaggaaacacacacaatgacacatctatgagccatggcgccaaatgcttctcttcagatttcatggcctatgacattgcctgtgaccgctggtcagtgcttcccagacctgatctccaccatgatgtcaacagatttggccattcagcagtcttacacaacagcaccatgtatgtgttcggtggtttcaatagtctcctcctcagcgacatcctggtattcacctcggaacagtgtgatgcgcatcggagtgaagccgcttgtttagcagcaggacctggtattcggtgtgtgtggaacacagggtcgtctcagtgtatctcgtgggcgctggcaactgatgaacaagaagaaaagttaaaatcagaatgtttttccaaaagaactcttgaccatgacagatgtgaccagcacacagattgttacagctgcacagccaacaccaatgactgccactggtgcaatgaccattgtgtccccaggaaccacagctgctcagaaggccagatctccatttttaggtatgagaattgccccaaggataaccccatgtactactgtaacaagaagaccagctgcaggagctgtgccctggaccagaactgccagtgggagccccggaatcaggagtgcattgccctgcccgaaaatatctgtggcattggctggcatttggttggaaactcatgtttgaaaattactactgccaaggagaattatgacaatgctaaattgttctgtaggaaccacaatgcccttttggcttctcttacaacccagaagaaggtagaatttgtccttaagcagctgcgaataatgcagtcatctcagagcatgtccaagctcaccttaaccccatgggtcggccttcggaagatcaatgtgtcctactggtgctgggaagatatgtccccatttacaaatagtttactacagtggatgccgtctgagcccagtgatgctggattctgtggaattttatcagaacccagtactcggggactgaaggctgcaacctgcatcaacccactcaatggtagtgtctgtgaaaggcctgcaaaccacagtgctaagcagtgccggacaccatgtgccttgaggacagcatgtggagattgcaccagcggcagctctgagtgcatgtggtgcagcaacatgaagcagtgtgtggactccaatgcctatgtggcctccttcccttttggccagtgtatggaatggtatacgatgagcacctgcccccctgaaaattgttcaggctactgtacctgtagtcattgcttggagcaaccaggctgtggctggtgtactgatcccagcaatactggcaaagggaaatgcatagagggttcctataaaggaccagtgaagatgccttcgcaagcccctacaggaaatttctatccacagcccctgctcaattccagcatgtgtctagaggacagcagatacaactggtctttcattcactgtccagcttgccaatgcaacggccacagtaaatgcatcaatcagagcatctgtgagaagtgtgagaacctgaccacaggcaagcactgcgagacctgcatatctggcttctacggtgatcccaccaatggagggaaatgtcagccatgcaagtgcaatgggcacgcgtctctgtgcaacaccaacacgggcaagtgcttctgcaccaccaagggcgtcaagggggacgagtgccagctatgtgaggtagaaaatcgataccaaggaaaccctctcagaggaacatgttattatactcttcttattgactatcagttcacctttagtctatcccaggaagatgatcgctattacacagctatcaattttgtggctactcctgacgaacaaaacagggatttggacatgttcatcaatgcctccaagaatttcaacctcaacatcacctgggctgccagtttctcagctggaacccaggctggagaagagatgcctgttgtttcaaaaaccaacattaaggagtacaaagatagtttctctaatgagaagtttgattttcgcaaccacccaaatatcactttctttgtttatgtcagtaatttcacctggcccatcaaaattcagattgccttctctcagcacagcaattttatggacctggtacagttcttcgtgactttcttcagttgtttcctctctttgctcctggtggctgctgtggtttggaagatcaaacaaagttgttgggcctccagacgtagagagcaacttcttcgagagatgcaacagatggccagccgtccctttgcctctgtaaatgtcgccttggaaacagatgaggagcctcctgatcttattggggggagtataaagactgttcccaaacccattgcactggagccgtgttttggcaacaaagccgctgtcctctctgtgtttgtgaggctccctcgaggcctgggtggcatccctcctcctgggcagtcaggtcttgctgtggccagcgccctggtggacatttctcagcagatgccgatagtgtacaaggagaagtcaggagccgtgagaaaccggaagcagcagccccctgcacagcctgggacctgcatctgatgctggggccagggactctcccacgcacgagctagtgagtggcacaccagagccatctgcagggaagggcgtggcggggaaatggctgtgcggtgcgggacggaagactggaaaccctcaaagcatctgactcacctgcatgatcacaagctttctttgacggtttctcccatccgtgttccagcatctaaccttttacttttgcataggaaatacttgatttaattacaggtccagggatgagctgatggttgctggaggaggccagtgtagagccagtgagagaactaggaatgacactcaggttcactgtggaaaactgttcttgggactgtctcaactgtgcaaaaaacaaaagatggagtgtttacaagtagacattcgtcatcagttgttcttgaacatggtcttttaaaaactagtcagatgaattaacttgttttcatctgaagcctgctatcttttttaaaagatgtgctatttattcttgcacgatttaggcaattatctctcttccagggagtacctttttttctagttgagaattaataatggtccatctcttttgatcatatcaagctaggatagaaggggggctattttaaatgtcaaggtcagcagtgttactttgaatgtaaactggtataataggtagttttctatagtaacttgattaatttagtcttaatccatttgaaactctctcttcctttctctctgcctgtccctctccttctccatctcaccctccctctctcacacatacacacacaaacacatacacacaacactaagtgcctagactttaaatagatctagcaattggaaagttagtaagcctaagtttttacataattgcattcctacattcttgtaaaatttaaatagctaccattggcaatctgctttttttctaaaatctgatttgcagccaggaaagaattttctcacccaaggaacatttgatctagcagcagggatgagaggaaagcagaaatgaatgaactgtgaaagctcctgtttttattatcaaaaaggacactgtcaagaaggcgccccctgcccccacccccgtgtcaccctaggcctgataagcgatcagaggaaaggactcattcatgtcacgcttccttgagcagaaaagagcactgagagcacttgggacccctggatcagagagcatctgtgtgtcctgcagcctcctctgaacttgtggttcattctcaggctggggtggactcagatgccaggaaagggacagcctcccattgtcaggcagaagctgcccaaagcctggagaaggacttgtttgccctctttcccccaggaggggctcgacccacccaccctccctctcagaccaaggtggtggctgtgaggagggcagcaaatgctgacaaggatgaaaagcacatggaaaaaaatggatgaggagggaaaactctgccaaatggaaaatgaccaaatttaagagggtgggacagtcccctgctcctctcccagagggcactgcttggaaattgtgttttccccatttatggtgctctgtattctggcattatgcagcagcctcccagaagctctcttctgcttcaaaacctgggatctctggcattaccctattgggatggaccgctggacagcaatgctcgagtttgtgaatttggagagatactcaaaagagctaaaactgcagcattttacctttaaatgcagtgcctagagagagagtattgtctcttccccaacactaaccccactcccatgaagaattgcctggaaagatgttttcaaggaatttgaaccataaaacactatctgatgcacagaacacctctactttgagactcacctctcataaagcttctttttcacattactgttaaagaccagacgttctagaaaagacccctcctctcatgagctcccccatccctgctacagaacacagcacccatggcgcctgcagtggactggccccttaattcccacaggcccccccagcaaggccaaagggaggcccctgggtattgtcctcctacaaggaagatcctctttgtttgttcaaaggaccagttttcctaggccaaagaagtctcttccccatgttagtcctatgccttgaaatatcatgcaccatgacccacagccatctggttatgtcttatttttttcctaaaagataatgtttatttttaaaaaggaaggaaggagcaagtgaagtttcattctgctccagcggtggggaagccgctgaatccacctgcttctcctttgcaaccgacagcaaacagctttctccggcctcagggcagaaaaagggaatggcagggagtaagaggcgctgggctcggagcctgtttccaagaaggaattggttgtcatctggcagtgttgcgcgtcacaagagagcctgtatataaattaaaatagtcaagacaacactgaccttgcacttgtacataactatacagtagtgtccagaatgttcagacattcggagtgtacataaaacagaaaaaatcttcatgtatttttattaaatataacaatgtctgagtttcacctaagatgtttttgtgccatatgctggatatccaggttctcgccaggccccgatacatgaataacaaacccaagaaacgcatccccattgtgtgatgtgttcagatgcatctggcaccaattaggtatttcttaaaacaggactcatctgtcagagtgcacatgaaaaatcaggcagggaatcgaaacgacagcgctggaggagactcaggaagcagaggcgtccctgccgctgcccttggccctgcaagcacatcatgaccctttctggcagcctcttggtgctctgggtagtgagggatgaccagtcttgtcctgagaaatgtttctcttagtctttaagttcaaagactaacctgtagcaatcagactttccaaaagggggttctccattttttgtagttttgtctaaatttttaatgaccatttcctggaatcagtttattatactgaaaactgggggtgggagtagggagctagtttgttgataaatagttcccatttccccgtggagaatttgacataccctggactcctgtgtgcctcctgccatccctgcacacagcctggggagaagcctgtgcctccccgtgtggagagaaggcaaccccagatcccctgagctaacccggaggaaaggcagtcctggacagaagactgtcagcagaaggaaagtactggactacccgtgggtaagtcctgccattcaagactggagacacctgggaaataaaaagagcagggcactgctggtgggaagaggcattttaccttccagtgcaaatcctgctcctttgatttaatggggtgtactggggccaggggctgattcacttccttgggagatggtggtgttttcatgaacatctttgatccttccatttcatttattcatccatccattcaacaagtatttgctaaacactaacttaagctaatgctagggtagtgactgagatgtaaaaatagattttagaattaaaacaaaatccaagtcctcacacccctgtcatcccaggagatctttccttgtggtggtttctgtgagaattggccatcctgaggacacagccaggacggcagaggcctcctggcctcagggcatgccctgcctaccttctgaaatgtttaccccattgaccaaacttggctccagccattgcggtggtttctagatagccaggcccaccaagagatattgccccttgatgagagtcaaacaccctgcctacaaggagatgttttgaaatggagaggaaaattggcacctcatcttttaaaggcagtaatggaattgattttcagtaactgaatttgtgcacaaaacattctaaacactagtgaagcctgtttcgttgaactaattctggctctggaaatgtttttgttttatagttatttacgatttcgtttgtttggattcaagcttagtttgttaatatgtataatttagcatctattacactcatgtaaatatggagtaagtattgtaaactatttcattgcggggattgtgggtgttatacatacatttaggactgcaattttttggtattttttgtattgtaaaataacagctaatttaagcaggaacaagagaactaagggaggtctgtgcattttaaacacaaatgtgaagaacttgtatataaacaaaagtaaatactataatacaaacttccttctgaaataaaagtagatctggtaaaaa

SEQ ID NO: 11454 - DNA, 614 bp, Homo sapiens
tatagctccacggccagaagataccagcagctctgcctttactgaaatttcagctggagaaaggtccacagcacaatgaggcttttcacaggcattgttttctgctccttggtcatgggagtcaccagtgaaagctggcgttcgtttttcaaggaggctctccaaggggttggggacatgggcagagcctattgggacataatgatatccaatcaccaaaattcaaacagatatctctatgctcggggaaactatgatgctgcccaaagaggacctgggggtgtctgggctgctaaactcatcagccgttccagggtctatcttcagggattaatagactactatttatttggaaacagcagcactgtattggaggactcgaagtccaacgagaaagctgaggaatggggccggagtggcaaagaccccgaccgcttcagacctgacggcctgcctaagaaatactgagcttcctgctcctctgctctcagggaaactgggctgtgagccacacacttctccccccagacagggacacagggtcactgagctttgtgtccccaggaactggtatagggcacctagaggtgttcaataaatgtttgtcaaattga

SEQ ID NO: 11455 - DNA, 2245 bp, Homo sapiens
ctcagctacgggacacatttcaggtatccaaggcagcagaggtgagtgggtcccccgagctctgtgaccttatgctccacactaactctggcagagcctccgtttcctcatagaacaaagaacagccaccatgcagctcttcctcctcttgtgcctggtgcttctcagccctcagggggcctcccttcaccgccaccacccccgggagatgaagaagagagtcgaggacctccatgtaggtgccacggtggcccccagcagcagaagggactttacctttgacctctacagggccttggcttccgctgcccccagccagaacatcttcttctcccctgtgagcatctccatgagcctggccatgctctccctgggggctgggtccagcacaaagatgcagatcctggagggcctgggcctcaacctccagaaaagctcagagaaggagctgcacagaggctttcagcagctccttcaggaactcaaccagcccagagatggcttccagctgagcctcggcaatgcccttttcaccgacctggtggtagacctgcaggacaccttcgtaagtgccatgaagacgctgtacctggcagacactttccccaccaactttagggactctgcaggggccatgaagcagatcaatgattatgtggcaaagcaaacgaagggcaagattgtggacttgcttaagaacctcgatagcaatgcggtcgtgatcatggtgaattacatcttctttaaagctaagtgggagacaagcttcaaccacaaaggcacccaagagcaagacttctacgtgacctcggagactgtggtgcgggtacccatgatgagccgcgaggatcagtatcactacctcctggaccggaacctctcctgcagggtggtgggggtcccctaccaaggcaatgccacggctttgttcattctccccagtgagggaaagatgcagcaggtggagaatggactgagtgagaaaacgctgaggaagtggcttaagatgttcaaaaagaggcagctcgagctttaccttcccaaattctccattgagggctcctatcagctggagaaagtcctccccagtctggggatcagtaacgtcttcacctcccatgctgatctgtccggcatcagcaaccactcaaatatccaggtgtctgagatggtgcacaaagctgtggtggaggtggacgagtcgggaaccagagcagcggcagccacggggacaatcttcactttcaggtcggcccgcctgaactctcagaggctagtgttcaacaggccctttctgatgttcattgtggataacaacatcctcttccttggcaaagtgaaccgcccctgaggtggggcttctcctgaaatctacaggcctcagggtgggagatgaagggggctatgctatggcccatctgtatgctggtagctagtgatttacacaggtttagttgactaatgaggcattacaaataatattactctatgatgattgcttccacccacacgactgcaacatacaggtgccttggggaaatgtggagaacattcaatcttgccgtcactattcatcaatgaagattagcactgagatccagagaggctggatgacttgctcaagttcaccagcatggtagtggcaaagagaggtccagagtcctggcccttgatgcccagctcagtgccacaaagctcagtaggagggatgttccagtggatgagggccaccaggaagcacaggtccaaggctggtcccacacttatcagcagcaacaactgtcagttcatcctgcatgggaaaaatgttggaatgggagtctgaaatggggctactgtttcagtcctaacgtgctgtgtgacattgggacaacactttccctctctggacctcagtttccctctgtatacaaggatcagattcttgctgtgacccaagaactcctgaaatcatatagaaaggctggggtgggccctgtcattcgtggttgatttcaatacactcaagtgccattcatcctttaagaaaaacatctggatatcaaggtggaaatggcccatttaatgattgattatatcattttgtggatatagttataatctgatgggcctggctgggagtggaagaagggaagccttttgcaaatagtagagtgtcagttgcaggtgccaatgactaactttttgaattctatgttggcattaacaataaagcattttgcaaacaaaaaaaaaaaaaaaaaaa

SEQ ID NO: 11456 - DNA, 1949 bp, Homo sapiens
ttgaagatctctcagttaagtctacatgaaaaggatggtttcttggagcttccacaaacttaaaaccatgaaacatctattattgctactattgtgtgtttttctagttaagtcccaaggtgtcaacgacaatgaggagggtttcttcagtgcccgtggtcatcgaccccttgacaagaagagagaagaggctcccagcctgaggcctgccccaccgcccatcagtggaggtggctatcgggctcgtccagccaaagcagctgccactcaaaagaaagtagaaagaaaagcccctgatgctggaggctgtcttcacgctgacccagacctgggggtgttgtgtcctacaggatgtcagttgcaagaggctttgctacaacaggaaaggccaatcagaaatagtgttgatgagttaaataacaatgtggaagctgtttcccagacctcctcttcttcctttcagtacatgtatttgctgaaagacctgtggcaaaagaggcagaagcaagtaaaagataatgaaaatgtagtcaatgagtactcctcagaactggaaaagcaccaattatatatagatgagactgtgaatagcaatatcccaactaaccttcgtgtgcttcgttcaatcctggaaaacctgagaagcaaaatacaaaagttagaatctgatgtctcagctcaaatggaatattgtcgcaccccatgcactgtcagttgcaatattcctgtggtgtctggcaaagaatgtgaggaaattatcaggaaaggaggtgaaacatctgaaatgtatctcattcaacctgacagttctgtcaaaccgtatagagtatactgtgacatgaatacagaaaatggaggatggacagtgattcagaaccgtcaagacggtagtgttgactttggcaggaaatgggatccatataaacagggatttggaaatgttgcaaccaacacagatgggaagaattactgtggcctaccaggtgaatattggcttggaaatgataaaattagccagcttaccaggatgggacccacagaacttttgatagaaatggaggactggaaaggagacaaagtaaaggctcactatggaggattcactgtacagaatgaagccaacaaataccagatctcagtgaacaaatacagaggaacagccggtaatgccctcatggatggagcatctcagctgatgggagaaaacaggaccatgaccattcacaacggcatgttcttcagcacgtatgacagagacaatgacggctggttaacatcagatcccagaaaacagtgttctaaagaagacggtggtggatggtggtataatagatgtcatgcagccaatccaaacggcagatactactggggtggacagtacacctgggacatggcaaagcatggcacagatgatggtgtagtatggatgaattggaaggggtcatggtactcaatgaggaagatgagtatgaagatcaggcccttcttcccacagcaatagtccccaatacgtagatttttgctcttctgtatgtgacaacatttttgtacattatgttattggaattttctttcatacattatattcctctaaaactctcaagcagacgtgagtgtgactttttgaaaaaagtataggataaattacattaaaatagcacatgattttcttttgttttcttcatttctcttgctcaccaagaagtaacaaaagtatagttttgacagagttggtgttcataatttcagttctagttgattgcgagaattttcaaataaggaagaggggtcttttatccttgtcgtaggaaaaccatgacggaaaggaaaaactgatgtttaaaagtccacttttaaaactatatttatttatgtaggatctgtcaaagaaaacttccaaaaagatttattaattaaaccagactctgttgcaataaaaaaaaaaaaaa

SEQ ID NO: 11457 - DNA, 2038 bp, Homo sapiens
gccatggggcgctgggcctgggtccccagcccctggcccccaccggggctgggccccttcctcctcctcctcctgctgctgctgctgctgccacgggggttccagccccagcctggcgggaaccgtacggagtccccagaacctaatgccacagcgacccctgcgatccccactatcctggtgacctctgtgacctctgagaccccagcaacaagtgctccagaggcagagggaccccaaagtggggggctcccgcccccgcccagggcagttccctcgagcagtagcccccaggcccaagcactcaccgaggacgggaggccctgcaggttccccttccgctacgggggccgcatgctgcatgcctgcacttcggagggcagtgcacacaggaagtggtgtgccacaactcacaactacgaccgggacagggcctggggctactgtgtggaggccaccccgcctccagggggcccagctgccctggatccctgtgcctccggcccctgcctcaatggaggctcctgctccaatacccaggacccccagtcctatcactgcagctgcccccgggccttcaccggcaaggactgcggcacagagaaatgctttgatgagacccgctacgagtacctggaggggggcgaccgctgggcccgcgtgcgccagggccacgtggaacagtgcgagtgcttcgggggccggacctggtgcgaaggcacccgacatacagcttgtctgagcagcccttgcctgaacgggggcacctgccacctgatcgtggccaccgggaccaccgtgtgtgcctgcccaccaggcttcgctggacggctctgcaacatcgagcctgatgagcgctgcttcttggggaacggcactgggtaccgtggcgtggccagcacctcagcctcgggcctcagctgcctggcctggaactccgatctgctctaccaggagctgcacgtggactccgtgggcgccgcggccctgctgggcctgggcccccatgcctactgccggaatccggacaatgacgagaggccctggtgctacgtggtgaaggacagcgcgctctcctgggagtactgccgcctggaggcctgcgaatccctcaccagagtccaactgtcaccggatctcctggcgaccctgcctgagccagcctccccggggcgccaggcctgcggcaggaggcacaagaagaggacgttcctgcggccacgtatcatcggcggctcctcctcgctgcccggctcgcacccctggctggccgccatctacatcggggacagcttctgcgccgggagcctggtccacacctgctgggtggtgtcggccgcccactgcttctcccacagcccccccagggacagcgtctccgtggtgctgggccagcacttcttcaaccgcacgacggacgtgacgcagaccttcggcatcgagaagtacatcccgtacaccctgtactcggtgttcaaccccagcgaccacgacctcgtcctgatccggctgaagaagaaaggggaccgctgtgccacacgctcgcagttcgtgcagcccatctgcctgcccgagcccggcagcaccttccccgcaggacacaagtgccagattgcgggctggggccacttggatgagaacgtgagcggctactccagctccctgcgggaggccctggtccccctggtcgccgaccacaagtgcagcagccctgaggtctacggcgccgacatcagccccaacatgctctgtgccggctacttcgactgcaagtccgacgcctgccagggggactcaggggggcccctggcctgcgagaagaacggcgtggcttacctctacggcatcatcagctggggtgacggctgcgggcggctccacaagccgggggtctacacccgcgtggccaactatgtggactggatcaacgaccggatacggcctcccaggcggcttgtggctccctcctgaccctccagcgggacaccctggttcccaccattccctgccttgctgacaataaagatatttccaagaa

SEQ ID NO: 11458 - DNA, 4034 bp, Homo sapiens
agggagaggcagagaggcaggcagcctgctgggctcttcctgctgttgaaaacttacccggcccttacagaggaaatcttcctcctctcttctgccctgaatgttttcccaaacatgaaggtgataagcttattcattttggtgggatttataggagagttccaaagtttttcaagtgcctcctctccagtcaactgccagtgggacttctatgccccttggtcagaatgcaatggctgtaccaagactcagactcgcaggcggtcagttgctgtgtatgggcagtatggaggccagccttgtgttggaaatgcttttgaaacacagtcctgtgaacctacaagaggatgtccaacagaggagggatgtggagagcgtttcaggtgcttttcaggtcagtgcatcagcaaatcattggtttgcaatggggattctgactgtgatgaagacagtgctgatgaagacagatgtgaggactcagaaaggagaccttcctgtgatatcgataaacctcctcctaacatagaacttactggaaatggttacaatgaactcactggccagtttaggaacagagtcatcaataccaaaagttttggtggtcaatgtagaaaggtgtttagtggggatggaaaagatttctacaggctgagtggaaatgtcctgtcctatacattccaggtgaaaataaataatgattttaattatgaattttacaatagtacttggtcttatgtaaaacatacgtcgacagaacacacatcatctagtcggaagcgctccttttttagatcttcatcatcttcttcacgcagttatacttcacataccaatgaaatccataaaggaaagagttaccaactgctggttgttgagaacactgttgaagtggctcagttcattaataacaatccagaatttttacaacttgctgagccattctggaaggagctttcccacctcccctctctgtatgactacagtgcctaccgaagattaatcgaccagtacgggacacattatctgcaatctgggtcgttaggaggagaatacagagttctattttatgtggactcagaaaaattaaaacaaaatgattttaattcagtcgaagaaaagaaatgtaaatcctcaggttggcattttgtcgttaaattttcaagtcatggatgcaaggaactggaaaacgctttaaaagctgcttcaggaacccagaacaatgtattgcgaggagaaccgttcatcagagggggaggtgcaggcttcatatctggccttagttacctagagctggacaatcctgctggaaacaaaaggcgatattctgcctgggcagaatctgtgactaatcttcctcaagtcataaaacaaaagctgacacctttatatgagctggtaaaggaagtaccttgtgcctctgtgaaaaaactatacctgaaatgggctcttgaagagtatctggatgaatttgacccctgtcattgccggccttgtcaaaatggtggtttggctactgttgaggggacccattgtctgtgccattgcaaaccgtacacatttggtgcggcgtgtgagcaaggagtcctcgtagggaatcaagcaggaggggttgatggaggttggagttgctggtcctcttggagcccctgtgtccaagggaagaaaacaagaagccgtgaatgcaataacccacctcccagtgggggtgggagatcctgcgttggagaaacgacagaaagcacacaatgcgaagatgaggagctggagcacttgaggttgcttgaaccacattgctttcctttgtctttggttccaacagaattctgtccatcacctcctgccttgaaagatggatttgttcaagatgaaggtacaatgtttcctgtggggaaaaatgtagtgtacacttgcaatgaaggatactctcttattggaaacccagtggccagatgtggagaagatttacggtggcttgttggggaaatgcattgtcagaaaattgcctgtgttctacctgtactgatggatggcatacagagtcacccccaaaaacctttctacacagttggtgagaaggtgactgtttcctgttcaggtggcatgtccttagaaggtccttcagcatttctctgtggctccagccttaagtggagtcctgagatgaagaatgcccgctgtgtacaaaaagaaaatccgttaacacaggcagtgcctaaatgtcagcgctgggagaaactgcagaattcaagatgtgtttgtaaaatgccctacgaatgtggaccttccttggatgtatgtgctcaagatgagagaagcaaaaggatactgcctctgacagtttgcaagatgcatgttctccactgtcagggtagaaattacacccttactggtagggacagctgtactctgcctgcctcagctgagaaagcttgtggtgcctgcccactgtggggaaaatgtgatgctgagagcagcaaatgtgtctgccgagaagcatcggagtgcgaggaagaagggtttagcatttgtgtggaagtgaacggcaaggagcagacgatgtctgagtgtgaggcgggcgctctgagatgcagagggcagagcatctctgtcaccagcataaggccttgtgctgcggaaacccagtaggctcctggaggccctggtcagcttgcttggaatccagcaggcagctggggctgagtgaaaacatctgcacaactgggcactggacagcttttccttcttctccagtgtctaccttcctcctcaactcccagccatctgtataaacacaatcctttgttctcccaaatctgaatcgaattactcttttgcctcctttttaatgtcagtaaggatatgagcctttgcacaggctggctgcgtgttcttgaaataggtgttaccttctctgggccttggttttttaaaatctgtaaaattagaggattgcactagagaaacttgaatgctccattcaggcctatcattttattaagtatgattgacacagcccatgggccagaacacactctacaaaatgactaggataacagaaagaacgtgatctcctgattagagagggtggttttcctcaatggaaccaaatataaagaggacttgaacaaaaatgacagatacaaactatttctatcctgagtagtaatctcacacttcatcctatagagtcaaccaccacagataggaattccttattctttttttaatttttttaagacagagtctcactttgttgcccaggctggagcgcagtggggtgatctcatctccctgcaacctccgcctcctgggttcaagcgattcttgtgcctcagcttcccaagcagctgggattacaggtgcccgccaccacgcccagctaatttttgcatttttagtagagatggggtttcaccatgttggccacgctcgtctccaactcctgacctcaggtaatccgcctgccttggcctcccaaagtgctgggattacagacatgaaccaccacgcctggctggaatacttactcttgtcgggagattgaaccactaaaatgttagagcagaattcattatgctgtggtcacaggggtgtcttgtctgagaacaaatacaattcagtcttctctttggggttttagtatgtgtcaaacataggactggaagtttgcccctgttcttttttcttttgaaagaacatcagttcatgcctgaggcatgagtgactgtgcatttgagaatagttttccctattctgtggatacagtcccagagttttcagggagtacacaggtagattagtttgaagcattgaccttttatttattccttatttctctttcatcaaaacaaaacagcagctgtgggaggagaaatgagagggcttaaatgaaatttaaaataagctatattatacaaatactatctctgtattgttctgaccctggtaaatatatttcaaaacttcagatgacaaggattagaacactcattaaagatgctattcttcagaaaaaaaaaaaaaaaaaaaaaaaa

SEQ ID NO: 11459 - DNA, 837 bp, Homo sapiens
gctcctcctgcacacctccctcgctctcccacaccactggcaccaggccccggacacccgctctgctgcaggagaatggctactcatcacacgctgtggatgggactggccctgctgggggtgctgggcgacctgcaggcagcaccggaggcccaggtctccgtgcagcccaacttccagcaggacaagttcctggggcgctggttcagcgcgggcctcgcctccaactcgagctggctccgggagaagaaggcggcgttgtccatgtgcaagtctgtggtggcccctgccacggatggtggcctcaacctgacctccaccttcctcaggaaaaaccagtgtgagacccgaaccatgctgctgcagcccgcggggtccctcggctcctacagctaccggagtccccactggggcagcacctactccgtgtcagtggtggagaccgactacgaccagtacgcgctgctgtacagccagggcagcaagggccctggcgaggacttccgcatggccaccctctacagccgaacccagacccccagggctgagttaaaggagaaattcaccgccttctgcaaggcccagggcttcacagaggataccattgtcttcctgccccaaaccgataagtgcatgacggaacaataggactccccagggctgaagctgggatcccggccagccaggtgacccccacgctctggatgtctctgctctgttccttccccgagcccctgccccggctccccgccaaagcaaccctgcccactcaggcttcatcctgcacaataaactccggaagcaagtcagtaaaaaaaaaaaaaaaaaaaaaaaaaa

SEQ ID NO: 11460 - DNA, 2809 bp, Homo sapiens
tcagcgatggcatttgcatggtggccctgtctcatcttggctctgctctccagcttggcagcctctggcttcccgagaagcccctttcggctgcttgggaaacggagcctcccggaaggggtggccaatggcatcgaggtctacagtaccaaaatcaactccaaggtgacctcccgttttgctcacaatgttgtcaccatgagagccgtcaaccgtgcagacacggccaaggaggtttcctttgatgtggagctgcccaagacggccttcatcaccaacttcaccttgaccatcgacggtgttacctaccctgggaatgtcaaggagaaggaagttgccaagaagcagtatgaaaaggctgtgtcccagggcaagacggccggcttggtcaaggcctctgggaggaagttggagaagttcacagtctcggtcaacgtggctgcaggcagcaaagtcaccttcgagctaacctacgaggagctgctgaagaggcacaagggcaagtacgagatgtacctcaaggtccagcctaagcaactggtcaaacactttgagatcgaggtagacatcttcgagcctcagggaatcagcatgctggatgctgaggcctctttcatcaccaacgacctcctgggaagcgccctcaccaagtccttctcagggaaaaagggccatgtgtccttcaagcccagcttagaccaacagcgttcatgcccaacctgtacagactccctcctcaatggagatttcactatcacctatgacgtgaacagagaatctcctggcaacgtgcagatagtcaatggctacttcgtgcacttctttgcacctcaaggccttccagtggtgcctaagaacgtggcctttgtgattgacatcagcggctccatggctggtcggaaattagagcagacaaaggaggcccttctcagaatcctggaagatatgaaagaggaagactatctgaatttcatcctgttcagtggagatgtgtccacatggaaagagcacttagtccaggccacgcccgagaacctccaggaggccaggacgtttgtgaagagcatggaggataaaggaatgaccaacatcaatgacgggctgctgaggggcatcagtatgctgaacaaggcccgagaggagcacagaatcccagagaggagcacctccattgtcatcatgctgactgatggggatgccaatgttggtgagagcagacccgaaaaaatccaagagaatgtgcggaatgccatcgggggcaagttccccttgtataacctgggctttggcaacaatctgaattataacttcctggagaacatggccctggagaaccatgggtttgcccggcgcatttatgaggactctgatgccgatttgcagttgcagggcttctatgaggaggtggccaacccactgctgacgggtgtggagatggagtaccccgagaacgctatcctggacctcacccagaacacttaccagcacttctacgatggctctgagatcgtggtggccgggcgcctggtggacgaggacatgaacagctttaaggcagatgtgaagggccatggggccaccaacgacctgaccttcacagaggaggtggacatgaaggagatggagaaggccctgcaggagcgggactacatcttcgggaattacattgagcggctctgggcctacctcaccattgagcagctgctggagaagcgcaagaacgcccatggcgaggagaaggagaacctcacggcccgggccctggacctgtccctcaagtatcactttgtgactccactgacctcaatggtggtgaccaagcctgaggacaacgaggatgagagggccattgccgacaagcctggggaagatgcagaagccacaccggtgagccccgccatgtcctacctgaccagctaccagcctcctcaaaacccctactactatgtggacggggatccccacttcatcatccaaattccggagaaagacgatgccctctgcttcaacatcgatgaagccccaggcacagtgctgcgccttattcaggatgcagtcacaggcctcacagttaatgggcagatcactggcgacaagagaggcagccctgactccaagaccagaaagacttactttggaaaactgggcatcgccaatgctcagatggacttccaggtggaggtgacaacggagaagatcaccctgtggaacagggccgtgccgagcactttcagctggctggacacagtcacagtcacgcaggatgggctgtccatgatgatcaacaggaagaacatggtggtctcctttggagatggggttaccttcgtggtcgtcctacaccaggtgtggaagaaacatcctgtccaccgtgactttctaggcttctacgtggtggacagtcaccggatgtcagcacagacgcatgggctgctggggcaattcttccaaccctttgactttaaagtgtctgacatccggccaggctctgaccccacaaagccagatgccacattggtggtgaagaaccatcagctgattgtcaccaggggctcccagaaagactacagaaaggatgccagcatcggcacgaaggttgtctgctggttcgtccacaacaacggagaagggctgattgatggtgtccacactgactacattgtccccaacctgttttgagtagacacaccagctcctgttgggatggatggcccggattttatggcatctggaacatgggcacagagaggggcctgtgggaggggctgggaaaataaagtccaaggtcgagaccagaaaaaaaaaaaaa

SEQ ID NO: 11461 - DNA, 4973 bp, Homo sapiens
cagctatcaaaaaggccataaggattttgtccccaaatttcacatgagctaccttgcttcaaactactgagatgaagggggcaagattatttgtccttctttctagtttatggagtgggggcattgggcttaacaacagtaagcattcttggactatacctgaggatgggaactctcagaagactatgccttctgcttcagttcctccaaataaaatacaaagtttgcaaatactgccaaccactcgggtcatgtcggcggagatagctacaactccagaggcaagaacttctgaagacagtcttcttaaatcaacactgcctccctcagaaacaagtgcacctgctgagggtgtgagaaatcaaactctcacatccacagagaaagcagaaggagtggtcaagttacagaatcttaccctcccaaccaacgctagcatcaagttcaatcctggagcagaatcagtggtcctttccaattctacactgaaatttcttcagagctttgccagaaagtcaaatgaacaagcaacttctctaaacacagttggaggcactggaggcattggaggcgttggaggcactggaggcgtgggaaatcgagccccacgggaaacatacctcagccggggtgacagcagttccagccaaagaactgactaccaaaaatcaaatttcgaaacaactagaggaaagaattggtgtgcttatgtacataccaggttatctcccacagtgatattggacaaccaggtcacttatgtcccaggtgggaaaggaccttgtggctggaccggtggatcctgtcctcagagatctcagaagatatccaatcctgtctataggatgcaacataaaattgtcacctcattggattggaggtgctgtcctggatacagtgggccgaaatgtcaactaagagcccaggaacagcaaagtttgatacacaccaaccaggctgaaagtcatacagctgttggcagaggagtagctgagcagcagcagcagcaaggctgtggtgacccagaagtgatgcaaaaaatgactgatcaggtgaactaccaggcaatgaaactgactcttctgcagaagaagattgacaatatttctttgactgtgaatgatgtaaggaacacttactcctccctagaaggaaaagtcagcgaagataaaagcagagaatttcaatctcttctaaaaggtctaaaatccaaaagcattaatgtactgataagagacatagtaagagaacaatttaaaatttttcaaaatgacatgcaagagactgtagcacagctcttcaagactgtatcaagtctatcagaggacctcgaaagcaccaggcaaataattcaaaaagttaatgaatctgtggtttcaatagcagcccagcaaaagtttgttttggtgcaagagaatcggcccactttgactgatatagtggaactaaggaatcacattgtgaatgtaaggcaagaaatgactcttacatgtgagaagcctattaaagaactagaagtaaagcagactcatttagaaggtgctctagaacaggaacactcaagaagcattctgtattatgaatccctcaataaaactctttctaaattgaaggaagtacatgagcagcttttatcaactgaacaggtatcagaccagaagaatgctccagctgctgagtcagttagcaataatgtcactgagtacatgtctactttacatgaaaatataaagaagcagagtttgatgatgctgcaaatgtttgaagatttgcacattcaagaaagcaagattaacaatctcaccgtctctttggagatggagaaagagtctctcagaggtgaatgtgaagacatgttatccaaatgcagaaatgattttaaatttcaacttaaggacacagaagagaatttacatgtgttaaatcaaacattggctgaagttctctttccaatggacaataagatggacaaaatgagtgagcaactaaatgatttgacttatgatatggagatccttcaacccttgcttgagcagggagcatcactcagacagacaatgacatatgaacaaccaaaggaagcaatagtgataaggaaaaagatagaaaatctgactagtgctgtcaatagtctaaattttattatcaaagaacttacaaaaagacacaacttacttagaaatgaagtacagggtcgtgatgatgccttagaaagacgtatcaatgaatatgccttagaaatggaagatggcctcaataagacaatgactattataaataatgctattgatttcattcaagataactatgccctaaaagagactttaagtactattaaggataatagtgagatccatcataaatgtacctccgatatggaaactattttgacatttattcctcagttccaccgtctgaatgattctattcagactttggtcaatgacaatcagagatataactttgttttgcaagtcgccaagacccttgcaggtattcccagagatgagaaactaaatcagtccaacttccaaaagatgtatcaaatgttcaatgaaaccacttcccaagtgagaaaataccagcaaaatatgagtcatttggaagaaaaactactcttaactaccaagatttccaaaaattttgagactcggttgcaagacattgagtctaaagttacccagacgctcataccttattatatttcagttaaaaaaggcagtgtagttacaaatgagagagatcaggctcttcaactgcaagtattaaattccagatttaaggcgttggaagcaaaatctatccatctttcaattaacttcttttcgcttaacaaaactctccacgaagttttaacaatgtgtcacaatgcttctacaagtgtgtcagaactgaatgctaccatccctaagtggataaaacattccctgccagatattcaacttcttcagaaaggtctaacagaatttgtggaaccaataattcaaataaaaactcaagctgccctatctaatttaacttgttgtatagatcgatcgttgcctggtagtctggcaaatgttgtcaagtctcagaagcaagtaaaatcattgccaaagaaaattaacgcacttaagaaaccaacggtaaatcttaccacagtcctgataggccggactcaaagaaacacggacaacataatatatcctgaggagtattcaagctgtagtcggcatccgtgccaaaatgggggcacgtgcataaatggaagaactagctttacctgtgcctgcagacatccttttactggtgacaactgcactatcaagcttgtggaagaaaatgctttagctccagatttttccaaaggatcttacagatatgcacccatggtggcattttttgcatctcatacgtatggaatgactatacctggtcctatcctgtttaataacttggatgtcaattatggagcttcatataccccaagaactggaaaatttagaattccgtatcttggagtatatgttttcaagtacaccatcgagtcatttagtgctcatatttctggatttttagtggttgatggaatagacaagcttgcatttgagtctgaaaatattaacagtgaaatacactgtgatagggttttaactggggatgccttattagaattaaattatgggcaggaagtctggttacgacttgcaaaaggaacaattccagccaagtttccccctgttactacatttagtggctatttattatatcgtacataagttagtatgaaaaacagactatcacctttattgagaaacagccagtgttttcatttatctttgcttgcacatctgctctgttttggtttttctacaggaaatgaaaatcaacttgtttttttaatatgagtaaacttgtatgtctattttataaaattatttgaatattgtttaatgtctgaatatgaaagagttcttgatcctaaagaaatttagtggcacagaaaacaaagtgaatttgttagcataattattcctattcttatttcttcattttaagtcattgcaatggaaagtaatattataaaatggtaattacaacatattatcagtcacagttttctttccaattaaacacttaacttttgttattccctgtatataaatatataacacacattttctagattcacaaatttaaataaattactcaaaaaatgaaaattgattttgtaaacttttatttttactctttacgttgagttgatcaattttccatactaagattttcattcagaatcaaaattaagaaagttggactgaaaatatgaaaaatgcttaactattgttctcttcctataattctctaattataacatagtaatttacatgtagttggacatgtacactcaagtctaagaatatatgagtggatcatttaccgccccccgccccacaacatctataaggggcaaaaagtctttttctaataagtattcttctatggtagtacctacagatctgcccttcttcttctaaagggtaagtcataatctgtgtaatactacaatttatgggatgctcactatgccctgtttctcttctaaacaatttacatgtaatgtctcattcctcacaataacccttgtaaagtgggcatgattaccatgatttttatagttgaagaacctaagacacagagaccaaggcccatgagctcatagggctgaggcaggatttggaatcaggccatgtcttctccagagcccacatccatcctttctctatattgcctcccacagatgtgctaaaatttatttaactaatcctttatcctctatttgtgttgtctcccattttttattattacaatattactgtggtgaacatgcttaaaaatacattccttggatatctgacaacgtgtttctgaaaaacagattttcataagtaataataaaaataataataaaaaagttttggtatggtaaaaaa

SEQ ID NO: 11462 - DNA, 2324 bp, Homo sapiens
ctccctttgggcaaggacctgagacccttgtgctaagtcaagaggctcaatgggctgcagaagaactagagaaggaccaagcaaagccatgatatttccatggaaatgtcagagcacccagagggacttatggaacatcttcaagttgtgggggtggacaatgctctgttgtgatttcctggcacatcatggaaccgactgctggacttaccattattctgaaaaacccatgaactggcaaagggctagaagattctgccgagacaattacacagatttagttgccatacaaaacaaggcggaaattgagtatctggagaagactctgcctttcagtcgttcttactactggataggaatccggaagataggaggaatatggacgtgggtgggaaccaacaaatctcttactgaagaagcagagaactggggagatggtgagcccaacaacaagaagaacaaggaggactgcgtggagatctatatcaagagaaacaaagatgcaggcaaatggaacgatgacgcctgccacaaactaaaggcagccctctgttacacagcttcttgccagccctggtcatgcagtggccatggagaatgtgtagaaatcatcaataattacacctgcaactgtgatgtggggtactatgggccccagtgtcagtttgtgattcagtgtgagcctttggaggccccagagctgggtaccatggactgtactcaccctttgggaaacttcagcttcagctcacagtgtgccttcagctgctctgaaggaacaaacttaactgggattgaagaaaccacctgtggaccatttggaaactggtcatctccagaaccaacctgtcaagtgattcagtgtgagcctctatcagcaccagatttggggatcatgaactgtagccatcccctggccagcttcagctttacctctgcatgtaccttcatctgctcagaaggaactgagttaattgggaagaagaaaaccatttgtgaatcatctggaatctggtcaaatcctagtccaatatgtcaaaaattggacaaaagtttctcaatgattaaggagggtgattataaccccctcttcattccagtggcagtcatggttactgcattctctgggttggcatttatcatttggctggcaaggagattaaaaaaaggcaagaaatccaagagaagtatgaatgacccatattaaatcgcccttggtgaaagaaaattcttggaatactaaaaatcatgagatcctttaaatccttccatgaaacgttttgtgtggtggcacctcctacgtcaaacatgaagtgtgtttccttcagtgcatctgggaagatttctacctgaccaacagttccttcagcttccatttcgcccctcatttatccctcaacccccagcccacaggtgtttatacagctcagctttttgtcttttctgaggagaaacaaataagaccataaagggaaaggattcatgtggaatataaagatggctgactttgctctttcttgactcttgttttcagtttcaattcagtgctgtacttgatgacagacacttctaaatgaagtgcaaatttgatacatatgtgaatatggactcagttttcttgcagatcaaatttcacgtcgtcttctgtatactgtggaggtacactcttatagaaagttcaaaaagtctacgctctcctttctttctaactccagtgaagtaatggggtcctgctcaagttgaaagagtcctatttgcactgtagcctcgccgtctgtgaattggaccatcctatttaactggcttcagcctccccaccttcttcagccacctctctttttcagttggctgacttccacacctagcatctcatgagtgccaagcaaaaggagagaagagagaaatagcctgcgctgttttttagtttgggggttttgctgtttccttttatgagacccattcctatttcttatagtcaatgtttcttttatcacgatattattagtaagaaaacatcactgaaatgctagctgcaagtgacatctctttgatgtcatatggaagagttaaaacaggtggagaaattccttgattcacaatgaaatgctctcctttcccctgcccccagaccttttatccacttacctagattctacatattctttaaatttcatctcaggcctccctcaaccccaccacttcttttataactagtcctttactaatccaacccatgatgagctcctcttcctggcttcttactgaaaggttaccctgtaacatgcaattttgcatttgaataaagcctgctttttaagtgttaa

SEQ ID NO: 11463 - DNA, 6914 bp, Homo sapiens
tcattgcagctgggacagcccggagtgtggttagcagctcggcaagcgctgcccaggtcctggggtggtggcagccagcgggagcaggaaaggaagcatgttcccaggctgcccacgcctctgggtcctggtggtcttgggcaccagctgggtaggctgggggagccaagggacagaagcggcacagctaaggcagttctacgtggctgctcagggcatcagttggagctaccgacctgagcccacaaactcaagtttgaatctttctgtaacttcctttaagaaaattgtctacagagagtatgaaccatattttaagaaagaaaaaccacaatctaccatttcaggacttcttgggcctactttatatgctgaagtcggagacatcataaaagttcactttaaaaataaggcagataagcccttgagcatccatcctcaaggaattaggtacagtaaattatcagaaggtgcttcttaccttgaccacacattccctgcagagaagatggacgacgctgtggctccaggccgagaatacacctatgaatggagtatcagtgaggacagtggacccacccatgatgaccctccatgcctcacacacatctattactcccatgaaaatctgatcgaggatttcaactctgggctgattgggcccctgcttatctgtaaaaaagggaccctaactgagggtgggacacagaagacgtttgacaagcaaatcgtgctactatttgctgtgtttgatgaaagcaagagctggagccagtcatcatccctaatgtacacagtcaatggatatgtgaatgggacaatgccagatataacagtttgtgcccatgaccacatcagctggcatctgctgggaatgagctcggggccagaattattctccattcatttcaacggccaggtcctggagcagaaccatcataaggtctcagccatcacccttgtcagtgctacatccactaccgcaaatatgactgtgggcccagagggaaagtggatcatatcttctctcaccccaaaacatttgcaagctgggatgcaggcttacattgacattaaaaactgcccaaagaaaaccaggaatcttaagaaaataactcgtgagcagaggcggcacatgaagaggtgggaatacttcattgctgcagaggaagtcatttgggactatgcacctgtaataccagcgaatatggacaaaaaatacaggtctcagcatttggataatttctcaaaccaaattggaaaacattataagaaagttatgtacacacagtacgaagatgagtccttcaccaaacatacagtgaatcccaatatgaaagaagatgggattttgggtcctattatcagagcccaggtcagagacacactcaaaatcgtgttcaaaaatatggccagccgcccctatagcatttaccctcatggagtgaccttctcgccttatgaagatgaagtcaactcttctttcacctcaggcaggaacaacaccatgatcagagcagttcaaccaggggaaacctatacttataagtggaacatcttagagtttgatgaacccacagaaaatgatgcccagtgcttaacaagaccatactacagtgacgtggacatcatgagagacatcgcctctgggctaataggactacttctaatctgtaagagcagatccctggacaggcgaggaatacagagggcagcagacatcgaacagcaggctgtgtttgctgtgtttgatgagaacaaaagctggtaccttgaggacaacatcaacaagttttgtgaaaatcctgatgaggtgaaacgtgatgaccccaagttttatgaatcaaacatcatgagcactatcaatggctatgtgcctgagagcataactactcttggattctgctttgatgacactgtccagtggcacttctgtagtgtggggacccagaatgaaattttgaccatccacttcactgggcactcattcatctatggaaagaggcatgaggacaccttgaccctcttccccatgcgtggagaatctgtgacggtcacaatggataatgttggaacttggatgttaacttccatgaattctagtccaagaagcaaaaagctgaggctgaaattcagggatgttaaatgtatcccagatgatgatgaagactcatatgagatttttgaacctccagaatctacagtcatggctacacggaaaatgcatgatcgtttagaacctgaagatgaagagagtgatgctgactatgattaccagaacagactggctgcagcattaggaattaggtcattccgaaactcatcattgaaccaggaagaagaagagttcaatcttactgccctagctctggagaatggcactgaattcgtttcttcgaacacagatataattgttggttcaaattattcttccccaagtaatattagtaagttcactgtcaataaccttgcagaacctcagaaagccccttctcaccaacaagccaccacagctggttccccactgagacacctcattggcaagaactcagttctcaattcttccacagcagagcattccagcccatattctgaagaccctatagaggatcctctacagccagatgtcacagggatacgtctactttcacttggtgctggagaattcagaagtcaagaacatgctaagcgtaagggacccaaggtagaaagagatcaagcagcaaagcacaggttctcctggatgaaattactagcacataaagttgggagacacctaagccaagacactggttctccttccggaatgaggccctgggaggaccttcctagccaagacactggttctccttccagaatgaggccctgggaggaccctcctagtgatctgttactcttaaaacaaagtaactcatctaagattttggttgggagatggcatttggcttctgagaaaggtagctatgaaataatccaagatactgatgaagacacagctgttaacaattggctgatcagcccccagaatgcctcacgtgcttggggagaaagcacccctcttgccaacaagcctggaaagcagagtggccacccaaagtttcctagagttagacataaatctctacaagtaagacaggatggaggaaagagtagactgaagaaaagccagtttctcattaagacacgaaaaaagaaaaaagagaagcacacacaccatgctcctttatctccgaggacctttcaccctctaagaagtgaagcctacaacacattttcagaaagaagacttaagcattcgttggtgcttcataaatccaatgaaacatctcttcccacagacctcaatcagacattgccctctatggattttggctggatagcctcacttcctgaccataatcagaattcctcaaatgacactggtcaggcaagctgtcctccaggtctttatcagacagtgcccccagaggaacactatcaaacattccccattcaagaccctgatcaaatgcactctacttcagaccccagtcacagatcctcttctccagagctcagtgaaatgcttgagtatgaccgaagtcacaagtccttccccacagatataagtcaaatgtccccttcctcagaacatgaagtctggcagacagtcatctctccagacctcagccaggtgaccctctctccagaactcagccagacaaacctctctccagacctcagccacacgactctctctccagaactcattcagagaaacctttccccagccctcggtcagatgcccatttctccagacctcagccatacaaccctttctccagacctcagccatacaaccctttctttagacctcagccagacaaacctctctccagaactcagtcagacaaacctttctccagccctcggtcagatgcccctttctccagacctcagccatacaaccatttctctagacttcagccagacaaacctctctccagaactcagccatatgactctctctccagaactcagtcagacaaacctttccccagccctcggtcagatgcccatttctccagacctcagccatacaaccctttctctagacttcagccagacaaacctctctccagaactcagtcaaacaaacctttccccagccctcggtcagatgcccctttctccagaccccagccatacaaccctttctctagacctcagccagacaaacctctctccagaactcagtcagacaaacctttccccagacctcagtgagatgcccctctttgcagatctcagtcaaattccccttaccccagacctcgaccagatgacactttctccagaccttggtgagacagatctttccccaaactttggtcagatgtccctttccccagacctcagccaggtgactctctctccagacatcagtgacaccacccttctcccggatctcagccagatatcacctcctccagaccttgatcagatattctacccttctgaatctagtcagtcattgcttcttcaagaatttaatgagtcttttccttatccagaccttggtcagatgccatctccttcatctcctactctcaatgatacttttctatcaaaggaatttaatccactggttatagtgggcctcagtaaagatggtacagattacattgagatcattccaaaggaagaggtccagagcagtgaagatgactatgctgaaattgattatgtgccctatgatgacccctacaaaactgatgttaggacaaacatcaactcctccagagatcctgacaacattgcagcatggtacctccgcagcaacaatggaaacagaagaaattattacattgctgctgaagaaatatcctgggattattcagaatttgtacaaagggaaacagatattgaagactctgatgatattccagaagataccacatataagaaagtagtttttcgaaagtacctcgacagcacttttaccaaacgtgatcctcgaggggagtatgaagagcatctcggaattcttggtcctattatcagagctgaagtggatgatgttatccaagttcgttttaaaaatttagcatccagaccgtattctctacatgcccatggactttcctatgaaaaatcatcagagggaaagacttatgaagatgactctcctgaatggtttaaggaagataatgctgttcagccaaatagcagttatacctacgtatggcatgccactgagcgatcagggccagaaagtcctggctctgcctgtcgggcttgggcctactactcagctgtgaacccagaaaaagatattcactcaggcttgataggtcccctcctaatctgccaaaaaggaatactacataaggacagcaacatgcctgtggacatgagagaatttgtcttactatttatgacctttgatgaaaagaagagctggtactatgaaaagaagtcccgaagttcttggagactcacatcctcagaaatgaaaaaatcccatgagtttcacgccattaatgggatgatctacagcttgcctggcctgaaaatgtatgagcaagagtgggtgaggttacacctgctgaacataggcggctcccaagacattcacgtggttcactttcacggccagaccttgctggaaaatggcaataaacagcaccagttaggggtctggccccttctgcctggttcatttaaaactcttgaaatgaaggcatcaaaacctggctggtggctcctaaacacagaggttggagaaaaccagagagcagggatgcaaacgccatttcttatcatggacagagactgtaggatgccaatgggactaagcactggtatcatatctgattcacagatcaaggcttcagagtttctgggttactgggagcccagattagcaagattaaacaatggtggatcttataatgcttggagtgtagaaaaacttgcagcagaatttgcctctaaaccttggatccaggtggacatgcaaaaggaagtcataatcacagggatccagacccaaggtgccaaacactacctgaagtcctgctataccacagagttctatgtagcttacagttccaaccagatcaactggcagatcttcaaagggaacagcacaaggaatgtgatgtattttaatggcaattcagatgcctctacaataaaagagaatcagtttgacccacctattgtggctagatatattaggatctctccaactcgagcctataacagacctacccttcgattggaactgcaaggttgtgaggtaaatggatgttccacacccctgggtatggaaaatggaaagatagaaaacaagcaaatcacagcttcttcgtttaagaaatcttggtggggagattactgggaacccttccgtgcccgtctgaatgcccagggacgtgtgaatgcctggcaagccaaggcaaacaacaataagcagtggctagaaattgatctactcaagatcaagaagataacggcaattataacacagggctgcaagtctctgtcctctgaaatgtatgtaaagagctataccatccactacagtgagcagggagtggaatggaaaccatacaggctgaaatcctccatggtggacaagatttttgaaggaaatactaataccaaaggacatgtgaagaactttttcaaccccccaatcatttccaggtttatccgtgtcattcctaaaacatggaatcaaagtattgcacttcgcctggaactctttggctgtgatatttactagaattgaacattcaaaaacccctggaagagactctttaagacctcaaaccatttagaatgggcaatgtattttacgctgtgttaaatgttaacagttttccactatttctctttcttttctattagtgaataaaattttatac

SEQ ID NO: 11464 - DNA, 2125 bp, Homo sapiens
ggcacagcagacgtaccctccctcgctgcctgcctgcggcctgccctgcatgcaggatggccctgaggaaaggaggcctggccctggcgctgctgctgctgtcctgggtggcactgggcccccgcagcctggagggagcagaccccggaacgccgggggaagccgagggcccagcgtgcccggccgcctgtgtctgcagctacgatgacgacgcggatgagctcagcgtcttctgcagctccaggaacctcacgcgcctgcctgacggagtcccgggcggcacccaagccctgtggctggacggcaacaacctctcgtccgtccccccggcagccttccagaacctctccagcctgggcttcctcaacctgcagggcggccagctgggcagcctggagccacaggcgctgctgggcctagagaacctgtgccacctgcacctggagcggaaccagctgcgcagcctggcactcggcacgtttgcacacacgcccgcgctggcctcgctcggcctcagcaacaaccgtctgagcaggctggaggacgggctcttcgagggcctcggcagcctctgggacctcaacctcggctggaatagcctggcggtgctccccgatgcggcgttccgcggcctgggcagcctgcgcgagctggtgctggcgggcaacaggctggcctacctgcagcccgcgctcttcagcggcctggccgagctccgggagctggacctgagcaggaacgcgctgcgggccatcaaggcaaacgtgttcgtgcagctgccccggctccagaaactctacctggaccgcaacctcatcgctgccgtggccccgggcgccttcctgggcctgaaggcgctgcgatggctggacctgtcccacaaccgcgtggctggcctcctggaggacacgttccccggtctgctgggcctgcgtgtgctgcggctgtcccacaacgccatcgccagcctgcggccccgcaccttcaaggacctgcacttcctggaggagctgcagctgggccacaaccgcatccggcagctggctgagcgcagctttgagggcctggggcagcttgaggtgctcacgctagaccacaaccagctccaggaggtcaaggcgggcgctttcctcggcctcaccaacgtggcggtcatgaacctctctgggaactgtctccggaaccttccggagcaggtgttccggggcctgggcaagctgcacagcctgcacctggagggcagctgcctgggacgcatccgcccgcacaccttcaccggcctctcggggctccgccgactcttcctcaaggacaacggcctcgtgggcattgaggagcagagcctgtgggggctggcggagctgctggagctcgacctgacctccaaccagctcacgcacctgccccaccgcctcttccagggcctgggcaagctggagtacctgctgctctcccgcaaccgcctggcagagctgccggcggacgccctgggccccctgcagcgggccttctggctggacgtctcgcacaaccgcctggaggcattgcccaacagcctcttggcaccactggggcggctgcgctacctcagcctcaggaacaactcactgcggaccttcacgccgcagcccccgggcctggagcgcctgtggctggagggtaacccctgggactgtggctgccctctcaaggcgctgcgggacttcgccctgcagaaccccagtgctgtgccccgcttcgtccaggccatctgtgagggggacgattgccagccgcccgcgtacacctacaacaacatcacctgtgccagcccgcccgaggtcgtggggctcgacctgcgggacctcagcgaggcccactttgctccctgctgaccaggtccccggactcaagccccggactcaggcccccacctggctcaccttgtgctggggacaggtcctcagtgtcctcaggggcctgcccagtgcacttgctggaagacgcaagggcctgatggggtggaaggcatggcggcccccccagctgtcatcaattaaaggcaaaggcaatcgaaaaaaaaaaaaaaaaaaaaaaaaaaaaaaaaaaaaaaaaaaaaaaaaaaaaaaaaaaaaaaaaaaaaaaa

SEQ ID NO: 11465 - DNA, 3551 bp, Homo sapiens
ttgccttgtgttagctagcaataagaaaagaagctttgtttggattaacatatataccctcttcattctgcatacctattttttccccaataatttgcagcttaggtccgaggacaccacaaactctgcttaaagggcctggaggctctcaaggcatggccagacgctctgtcttgtacttcatcctgctgaatgctctgatcaacaagggccaagcctgcttctgtgatcactatgcatggactcagtggaccagctgctcaaaaacttgcaattctggaacccagagcagacacagacaaatagtagtagataagtactaccaggaaaacttttgtgaacagatttgcagcaagcaggagactagagaatgtaactggcaaagatgccccatcaactgcctcctgggagattttggaccatggtcagactgtgacccttgtattgaaaaacagtctaaagttagatctgtcttgcgtcccagtcagtttgggggacagccatgcactgagcctctggtagcctttcaaccatgcattccatctaagctctgcaaaattgaagaggctgactgcaagaataaatttcgctgtgacagtggccgctgcattgccagaaagttagaatgcaatggagaaaatgactgtggagacaattcagatgaaagggactgtgggaggacaaaggcagtatgcacacggaagtataatcccatccctagtgtacagttgatgggcaatgggtttcattttctggcaggagagcccagaggagaagtccttgataactctttcactggaggaatatgtaaaactgtcaaaagcagtaggacaagtaatccataccgtgttccggccaatctggaaaatgtcggctttgaggtacaaactgcagaagatgacttgaaaacagatttctacaaggatttaacttctcttggacacaatgaaaatcaacaaggctcattctcaagtcagggggggagctctttcagtgtaccaattttttattcctcaaagagaagtgaaaatatcaaccataattctgccttcaaacaagccattcaagcctctcacaaaaaggattctagttttattaggatccataaagtgatgaaagtcttaaacttcacaacgaaagctaaagatctgcacctttctgatgtctttttgaaagcacttaaccatctgcctctagaatacaactctgctttgtacagccgaatattcgatgactttgggactcattacttcacctctggctccctgggaggcgtgtatgaccttctctatcagtttagcagtgaggaactaaagaactcaggtttaaccgaggaagaagccaaacactgtgtcaggattgaaacaaagaaacgcgttttatttgctaagaaaacaaaagtggaacataggtgcaccaccaacaagctgtcagagaaacatgaaggttcatttatacagggagcagagaaatccatatccctgattcgaggtggaaggagtgaatatggagcagctttggcatgggagaaagggagctctggtctggaggagaagacattttctgagtggttagaatcagtgaaggaaaatcctgctgtgattgactttgagcttgcccccatcgtggacttggtaagaaacatcccctgtgcagtgacaaaacggaacaacctcaggaaagctttgcaagagtatgcagccaagttcgatccttgccagtgtgctccatgccctaataatggccgacccaccctctcagggactgaatgtctgtgtgtgtgtcagagtggcacctatggtgagaactgtgagaaacagtctccagattataaatccaatgcagtagacggacagtggggttgttggtcttcctggagtacctgtgatgctacttataagagatcgagaacccgagaatgcaataatcctgccccccaacgaggagggaaacgctgtgagggggagaagcgacaagaggaagactgcacattttcaatcatggaaaacaatggacaaccatgtatcaatgatgatgaagaaatgaaagaggtcgatcttcctgagatagaagcagattccgggtgtcctcagccagttcctccagaaaatggatttatccggaatgaaaagcaactatacttggttggagaagatgttgaaatttcatgccttactggctttgaaactgttggataccagtacttcagatgcttaccagacgggacctggagacaaggggatgtggaatgccaacggacggagtgcatcaagccagttgtgcaggaagtcctgacaattacaccatttcagagattgtatagaattggtgaatccattgagctaacttgccccaaaggctttgttgttgctgggccatcaaggtacacatgccaggggaattcctggacaccacccatttcaaactctctcacctgtgaaaaagatactctaacaaaattaaaaggccattgtcagctgggacagaaacaatcaggatctgaatgcatttgtatgtctccagaagaagactgtagccatcattcagaagatctctgtgtgtttgacacagactccaacgattactttacttcacccgcttgtaagtttttggctgagaaatgtttaaataatcagcaactccattttctacatattggttcctgccaagacggccgccagttagaatggggtcttgaaaggacaagactttcatccaacagcacaaagaaagaatcctgtggctatgacacctgctatgactgggaaaaatgttcagcctccacttccaaatgtgtctgcctattgcccccacagtgcttcaagggtggaaaccaactctactgtgtcaaaatgggatcatcaacaagtgagaaaacattgaacatctgtgaagtgggaactataagatgtgcaaacaggaagatggaaatactgcatcctggaaagtgtttggcctagcacaattactgctaggcccagcacaatgaacagatttaccatcccgaagaaccaactcctacaaatgagaattcttgcacaaacagcagactggcatgctcaaagttactgacaaaaattattttctgttagtttgagatcattattctcccctgactctcctgtttgggcatgtcttattcagttccagctcatgacgccctgtagcatacccctaggtaccaacttccacagcagtctcgtaaattctcctgttcacattgtacaaaaataatgtgacttctgaggcccttatgtagcctgtgacattaagcattctcacaattagaaataagaataaaacccataattttcttcaatgagttaataaacagaaatctccagaacctctgaaacacattcttgaagcccagctttcatatcttcattcaacaaataatttctgagtgtgtatacaggatgtcaagtactgaccaaagtcctgagaactcggcagataataaaacagacaaaagcctttgccttcatgaagcatacattcattcaggggtagacacacaaaaaatgaaataaacaggtaaaatatgtagc

SEQ ID NO: 11466 - DNA, 1625 bp, Homo sapiens
gggaactgaaacttttgtattagcatactactgagaatatctaacatgttgttactaatcaatgtcattctgaccttgtgggtttcctgtgctaatggacaagtgaaaccttgtgattttccagacattaaacatggaggtctatttcatgagaatatgcgtagaccatactttccagtagctgtaggaaaatattactcctattactgtgatgaacattttgagactccttcaggaagttactgggattacattcattgcacacaaaatgggtggtcaccagcagtaccatgtctcagaaaatgttattttccttatttggaaaatggatataatcaaaattatggaagaaagtttgtacagggtaactctacagaagttgcctgccatcctggctacggtcttccaaaagcgcagaccacagttacatgtacggagaaaggctggtctcctactcccagatgcatccgtgtcagaacatgctcaaaatcagatatagaaattgaaaatggattcatttccgaatcttcctctatttatattttaaataaagaaatacaatataaatgtaaaccaggatatgcaacagcagatggaaattcttcaggatcaattacatgtttgcaaaatggatggtcagcacaaccaatttgcattaattcttcagaaaagtgtgggcctcctccacctattagcaatggtgataccacctcctttctactaaaagtgtatgtgccacagtcaagagtcgagtaccaatgccagccctactatgaacttcagggttctaattatgtaacatgtagtaatggagagtggtcggaaccaccaagatgcatacatccatgtataataactgaagaaaacatgaataaaaataacataaagttaaaaggaagaagtgacagaaaatattatgcaaaaacaggggataccattgaatttatgtgtaaattgggatataatgcaaatacatcaattctatcatttcaagcagtgtgtcgggaagggatagtggaataccccagatgcgaataaggcagcattgttaccctaaatgtatgtccaacttccacttttccacttctcactcttatggtctcaaagcttgcaaagatagcttctgatattgttgtaatttctactttatttcaaagaaaattaatataatagtttcaatttgcaacttaatatattctcaaaaatatattaaaacaaactaaattattgcttatgcttgtactaaaataataaaaactactcttatattggacttcttatcaatgaattagtaagtatagagacagacagctgaatggctttctgcatattgtatagtatacctagacatagaaacaaaatgactttagattttatttggggaagtaataataccataaaattagatattaaaattgtaagtgaagataaacacactatagtattcccttattgtagccatggtcctctagatgcagttaaccaaatagggtcatttttattaaaagtagtgtttcctggcaaacactgacattacatcattatcatgatttaaaggaaatagtactagagaaggtgaattattatcattttcctgtaaaaaaaaaaaaaaaaaaaaaaaaaaa

SEQ ID NO: 11467 - DNA, 615 bp, Homo sapiens
acagaagtccactcattcttggcaggatggcttctcatcgtctgctcctcctctgccttgctggactggtatttgtgtctgaggctggccctacgggcaccggtgaatccaagtgtcctctgatggtcaaagttctagatgctgtccgaggcagtcctgccatcaatgtggccgtgcatgtgttcagaaaggctgctgatgacacctgggagccatttgcctctgggaaaaccagtgagtctggagagctgcatgggctcacaactgaggaggaatttgtagaagggatatacaaagtggaaatagacaccaaatcttactggaaggcacttggcatctccccattccatgagcatgcagaggtggtattcacagccaacgactccggcccccgccgctacaccattgccgccctgctgagcccctactcctattccaccacggctgtcgtcaccaatcccaaggaatgagggacttctcctccagtggacctgaaggacgagggatgggatttcatgtaaccaagagtattccatttttactaaagcactgttttcacctcatatgctatgttagaagtccaggcagagacaataaaacattcctgtgaaaggc

SEQ ID NO: 11468 - DNA, 1026 bp, Homo sapiens
agcaagatggatctactgtggatcctgccctccctgtggcttctcctgcttggggggcctgcctgcctgaagacccaggaacaccccagctgcccaggacccagggaactggaagccagcaaagttgtcctcctgcccagttgtcccggagctccaggaagtcctggggagaagggagccccaggtcctcaagggccacctggaccaccaggcaagatgggccccaagggtgagccaggccccagaaactgccgggagctgttgagccagggcgccaccttgagcggctggtaccatctgtgcctacctgagggcagggccctcccagtcttttgtgacatggacaccgaggggggcggctggctggtgtttcagaggcgccaggatggttctgtggatttcttccgctcttggtcctcctacagagcaggttttgggaaccaagagtctgaattctggctgggaaatgagaatttgcaccagcttactctccagggtaactgggagctgcgggtagagctggaagactttaatggtaaccgtactttcgcccactatgcgaccttccgcctcctcggtgaggtagaccactaccagctggcactgggcaagttctcagagggcactgcaggggattccctgagcctccacagtgggaggccctttaccacctatgacgctgaccacgattcaagcaacagcaactgtgcagtgattgtccacggtgcctggtggtatgcatcctgttaccgatcaaatctcaatggtcgctatgcagtgtctgaggctgccgcccacaaatatggcattgactgggcctcaggccgtggtgtgggccacccctaccgcagggttcggatgatgcttcgatagggcactctggcagccagtgcccttatctctcctgtacagcttccggatcgtcagccaccttgcctttgccaaccacctctgcttgcctgtccacatttaaaaataaaatcattttagccctttcaaaaaaaaaaaaaaaaaaaaaaaaaaaaa

SEQ ID NO: 11469 - DNA, 1059 bp, Homo sapiens
agcaagatggatctactgtggatcctgccctccctgtggcttctcctgcttggggggcctgcctgcctgaagacccaggaacaccccagctgcccaggacccagggaactggaagccagcaaagttgtcctcctgcccagttgtcccggagctccaggaagtcctggggagaagggagccccaggtcctcaagggccacctggaccaccaggcaagatgggccccaagggtgagccaggagatccagtgaacctgctccggtgccaggaaggccccagaaactgccgggagctgttgagccagggcgccaccttgagcggctggtaccatctgtgcctacctgagggcagggccctcccagtcttttgtgacatggacaccgaggggggcggctggctggtgtttcagaggcgccaggatggttctgtggatttcttccgctcttggtcctcctacagagcaggttttgggaaccaagagtctgaattctggctgggaaatgagaatttgcaccagcttactctccagggtaactgggagctgcgggtagagctggaagactttaatggtaaccgtactttcgcccactatgcgaccttccgcctcctcggtgaggtagaccactaccagctggcactgggcaagttctcagagggcactgcaggggattccctgagcctccacagtgggaggccctttaccacctatgacgctgaccacgattcaagcaacagcaactgtgcagtgattgtccacggtgcctggtggtatgcatcctgttaccgatcaaatctcaatggtcgctatgcagtgtctgaggctgccgcccacaaatatggcattgactgggcctcaggccgtggtgtgggccacccctaccgcagggttcggatgatgcttcgatagggcactctggcagccagtgcccttatctctcctgtacagcttccggatcgtcagccaccttgcctttgccaaccacctctgcttgcctgtccacatttaaaaataaaatcattttagccctttcaaaaaaaaaaaaaaaaaaaaaaaaaaaaa

SEQ ID NO: 11470 - DNA, 1209 bp, Homo sapiens
atggagagcagaggcccactggctacctcgcgcctgctgctgttgctgctgttgctactactgcgtcacacccgccagggatgggccctgagacctgttctccccacccagagtgcccacgaccctccggctgtccacctcagcaatggcccaggacaagagcctatcgctgtcatgacctttgacctcaccaagatcacaaaaacctcctcctcctttgaggttcgaacctgggacccagagggagtgattttttatggggataccaaccctaaggatgactggtttatgctgggacttcgagacggcaggcctgagatccaactgcacaatcactgggcccagcttacggtgggtgctggaccacggctggatgatgggagatggcaccaggtggaagtcaagatggagggggactctgtgctgctggaggtggatggggaggaggtgctgcgcctgagacaggtctctgggcccctgaccagcaaacgccatcccatcatgaggattgcgcttggggggctgctcttccccgcttccaaccttcggttgccgctggttcctgccctggatggctgcctgcgccgggattcctggctggacaaacaggccgagatctcagcatctgcccccactagcctcagaagctgtgatgtagaatcaaatcccgggatatttctccctccagggactcaggcagaattcaatctccgagacattccccagcctcatgcagagccctgggccttctctttggacctgggactcaagcaggcagcaggctcaggccacctccttgctcttgggacaccagagaacccatcttggctcagtctccacctccaagatcaaaaggtggtgttgtcttctgggtcggggccagggctggatctgcccctggtcttgggactccctcttcagctgaagctgagtatgtccagggtggtcttgagccaagggtcgaagatgaaggcccttgccctgcctcccttaggcctggctcccctccttaacctctgggccaagcctcaagggcgtctcttcctgggggctttaccaggagaagactcttccacctctttttgcctgaatggcctttgggcacaaggtcagaggctggatgtggaccaggccctgaacagaagccatgagatctggactcacagctgcccccagagcccaggcaatggcactgacgcttcccattaa

SEQ ID NO: 11471 - DNA, 2048 bp, Homo sapiens
ctattgatctggactcctggataggcagctggaccaacggacggacgccatgagggctctgctgctcctggggttcctgctggtgagcttggagtcaacactttcgattccaccttgggaagcccccaaggagcataagtacaaagctgaagagcacacagtcgttctcactgtcaccggggagccctgccacttccccttccagtaccaccggcagctgtaccacaaatgtacccacaagggccggccaggccctcagccctggtgtgctaccacccccaactttgatcaggaccagcgatggggatactgtttggagcccaagaaagtgaaagaccactgcagcaaacacagcccctgccagaaaggagggacctgtgtgaacatgccaagcggcccccactgtctctgtccacaacacctcactggaaaccactgccagaaagagaagtgctttgagcctcagcttctccggtttttccacaagaatgagatatggtatagaactgagcaagcagctgtggccagatgccagtgcaagggtcctgatgcccactgccagcggctggccagccaggcctgccgcaccaacccgtgcctccatgggggtcgctgcctagaggtggagggccaccgcctgtgccactgcccggtgggctacaccggacccttctgcgacgtggacaccaaggcaagctgctatgatggccgcgggctcagctaccgcggcctggccaggaccacgctctcgggtgcgccctgtcagccgtgggcctcggaggccacctaccggaacgtgactgccgagcaagcgcggaactggggactgggcggccacgccttctgccggaacccggacaacgacatccgcccgtggtgcttcgtgctgaaccgcgaccggctgagctgggagtactgcgacctggcacagtgccagaccccaacccaggcggcgcctccgaccccggtgtcccctaggcttcatgtcccactcatgcccgcgcagccggcaccgccgaagcctcagcccacgacccggaccccgcctcagtcccagaccccgggagccttgccggcgaagcgggagcagccgccttccctgaccaggaacggcccactgagctgcgggcagcggctccgcaagagtctgtcttcgatgacccgcgtcgttggcgggctggtggcgctacgcggggcgcacccctacatcgccgcgctgtactggggccacagtttctgcgccggcagcctcatcgccccctgctgggtgctgacggccgctcactgcctgcaggaccggcccgcacccgaggatctgacggtggtgctcggccaggaacgccgtaaccacagctgtgagccgtgccagacgttggccgtgcgctcctaccgcttgcacgaggccttctcgcccgtcagctaccagcacgacctggctctgttgcgccttcaggaggatgcggacggcagctgcgcgctcctgtcgccttacgttcagccggtgtgcctgccaagcggcgccgcgcgaccctccgagaccacgctctgccaggtggccggctggggccaccagttcgagggggcggaggaatatgccagcttcctgcaggaggcgcaggtaccgttcctctccctggagcgctgctcagccccggacgtgcacggatcctccatcctccccggcatgctctgcgcagggttcctcgagggcggcaccgatgcgtgccagggtgattccggaggcccgctggtgtgtgaggaccaagctgcagagcgccggctcaccctgcaaggcatcatcagctggggatcgggctgtggtgaccgcaacaagccaggcgtctacaccgatgtggcctactacctggcctggatccgggagcacaccgtttcctgattgctcagggactcatctttccctccttggtgattccgcagtgagagagtggctggggcatggaaggcaagattgtgtcccattcccccagtgcggccagctccgcgccaggatggcgaggaactcaataaagtgctttgaaaatgctgag

SEQ ID NO: 11472 - DNA, 1096 bp, Homo sapiens
agtgctgctgcagctctgagcattcccacgtcaccagagaagccggtgggcaatgagatcatgtctgctttcaggttgtggcctggcctgctgatcatgttgggttctctctgccatagaggttcaccgtgtggcctttcaacacacgtagaaataggacacagagctctggagtttcttcagcttcacaatgggcgtgttaactacagagagctgttactagaacaccaggatgcgtatcaggctggaatcgtgtttcctgattgtttttaccctagcatctgcaaaggaggaaaattccatgatgtgtctgagagcactcactggactccgtttcttaatgcaagcgttcattatatccgagagaactatccccttccctgggagaaggacacagagaaactggtagctttcttgtttggaattacttctcacatggcggcagatgtcagctggcatagtctgggccttgaacaaggattccttaggaccatgggagctattgattttcacggctcctattcagaggctcattcggctggtgattttggtactgtttatttacatttgctaaattttctcgtggtatagttcacttataatgacatcactactgtgctttaaatatgtgtgtctttaatattttgctggttgcatgtattttctatttaatgttgcagttcatttagagtagagatgtacctcatttaacatagagatgtatttctaaaaacttgtgtctatatgtatttttttgttaaaaaattctacactttgttgttgacatgtcataattttagaaaaactttacttatacattgggttaaaattcattagctagtgtctcctactttcctaatactttagctttaaactagtaaactccaccttttgcctgtagtagtaaattgcttttaaatatttaaactaggtggtgaatggtgtttattaaacccttatggtcgatatttccttaaagtaaaacaaaaaacacctttggttatatggccagttctttcttaatttatatgtttcactaactaagatttttaaaagataattttttcttaaaaaaaaaaaaaaaaaaaaaaaaaaa

SEQ ID NO: 11473 - DNA, 2217 bp, Homo sapiens
tgctgtactgagagagaatgttacataacattgagaactagtacaagtaaatattaaagtgaagtgaccatttcctacacaagctcattcagaggaggatgaagaccattttggaggaagaaaagcacccttattaagaattgcagcaagtaagccaacaaggtcttttcaggatgattttcttatatcaagtggtacatttcattttatttacttcagtttctggtgaatgtgtgactcagttgttgaaggacacctgctttgaaggaggggacattactacggtcttcacaccaagcgccaagtactgccaggtagtctgcacttaccacccaagatgtttactcttcactttcacggcggaatcaccatctgaggatcccacccgatggtttacttgtgtcctgaaagacagtgttacagaaacactgccaagagtgaataggacagcagcgatttctgggtattctttcaagcaatgctcacaccaaataagcgcttgcaacaaagacatttatgtggacctagacatgaagggcataaactataacagctcagttgccaagagtgctcaagaatgccaagaaagatgcacggatgacgtccactgccactttttcacgtacgccacaaggcagtttcccagcctggagcatcgtaacatttgtctactgaagcacacccaaacagggacaccaaccagaataacgaagctcgataaagtggtgtctggattttcactgaaatcctgtgcactttctaatctggcttgtattagggacattttccctaatacggtgtttgcagacagcaacatcgacagtgtcatggctcccgatgcttttgtctgtggccgaatctgcactcatcatcccggttgcttgttttttaccttcttttcccaggaatggcccaaagaatctcaaagaaatctttgtctccttaaaacatctgagagtggattgcccagtacacgcattaaaaagagcaaagctctttctggtttcagtctacaaagctgcaggcacagcatcccagtgttctgccattcttcattttaccatgacactgatttcttgggagaagaactggatattgttgctgcaaaaagtcacgaggcctgccagaaactgtgcaccaatgccgtccgctgccagttttttacctataccccagcccaagcatcctgcaacgaagggaagggcaagtgttacttaaagctttcttcaaacggatctccaactaaaatacttcacgggagaggaggcatctctggatacacattaaggttgtgtaaaatggataatgagtgtaccaccaaaatcaagcccaggatcgttggaggaactgcgtctgttcgtggtgagtggccgtggcaggtgaccctgcacacaacctcacccactcagagacacctgtgtggaggctccatcattggaaaccagtggatattaacagccgctcactgtttctatggggtagagtcacctaagattttgcgtgtctacagtggcattttaaatcaatctgaaataaaagaggacacatctttctttggggttcaagaaataataatccatgatcagtataaaatggcagaaagcgggtatgatattgccttgttgaaactggaaaccacagtgaattacacagattctcaacgacccatatgcctgccttccaaaggagatagaaatgtaatatacactgattgctgggtgactggatgggggtacagaaaactaagagacaaaatacaaaatactctccagaaagccaagatacccttagtgaccaacgaagagtgccagaagagatacagaggacataaaataacccataagatgatctgtgccggctacagggaaggagggaaggacgcttgcaagggagattcgggaggccctctgtcctgcaaacacaatgaggtctggcatctggtaggcatcacgagctggggcgaaggctgtgctcaaagggagcggccaggtgtttacaccaacgtggtcgagtacgtggactggattctggagaaaactcaagcagtgtgaatgggttcccaggggccattggagtccctgaaggacccaggatttgctgggagagggtgttgagttcactgtgccagcatgcttcctccacagtaacacgctgaaggggcttggtgtttgtaagaaaatgctagaagaaaacaaactgtcacaagttgttatgtcc

SEQ ID NO: 11474 - DNA, 2055 bp, Homo sapiens
tgctgtactgagagagaatgttacataacattgagaactagtacaagtaaatattaaagtgaagtgaccatttcctacacaagctcattcagaggaggatgaagaccattttggaggaagaaaagcacccttattaagaattgcagcaagtaagccaacaaggtcttttcaggatgattttcttatatcaagtggtacatttcattttatttacttcagtttctggtgaatgtgtgactcagttgttgaaggacacctgctttgaaggaggggacattactacggtcttcacaccaagcgccaagtactgccaggtagtctgcacttaccacccaagatgtttactcttcactttcacggcggaatcaccatctgaggatcccacccgatggtttacttgtgtcctgaaagacagtgttacagaaacactgccaagagtgaataggacagcagcgatttctgggtattctttcaagcaatgctcacaccaaataagtaacatttgtctactgaagcacacccaaacagggacaccaaccagaataacgaagctcgataaagtggtgtctggattttcactgaaatcctgtgcactttctaatctggcttgtattagggacattttccctaatacggtgtttgcagacagcaacatcgacagtgtcatggctcccgatgcttttgtctgtggccgaatctgcactcatcatcccggttgcttgttttttaccttcttttcccaggaatggcccaaagaatctcaaagaaatctttgtctccttaaaacatctgagagtggattgcccagtacacgcattaaaaagagcaaagctctttctggtttcagtctacaaagctgcaggcacagcatcccagtgttctgccattcttcattttaccatgacactgatttcttgggagaagaactggatattgttgctgcaaaaagtcacgaggcctgccagaaactgtgcaccaatgccgtccgctgccagttttttacctataccccagcccaagcatcctgcaacgaagggaagggcaagtgttacttaaagctttcttcaaacggatctccaactaaaatacttcacgggagaggaggcatctctggatacacattaaggttgtgtaaaatggataatgagtgtaccaccaaaatcaagcccaggatcgttggaggaactgcgtctgttcgtggtgagtggccgtggcaggtgaccctgcacacaacctcacccactcagagacacctgtgtggaggctccatcattggaaaccagtggatattaacagccgctcactgtttctatggggtagagtcacctaagattttgcgtgtctacagtggcattttaaatcaatctgaaataaaagaggacacatctttctttggggttcaagaaataataatccatgatcagtataaaatggcagaaagcgggtatgatattgccttgttgaaactggaaaccacagtgaattacacagattctcaacgacccatatgcctgccttccaaaggagatagaaatgtaatatacactgattgctgggtgactggatgggggtacagaaaactaagagacaaaatacaaaatactctccagaaagccaagatacccttagtgaccaacgaagagtgccagaagagatacagaggacataaaataacccataagatgatctgtgccggctacagggaaggagggaaggacgcttgcaagggagattcgggaggccctctgtcctgcaaacacaatgaggtctggcatctggtaggcatcacgagctggggcgaaggctgtgctcaaagggagcggccaggtgtttacaccaacgtggtcgagtacgtggactggattctggagaaaactcaagcagtgtgaatgggttcccaggggccattggagtccctgaaggacccaggatttgctgggagagggtgttgagttcactgtgccagcatgcttcctccacagtaacacgctgaaggggcttggtgtttgtaagaaaatgctagaagaaaacaaactgtcacaagttgttatgtcc

SEQ ID NO: 11475 - DNA, 3309 bp, Homo sapiens
ctgcagggggggggggggggggggggggggggggggggcgcagcacggctcagaccgaggcgcacaggctcgcagctccgggcgcctagcgcccggtccccgccgcgacgcgccaccgtccctgccggcgcctccgcgccttcgaaatgagggtcctgggtgggcgctgcggggcgccgctggcgtgtctcctcctagtgcttcccgtctcagaggcaaaccttctgtcaaagcaacaggcttcacaagtcctggttaggaagcgtcgtgcaaattctttacttgaagaaaccaaacagggtaatcttgaaagagaatgcatcgaagaactgtgcaataaagaagaagccagggaggtctttgaaaatgacccggaaacggattatttttatccaaaatacttagtttgtcttcgctcttttcaaactgggttattcactgctgcacgtcagtcaactaatgcttatcctgacctaagaagctgtgtcaatgccattccagaccagtgtagtcctctgccatgcaatgaagatggatatatgagctgcaaagatggaaaagcttcttttacttgcacttgtaaaccaggttggcaaggagaaaagtgtgaatttgacataaatgaatgcaaagatccctcaaatataaatggaggttgcagtcaaatttgtgataatacacctggaagttaccactgttcctgtaaaaatggttttgttatgctttcaaataagaaagattgtaaagatgtggatgaatgctctttgaagccaagcatttgtggcacagctgtgtgcaagaacatcccaggagattttgaatgtgaatgccccgaaggctacagatataatctcaaatcaaagtcttgtgaagatatagatgaatgctctgagaacatgtgtgctcagctttgtgtcaattaccctggaggttacacttgctattgtgatgggaagaaaggattcaaacttgcccaagatcagaagagttgtgaggttgtttcagtgtgccttcccttgaaccttgacacaaagtatgaattactttacttggcggagcagtttgcaggggttgttttatatttaaaatttcgtttgccagaaatcagcagattttcagcagaatttgatttccggacatatgattcagaaggcgtgatactgtacgcagaatctatcgatcactcagcgtggctcctgattgcacttcgtggtggaaagattgaagttcagcttaagaatgaacatacatccaaaatcacaactggaggtgatgttattaataatggtctatggaatatggtgtctgtggaagaattagaacatagtattagcattaaaatagctaaagaagctgtgatggatataaataaacctggacccctttttaagccggaaaatggattgctggaaaccaaagtatactttgcaggattccctcggaaagtggaaagtgaactcattaaaccgattaaccctcgtctagatggatgtatacgaagctggaatttgatgaagcaaggagcttctggaataaaggaaattattcaagaaaaacaaaataagcattgcctggttactgtggagaagggctcctactatcctggttctggaattgctcaatttcacatagattataataatgtatccagtgctgagggttggcatgtaaatgtgaccttgaatattcgtccatccacgggcactggtgttatgcttgccttggtttctggtaacaacacagtgccctttgctgtgtccttggtggactccacctctgaaaaatcacaggatattctgttatctgttgaaaatactgtaatatatcggatacaggccctaagtctatgttccgatcaacaatctcatctggaatttagagtcaacagaaacaatctggagttgtcgacaccacttaaaatagaaaccatctcccatgaagaccttcaaagacaacttgccgtcttggacaaagcaatgaaagcaaaagtggccacatacctgggtggccttccagatgttccattcagtgccacaccagtgaatgccttttataatggctgcatggaagtgaatattaatggtgtacagttggatctggatgaagccatttctaaacataatgatattagagctcactcatgtccatcagtttggaaaaagacaaagaattcttaaggcatcttttctctgcttataataccttttccttgtgtgtaattatacttatgtttcaataacagctgaagggttttatttacaatgtgcagtctttgattattttgtggtcctttcctgggatttttaaaaggtcctttgtcaaggaaaaaaattctgttgtgatataaatcacagtaaagaaattcttacttctcttgctatctaagaatagtgaaaaataacaattttaaatttgaatttttttcctacaaatgacagtttcaatttttgtttgtaaaactaaattttaattttatcatcatgaactagtgtctaaatacctatgtttttttcagaaagcaaggaagtaaactcaaacaaaagtgcgtgtaattaaatactattaatcataggcagatactattttgtttatgtttttgtttttttcctgatgaaggcagaagagatggtggtctattaaatatgaattgaatggagggtcctaatgccttatttcaaaacaattcctcagggggaccagctttggcttcatctttctcttgtgtggcttcacatttaaaccagtatctttattgaattagaaaacaagtgggacatattttcctgagagcagcacaggaatcttcttcttggcagctgcagtctgtcaggatgagatatcagattaggttggataggtggggaaatctgaagtgggtacattttttaaattttgctgtgtgggtcacacaaggtctacattacaaaagacagaattcagggatggaaaggagaatgaacaaatgtgggagttcatagttttccttgaatccaacttttaattaccagagtaagttgccaaaatgtgattgttgaagtacaaaaggaactatgaaaaccagaacaaattttaacaaaaggacaaccacagagggatatagtgaatatcgtatcattgtaatcaaagaagtaaggaggtaagattgccacgtgcctgctggtactgtgatgcatttcaagtggcagttttatcacgtttgaatctaccattcatagccagatgtgtatcagatgtttcactgacagtttttaacaataaattcttttcactgtattttatatcacttataataaatcggtgtataatttt

SEQ ID NO: 11476 - DNA, 4266 bp, Homo sapiens
agagtttcagttttggcagcagcgtccagtgccctgccagtagctcctagagaggcaggggttaccaactggccagcaggctgtgtccctgaagtcagatcaacgggagagaaggaagtggctaaaacattgcacaggagaagtcggcctgagtggtgcggcgctcgggacccaccagcaatgctgctcttcgtgctcacctgcctgctggcggtcttcccagccatctccacgaagagtcccatatttggtcccgaggaggtgaatagtgtggaaggtaactcagtgtccatcacgtgctactacccacccacctctgtcaaccggcacacccggaagtactggtgccggcagggagctagaggtggctgcataaccctcatctcctcggagggctacgtctccagcaaatatgcaggcagggctaacctcaccaacttcccggagaacggcacatttgtggtgaacattgcccagctgagccaggatgactccgggcgctacaagtgtggcctgggcatcaatagccgaggcctgtcctttgatgtcagcctggaggtcagccagggtcctgggctcctaaatgacactaaagtctacacagtggacctgggcagaacggtgaccatcaactgccctttcaagactgagaatgctcaaaagaggaagtccttgtacaagcagataggcctgtaccctgtgctggtcatcgactccagtggttatgtaaatcccaactatacaggaagaatacgccttgatattcagggtactggccagttactgttcagcgttgtcatcaaccaactcaggctcagcgatgctgggcagtatctctgccaggctggggatgattccaatagtaataagaagaatgctgacctccaagtgctaaagcccgagcccgagctggtttatgaagacctgaggggctcagtgaccttccactgtgccctgggccctgaggtggcaaacgtggccaaatttctgtgccgacagagcagtggggaaaactgtgacgtggtcgtcaacaccctggggaagagggccccagcctttgagggcaggatcctgctcaacccccaggacaaggatggctcattcagtgtggtgatcacaggcctgaggaaggaggatgcagggcgctacctgtgtggagcccattcggatggtcagctgcaggaaggctcgcctatccaggcctggcaactcttcgtcaatgaggagtccacgattccccgcagccccactgtggtgaagggggtggcaggaggctctgtggccgtgctctgcccctacaaccgtaaggaaagcaaaagcatcaagtactggtgtctctgggaaggggcccagaatggccgctgccccctgctggtggacagcgaggggtgggttaaggcccagtacgagggccgcctctccctgctggaggagccaggcaacggcaccttcactgtcatcctcaaccagctcaccagccgggacgccggcttctactggtgtctgaccaacggcgatactctctggaggaccaccgtggagatcaagattatcgaaggagaaccaaacctcaaggtaccagggaatgtcacggctgtgctgggagagactctcaaggtcccctgtcactttccatgcaaattctcctcgtacgagaaatactggtgcaagtggaataacacgggctgccaggccctgcccagccaagacgaaggccccagcaaggccttcgtgaactgtgacgagaacagccggcttgtctccctgaccctgaacctggtgaccagggctgatgagggctggtactggtgtggagtgaagcagggccacttctatggagagactgcagccgtctatgtggcagttgaagagaggaaggcagcggggtcccgcgatgtcagcctagcgaaggcagacgctgctcctgatgagaaggtgctagactctggttttcgggagattgagaacaaagccattcaggatcccaggctttttgcagaggaaaaggcggtggcagatacaagagatcaagccgatgggagcagagcatctgtggattccggcagctctgaggaacaaggtggaagctccagagcgctggtctccaccctggtgcccctgggcctggtgctggcagtgggagccgtggctgtgggggtggccagagcccggcacaggaagaacgtcgaccgagtttcaatcagaagctacaggacagacattagcatgtcagacttcgagaactccagggaatttggagccaatgacaacatgggagcctcttcgatcactcaggagacatccctcggaggaaaagaagagtttgttgccaccactgagagcaccacagagaccaaagaacccaagaaggcaaaaaggtcatccaaggaggaagccgagatggcctacaaagacttcctgctccagtccagcaccgtggccgccgaggcccaggacggcccccaggaagcctagacggtgtcgccgcctgctccctgcacccatgacaatcaccttcagaatcatgtcgatcctggggccctcagctcctggggaccccactccctgctctaacacctgcctaggtttttcctactgtcctcagaggcgtgctggtcccctcctcagtgacatcaaagcctggcctaattgttcctattggggatgagggtggcatgaggaggtcccacttgcaacttctttctgttgagagaacctcaggtacggagaagaatagaggtcctcatgggtcccttgaaggaagagggaccagggtgggagagctgattgcagaaaggagagacgtgcagcgcccctctgcacccttatcatgggatgtcaacagaatttttccctccactccatccctccctcccgtccttcccctcttcttctttccttccatcaaaagatgtatttgaattcatactagaattcaggtgctttgctagatgctgtgacaggtatgccaccaacactgctcacagcctttctgaggacaccagtgaaagaagccacagctcttcttggcgtatttatactcactgagtcttaacttttcaccaggggtgctcacctctgcccctattgggagaggtcataaaatgtctcgagtcctaaggccttaggggtcatgtatgatgagcatacacacaggtaattataaacccacattcttaccatttcacacataagaaaattgaggtttggaagagtgaagcgtttttctttttcttttttttttttgagacggagtctctcactgtcgcccaggctggagtgcagtggcgcaatctcggctcactgcaacctccgcctcccaggttgacaccattctcctgcctcaccctcccaagtagctgggactacaggcgcctgccagcacgcctggctaattttttgtatttttagtagagacagggtttcaccgtgttagccaggatggtctcgatctcctgacctcgtgatccgcctgcctctgcctcccaaagtgctgggattacaggcgtgagccaccgcgtccggcctctttttttcttttcttttttttgagacaaagtctcactgtgtcacccagactggaatgcagtgacacaatctcggctcactgaaacctctgccttccaggttcaagctattctcatgcctcagcctctcaagtagctgggactacagatgtgggccaccatgtctggctaattttttttttttttttttttttttgtagagacagggtttcgccatgttgacgagactggtctcgaactcctggcctcaagtgatctgccgcctcagcttctcaaagtactgggattatataggcatgagccactgagcctggccctgaagcgtttttctcaaaggccctcagtgagataaattagatttggcatctcctgtcctgggccagggatctctctacaagagcccctgcccctctgttggaggcacagttttagaataaggaggaggagggagaagagaaaatgtaaaggagggagatctttcccaggccgcaccatttctgtcactcacatggacccaagataaaagaatggccaaaccctcacaacccctgatgtttgaagagttccaagttgaagggaaacaaagaagtgtttgatggtgccagagaggggctgctctccagaaagctaaaatttaatttcttttttcctctgagttctgtacttcaaccagcctacaagctggcacttgctaacaaatcagaaatatgacaattaatgattaaagactgtgattgcc

SEQ ID NO: 11477 - DNA, 4226 bp, Homo sapiens
ggccatggggcgcgtcgtcgcggagctcgtctcctcgctgctggggttgtggctgttgctgtgcagctgcggatgccccgagggcgccgagctgcgtgctccgccagataaaatcgcgattattggagccggaattggtggcacttcagcagcctattacctgcggcagaaatttgggaaagatgtgaagatagacctgtttgaaagagaagaggtcgggggccgcctggctaccatgatggtgcaggggcaagaatacgaggcaggaggttctgtcatccatcctttaaatctgcacatgaaacgttttgtcaaagacctgggtctctctgctgttcaggcctctggtggcctactggggatatataatggagagactctggtatttgaggagagcaactggttcataattaacgtgattaaattagtttggcgctatggatttcaattcctccgtatgcacatgtgggtagaggacgtgttagacaagttcatgaggatctaccgctaccagtctcatgactatgccttcagtagtgtcgaaaaattacttcatgctctaggaggagatgacttccttggaatgcttaatcgaacacttcttgaaaccttgcaaaaggccggcttttctgagaagttcctcaatgaaatgattgctcctgttatgagggtcaattatggccaaagcacggacatcaatgcctttgtgggggcggtgtcactgtcctgttctgattctggcctttgggcagtagaaggtggcaataaacttgtttgctcagggcttctgcaggcatccaaaagcaatcttatatctggctcagtaatgtacatcgaggagaaaacaaagaccaagtacacaggaaatccaacaaagatgtatgaagtggtctaccaaattggaactgagactcgttcagacttctatgacatcgtcttggtggccactccgttgaatcgaaaaatgtcgaatattacttttctcaactttgatcctccaattgaggaattccatcaatattatcaacatatagtgacaactttagttaagggggaattgaatacatctatctttagctctagacccatagataaatttggccttaatacagttttaaccactgataattcagatttgttcattaacagtattgggattgtgccctctgtgagagaaaaggaagatcctgagccatcaacagatggaacatatgtttggaagatcttttcccaagaaactcttactaaagcacaaattttaaagctctttctgtcctatgattatgctgtgaagaagccatggcttgcatatcctcactataagcccccggagaaatgcccctctatcattctccatgatcgactttattacctcaatggcatagagtgtgcagcaagtgccatggagatgagtgccattgcagcccacaacgctgcactccttgcctatcaccgctggaacgggcacacagacatgattgatcaggatggcttatatgagaaacttaaaactgaactatgaagtgacacactcctttttcccctcctagttccaaatgactatcagtggcaaaaaagaacaaaatctgagcagagatgattttgaaccagatattttgccattatcattgtttaataaaagtaatccctgctggtcataggaaaacacacggttctaattaagtgtgaaggtatagctattgcacttatgccatctccaaaatttcttaagtattctttcactatccattaggagtttttcttaaacttgtctgataataagaatcacctggagttaggaggtggtggttgcagtgagccaatctcaccattgcacttcagcctgagcaacacgagcaaaactccgtctcaaaagtaaataaaaataatcacctggagtttgttaaaccatatggattctcaggctcctctcttgaagattctgattcagtaggtctgggagtggcgccctggattttgatcaaaattgtagagcattttaaggtgagtacctgagggagaacttaaagacatcttagttggggagtagtccttttgaattttacagctagatataatcttcagtcagataaaatttatgggagctggtgtcttatgcctgactcttagtaatttcataccggtttgaagtacgtgtgcccatgcctaaagccttgactttcagaatgttgtcttttgattcttctgtcttgatttgattaggggtgaaatttagaagtcttagtaatgtaacttgaagatgttaaacaaaaatctcaagtaaaatgaaaagcaaatatgggctactgaattaagaaactggcattctagtattaaatcctcacttcaggagcttttaaaaatactgagacccccccataaccagagattcagattcaaagactgaggataggaccttagcattgtagctatttaaagtttctaatgtgcacccagggttgggaatcaccaatgtgggtgtgaaaatgcctacaaagggttttagtgccttagaagtcctaagaagcccaatctgtatcaaagcagatccattttgcaaggatctttcttttagaactttctcagttctcttagtaagaactttagaagtaatcttgataataagcacagacagcctaacagcagaggcaacttaaataactcctgagcagttggcactagaacagaatacttggaatgacaccaaagttaaccaagtccagcatatgtccaaagagttaagtgtttcatttactgtagcattctgggtgagaaattggttgctgaaatcttaagacagtggtctcaaccttggctgcacattggaatcacctgtagggttttaaagcatccaaatggtaattaacaggcagcaaaacttcagaactagttctgcatctactgtgcaaagatcatgattaactgtcaagacactggtagaacagaacaagcaaaagattaagagttcaaaagtaaatgcaaccaatttaacatgtagtgttattaaaaaattacaaaggcctagaccagcctgggcaacatggtgaaaccccatctctacaaaaaatttttaaaaagttggccaggcatggtaatgcgcgcctgtggtcccagctgctcgggaggctgaggtgggaggatcacttgagccttggaggtcaaggctgcagtgaatcatgatcatgccactgtactccagcctgggcaacagagaccatcttaaaaaaaaaaaatccttccattgaatagaaacttcaaagtccttcatcagatcatggcattagctactttagcaaaatagtgtaaactttggttctgagtaaaaatgacttccctaccacagttgtgaatgttaatatgctgataaaactgccaagatatatttgataggtaggggattaaactcatggtttgtcaaaagagtgtttttttctagttttattcttaacagatatgttgaggtattcatatttgtttccttttgtggttttaatgaagacaatttgtaaagtaatactgttatgtatatgctaaatgttggtaaatactaattaatttccatcatttgtagacttgttttgcaatgggatatatttttacttataataccaatttaggctgggcgcagtggctcacgcctgtaatcccagcactttgggaggccaaggcaaacggatcacgaggtcaggagatcaagaccatcctggccaacatggtgaaaccccatctctactgaatacacaaaaattggctggacatggtggcgcatgtctgtaatcccagctactgtaatctcagctactcgggaggctgaggcaggagaattgcctcaaccgggaggcggaggttgcagtgagccaagatcgcaccactgcactccagcctggcaacagagcgagactctgtctcagaaaaaaaaaaacaaaaaccagtttaggctgggtatggtggctcaccagcactttgggaggctgaggcaggtggatctcttgaggtcgggagtttgagaccagcctggccaacatggtgaaaccctgtctttactaaaaatacaaaaattagccaggcatggtggcgtgtgccagtaatcccagctacttgggaggctgaggcgcgagaatcgcttgaaccctggagatggaggttgcagtgagcagagatcgcaccactgcactccagcctgggcaagagtgagactgtgtctcaaaaggaaaaaaaaaaaaaaa

SEQ ID NO: 11478 - DNA, 2211 bp, Homo sapiens
gcagttgagctgaatgaatacctccgaagccgctttgttctccagatgtgaatagctccactataccagcctcgtcttccttccgggggacaacgtgggtcagggcacagagagatatttaatgtcaccctcttggggctttcatgggactccctctgccacattttttggaggttgggaaagttgctagaggcttcagaactccagcctaatggatcccaaactcgggagaatggctgcgtccctgctggctgtgctgctgctgctgctggagcgcggcatgttctcctcaccctccccgcccccggcgctgttagagaaagtcttccagtacattgacctccatcaggatgaatttgtgcagacgctgaaggagtgggtggccatcgagagcgactctgtccagcctgtgcctcgcttcagacaagagctcttcagaatgatggccgtggctgcggacacgctgcagcgcctgggggcccgtgtggcctcggtggacatgggtcctcagcagctgcccgatggtcagagtcttccaatacctcccgtcatcctggccgaactggggagcgatcccacgaaaggcaccgtgtgcttctacggccacttggacgtgcagcctgctgaccggggcgatgggtggctcacggacccctatgtgctgacggaggtagacgggaaactttatggacgaggagcgaccgacaacaaaggccctgtcttggcttggatcaatgctgtgagcgccttcagagccctggagcaagatcttcctgtgaatatcaaattcatcattgaggggatggaagaggctggctctgttgccctggaggaacttgtggaaaaagaaaaggaccgattcttctctggtgtggactacattgtaatttcagataacctgtggatcagccaaaggaagccagcaatcacttacggaacccgggggaacagctacttcatggtggaggtgaaatgcagagaccaggattttcactcaggaacctttggtggcatccttcatgaaccaatggctgatctggttgctcttctcggtagcctggtagactcgtctggtcatatcctggtccctggaatctatgatgaagtggttcctcttacagaagaggaaataaatacatacaaagccatccatctagacctagaagaataccggaatagcagccgggttgagaaatttctgttcgatactaaggaggagattctaatgcacctctggaggtacccatctctttctattcatgggatcgagggcgcgtttgatgagcctggaactaaaacagtcatacctggccgagttataggaaaattttcaatccgtctagtccctcacatgaatgtgtctgcggtggaaaaacaggtgacacgacatcttgaagatgtgttctccaaaagaaatagttccaacaagatggttgtttccatgactctaggactacacccgtggattgcaaatattgatgacacccagtatctcgcagcaaaaagagcgatcagaacagtgtttggaacagaaccagatatgatccgggatggatccaccattccaattgccaaaatgttccaggagatcgtccacaagagcgtggtgctaattccgctgggagctgttgatgatggagaacattcgcagaatgagaaaatcaacaggtggaactacatagagggaaccaaattatttgctgcctttttcttagagatggcccagctccattaatcacaagaaccttctagtctgatctgatccactgacagattcacctcccccacatccctagacagggatggaatgtaaatatccagagaatttgggtctagtatagtacattttcccttccatttaaaatgtcttgggatatctggatcagtaataaaatatttcaaaggcacagatgttggaaatggtttaaggtcccccactgcacaccttcctcaagtcatagctgcttgcagcaacttgatttccccaagtcctgtgcaatagccccaggattggattccttcaaaccttttagcatatctccaaccttgcaatttgattggcataatcactccagtttgctttctaggtcctcaagtgctcgtgacacataatcattccatccaatgatcgcctttgctttaccactctttccttttatcttattaataaaaatgttggtctccaccactgactacaaaaaaaaaaaaaaa

SEQ ID NO: 11479 - DNA, 613 bp, Homo sapiens
gagttgagcacagagggacagaggcacggaacccccagaaatgtccctcctcagaaacaggctccaggccctgcctgccctgtgcctctgcgtgctggtcctggcctgcattggggcatgccagccagaggcccaggaaggaaccctgagccccccaccaaagctaaagatgagtcgctggagcctggtgaggggcaggatgaaggagctgctggagacagtggtgaacaggaccagagacgggtggcaatggttctggagcccgagcaccttccggggcttcatgcagacctactatgacgaccacctgagggacctgggtccgctcaccaaggcctggttcctcgaatccaaagacagcctcttgaagaagacccacagcctgtgccccaggcttgtctgtggggacaaggaccagggttaaaatgttcataaaagccaggtgtggttgtggcgggtgcctgtagtcccagctactcaggaggctgaggtaggatgatggcttgagcccaggagttcgagaccagcctgggcaacacagcgagatctcttgggggtaaaacaaaaagaaaaaaaaaagttcatacttctccaataaataaagtctcacctg

SEQ ID NO: 11480 - DNA, 5010 bp, Homo sapiens
ggcggctcgggacggaggacgcgctagtgtgagtgcgggcttctagaactacaccgaccctcgtgtcctcccttcatcctgcggggctggctggagcggccgctccggtgctgtccagcagccatagggagccgcacggggagcgggaaagcggtcgcggccccaggcggggcggccgggatggagcggggccgcgagcctgtggggaaggggctgtggcggcgcctcgagcggctgcaggttcttctgtgtggcagttcagaatgatggatcaagctagatcagcattctctaacttgtttggtggagaaccattgtcatatacccggttcagcctggctcggcaagtagatggcgataacagtcatgtggagatgaaacttgctgtagatgaagaagaaaatgctgacaataacacaaaggccaatgtcacaaaaccaaaaaggtgtagtggaagtatctgctatgggactattgctgtgatcgtctttttcttgattggatttatgattggctacttgggctattgtaaaggggtagaaccaaaaactgagtgtgagagactggcaggaaccgagtctccagtgagggaggagccaggagaggacttccctgcagcacgtcgcttatattgggatgacctgaagagaaagttgtcggagaaactggacagcacagacttcaccagcaccatcaagctgctgaatgaaaattcatatgtccctcgtgaggctggatctcaaaaagatgaaaatcttgcgttgtatgttgaaaatcaatttcgtgaatttaaactcagcaaagtctggcgtgatcaacattttgttaagattcaggtcaaagacagcgctcaaaactcggtgatcatagttgataagaacggtagacttgtttacctggtggagaatcctgggggttatgtggcgtatagtaaggctgcaacagttactggtaaactggtccatgctaattttggtactaaaaaagattttgaggatttatacactcctgtgaatggatctatagtgattgtcagagcagggaaaatcacctttgcagaaaaggttgcaaatgctgaaagcttaaatgcaattggtgtgttgatatacatggaccagactaaatttcccattgttaacgcagaactttcattctttggacatgctcatctggggacaggtgacccttacacacctggattcccttccttcaatcacactcagtttccaccatctcggtcatcaggattgcctaatatacctgtccagacaatctccagagctgctgcagaaaagctgtttgggaatatggaaggagactgtccctctgactggaaaacagactctacatgtaggatggtaacctcagaaagcaagaatgtgaagctcactgtgagcaatgtgctgaaagagataaaaattcttaacatctttggagttattaaaggctttgtagaaccagatcactatgttgtagttggggcccagagagatgcatggggccctggagctgcaaaatccggtgtaggcacagctctcctattgaaacttgcccagatgttctcagatatggtcttaaaagatgggtttcagcccagcagaagcattatctttgccagttggagtgctggagactttggatcggttggtgccactgaatggctagagggatacctttcgtccctgcatttaaaggctttcacttatattaatctggataaagcggttcttggtaccagcaacttcaaggtttctgccagcccactgttgtatacgcttattgagaaaacaatgcaaaatgtgaagcatccggttactgggcaatttctatatcaggacagcaactgggccagcaaagttgagaaactcactttagacaatgctgctttccctttccttgcatattctggaatcccagcagtttctttctgtttttgcgaggacacagattatccttatttgggtaccaccatggacacctataaggaactgattgagaggattcctgagttgaacaaagtggcacgagcagctgcagaggtcgctggtcagttcgtgattaaactaacccatgatgttgaattgaacctggactatgagaggtacaacagccaactgctttcatttgtgagggatctgaaccaatacagagcagacataaaggaaatgggcctgagtttacagtggctgtattctgctcgtggagacttcttccgtgctacttccagactaacaacagatttcgggaatgctgagaaaacagacagatttgtcatgaagaaactcaatgatcgtgtcatgagagtggagtatcacttcctctctccctacgtatctccaaaagagtctcctttccgacatgtcttctggggctccggctctcacacgctgccagctttactggagaacttgaaactgcgtaaacaaaataacggtgcttttaatgaaacgctgttcagaaaccagttggctctagctacttggactattcagggagctgcaaatgccctctctggtgacgtttgggacattgacaatgagttttaaatgtgatacccatagcttccatgagaacagcagggtagtctggtttctagacttgtgctgatcgtgctaaattttcagtagggctacaaaacctgatgttaaaattccatcccatcatcttggtactactagatgtctttaggcagcagcttttaatacagggtagataacctgtacttcaagttaaagtgaataaccacttaaaaaatgtccatgatggaatattcccctatctctagaattttaagtgctttgtaatgggaactgcctctttcctgttgttgttaatgaaaatgtcagaaaccagttatgtgaatgatctctctgaatcctaagggctggtctctgctgaaggttgtaagtggttcgcttactttgagtgatcctccaacttcatttgatgctaaataggagataccaggttgaaagacctctccaaatgagatctaagcctttccataaggaatgtagcaggtttcctcattcctgaaagaaacagttaactttcagaagagatgggcttgttttcttgccaatgaggtctgaaatggaggtccttctgctggataaaatgaggttcaactgttgattgcaggaataaggccttaatatgttaacctcagtgtcatttatgaaaagaggggaccagaagccaaagacttagtatattttcttttcctctgtcccttcccccataagcctccatttagttctttgttatttttgtttcttccaaagcacattgaaagagaaccagtttcaggtgtttagttgcagactcagtttgtcagactttaaagaataatatgctgccaaattttggccaaagtgttaatcttaggggagagctttctgtccttttggcactgagatatttattgtttatttatcagtgacagagttcactataaatggtgtttttttaatagaatataattatcggaagcagtgccttccataattatgacagttatactgtcggttttttttaaataaaagcagcatctgctaataaaacccaacagatactggaagttttgcatttatggtcaacacttaagggttttagaaaacagccgtcagccaaatgtaattgaataaagttgaagctaagatttagagatgaattaaatttaattaggggttgctaagaagcgagcactgaccagataagaatgctggttttcctaaatgcagtgaattgtgaccaagttataaatcaatgtcacttaaaggctgtggtagtactcctgcaaaattttatagctcagtttatccaaggtgtaactctaattcccatttgcaaaatttccagtacctttgtcacaatcctaacacattatcgggagcagtgtcttccataatgtataaagaacaaggtagtttttacctaccacagtgtctgtatcggagacagtgatctccatatgttacactaagggtgtaagtaattatcgggaacagtgtttcccataattttcttcatgcaatgacatcttcaaagcttgaagatcgttagtatctaacatgtatcccaactcctataattccctatcttttagttttagttgcagaaacattttgtggtcattaagcattgggtgggtaaattcaaccactgtaaaatgaaattactacaaaatttgaaatttagcttgggtttttgttacctttatggtttctccaggtcctctacttaatgagatagcagcatacatttataatgtttgctattgacaagtcattttaatttatcacattatttgcatgttacctcctataaacttagtgcggacaagttttaatccagaattgaccttttgacttaaagcagagggactttgtatagaaggtttgggggctgtggggaaggagagtcccctgaaggtctgacacgtctgcctacccattcgtggtgatcaattaaatgtaggtatgaataagttcgaagctccgtgagtgaaccatcatataaacgtgtagtacagctgtttgtcatagggcagttggaaacggcctcctagggaaaagttcatagggtctcttcaggttcttagtgtcacttacctagatttacagcctcacttgaatgtgtcactactcacagtctctttaatcttcagttttatctttaatctcctcttttatcttggactgacatttagcgtagctaagtgaaaaggtcatagctgagattcctggttcgggtgttacgcacacgtacttaaatgaaagcatgtggcatgttcatcgtataacacaatatgaatacagggcatgcattttgcagcagtgagtctcttcagaaaacccttttctacagttagggttgagttacttcctatcaagccagtacgtgctaacaggctcaatattcctgaatgaaatatcagactagtgacaagctcctggtcttgagatgtcttctcgttaaggagtagggccttttggaggtaaaggtata

SEQ ID NO: 11481 - DNA, 3828 bp, Homo sapiens
aagacaacgtcactagcagtttctggagctacttgccaaggctgagtgtgagctgagcctgccccaccaccaagatgatcctgagcttgctgttcagccttgggggccccctgggctgggggctgctgggggcatgggcccaggcttccagtactagcctctctgatctgcagagctccaggacacctggggtctggaaggcagaggctgaggacaccagcaaggaccccgttggacgtaactggtgcccctacccaatgtccaagctggtcaccttactagctctttgcaaaacagagaaattcctcatccactcgcagcagccgtgtccgcagggagctccagactgccagaaagtcaaagtcatgtaccgcatggcccacaagccagtgtaccaggtcaagcagaaggtgctgacctctttggcctggaggtgctgccctggctacacgggccccaactgcgagcaccacgattccatggcaatccctgagcctgcagatcctggtgacagccaccaggaacctcaggatggaccagtcagcttcaaacctggccaccttgctgcagtgatcaatgaggttgaggtgcaacaggaacagcaggaacatctgctgggagatctccagaatgatgtgcaccgggtggcagacagcctgccaggcctgtggaaagccctgcctggtaacctcacagctgcagtgatggaagcaaatcaaacagggcacgagttccctgatagatccttggagcaggtgctgctaccccacgtggacaccttcctacaagtgcatttcagccccatctggaggagctttaaccaaagcctgcacagccttacccaggccataagaaacctgtctcttgacgtggaggccaaccgccaggccatctccagagtccaggacagtgccgtggccagggctgacttccaggagcttggtgccaaatttgaggccaaggtccaggagaacactcagagagtgggtcagctgcgacaggacgtggaggaccgcctgcacgcccagcactttaccctgcaccgctcgatctcagagctccaagccgatgtggacaccaaattgaagaggctgcacaaggctcaggaggccccagggaccaatggcagtctggtgttggcaacgcctggggctggggcaaggcctgagccggacagcctgcaggccaggctgggccagctgcagaggaacctctcagagctgcacatgaccacggcccgcagggaggaggagttgcagtacaccctggaggacatgagggccaccctgacccggcacgtggatgagatcaaggaactgtactccgaatcggacgagactttcgatcagattagcaaggtggagcggcaggtggaggagctgcaggtgaaccacacggcgctccgtgagctgcgcgtgatcctgatggagaagtctctgatcatggaggagaacaaggaggaggtggagcggcagctcctggagctcaacctcacgctgcagcacctgcagggtggccatgccgacctcatcaagtacgtgaaggactgcaattgccagaagctctatttagacctggacgtcatccgggagggccagagggacgccacgcgtgccctggaggagacccaggtgagcctggacgagcggcggcagctggacggctcctccctgcaggccctgcagaacgccgtggacgccgtgtcgctggccgtggacgcgcacaaagcggagggcgagcgggcgcgggcggccacgtcgcggctccggagccaagtgcaggcgctggatgacgaggtgggcgcgctgaaggcggccgcggccgaggcccgccacgaggtgcgccagctgcacagcgccttcgccgccctgctggaggacgcgctgcggcacgaggcggtgctggccgcgctcttcggggaggaggtgctggaggagatgtctgagcagacgccgggaccgctgcccctgagctacgagcagatccgcgtggccctgcaggacgccgctagcgggctgcaggagcaggcgctcggctgggacgagctggccgcccgagtgacggccctggagcaggcctcggagcccccgcggccggcagagcacctggagcccagccacgacgcgggccgcgaggaggccgccaccaccgccctggccgggctggcgcgggagctccagagcctgagcaacgacgtcaagaatgtcgggcggtgctgcgaggccgaggccggggccggggccgcctccctcaacgcctcccttgacggcctccacaacgcactcttcgccactcagcgcagcttggagcagcaccagcggctcttccacagcctctttgggaacttccaagggctcatggaagccaacgtcagcctggacctggggaagctgcagaccatgctgagcaggaaagggaagaagcagcagaaagacctggaagctccccggaagagggacaagaaggaagcggagcctttggtggacatacgggtcacagggcctgtgccaggtgccttgggcgcggcgctctgggaggcaggatcccctgtggccttctatgccagcttttcagaagggacggctgccctgcagacagtgaagttcaacaccacatacatcaacattggcagcagctacttccctgaacatggctacttccgagcccctgagcgtggtgtctacctgtttgcagtgagcgttgaatttggcccagggccaggcaccgggcagctggtgtttggaggtcaccatcggactccagtctgtaccactgggcaggggagtggaagcacagcaacggtctttgccatggctgagctgcagaagggtgagcgagtatggtttgagttaacccagggatcaataacaaagagaagcctgtcgggcactgcatttgggggcttcctgatgtttaagacctgaaccccagccccaatctgatcagacatcatggactcgcccagctctcctcggcctggggctctggccaaggatgggctggaggtcattcagttggtctgtctcttccctggaaaccttctgcaaagatggtgtggtgtacgtggcttccctgtaaccacatggggcttggccatttctccatgatgagaaggactggaatgcttctccgggcaggacatggtcctaggaagcctgaaccttggcttggcatgccttctcagacagcacggcctgggctccaactcttcaccacaccctgtattctacaacttctttggtgttttgctcctcctgtggttggaaacttctgtacaacactttaaacttttctcttgcttcctcttctcttctcccttatcgtatgatagaaagacattcttccccaggaggaatgtttaaaatggaggcaacattttggccaacattggaaagcactagagggcaatgggattaaaccaacctgcttggtctctattagtcagtaatgaagacgacagcctggccaaccaagggaaaggaaattagtatctttagtttcagtcattccttgtaggatatggtttagctgtgcccccacctaaaatatcatcttgaattgtaatccctataatccccacatcaagggagagatcaggtggaggtaattggatcttgggggcggttcccccatgctgttcttgtgatagttctcacgagatctgatgattttataagtttgatagttcctcctgtgttcattctccttcctgccaccttgtgaagatgccttggttcctcttcactgtctgccatgattgtaagtttcctgaggcctccccagccatgtggaacagtgagtcaattaaacctctttcctttataaatt

SEQ ID NO: 11482 - DNA, 5480 bp, Homo sapiens
tatatccgtggtttcctgctacctccaaccatgggccttttgggaatactttgttttttaatcttcctggggaaaacctggggacaggagcaaacatatgtcatttcagcaccaaaaatattccgtgttggagcatctgaaaatattgtgattcaagtttatggatacactgaagcatttgatgcaacaatctctattaaaagttatcctgataaaaaatttagttactcctcaggccatgttcatttatcctcagagaataaattccaaaactctgcaatcttaacaatacaaccaaaacaattgcctggaggacaaaacccagtttcttatgtgtatttggaagttgtatcaaagcatttttcaaaatcaaaaagaatgccaataacctatgacaatggatttctcttcattcatacagacaaacctgtttatactccagaccagtcagtaaaagttagagtttattcgttgaatgacgacttgaagccagccaaaagagaaactgtcttaactttcatagatcctgaaggatcagaagttgacatggtagaagaaattgatcatattggaattatctcttttcctgacttcaagattccgtctaatcctagatatggtatgtggacgatcaaggctaaatataaagaggacttttcaacaactggaaccgcatattttgaagttaaagaatatgtcttgccacatttttctgtctcaatcgagccagaatataatttcattggttacaagaactttaagaattttgaaattactataaaagcaagatatttttataataaagtagtcactgaggctgacgtttatatcacatttggaataagagaagacttaaaagatgatcaaaaagaaatgatgcaaacagcaatgcaaaacacaatgttgataaatggaattgctcaagtcacatttgattctgaaacagcagtcaaagaactgtcatactacagtttagaagatttaaacaacaagtacctttatattgctgtaacagtcatagagtctacaggtggattttctgaagaggcagaaatacctggcatcaaatatgtcctctctccctacaaactgaatttggttgctactcctcttttcctgaagcctgggattccatatcccatcaaggtgcaggttaaagattcgcttgaccagttggtaggaggagtcccagtaacactgaatgcacaaacaattgatgtaaaccaagagacatctgacttggatccaagcaaaagtgtaacacgtgttgatgatggagtagcttcctttgtgcttaatctcccatctggagtgacggtgctggagtttaatgtcaaaactgatgctccagatcttccagaagaaaatcaggccagggaaggttaccgagcaatagcatactcatctctcagccaaagttacctttatattgattggactgataaccataaggctttgctagtgggagaacatctgaatattattgttacccccaaaagcccatatattgacaaaataactcactataattacttgattttatccaagggcaaaattatccactttggcacgagggagaaattttcagatgcatcttatcaaagtataaacattccagtaacacagaacatggttccttcatcccgacttctggtctattacatcgtcacaggagaacagacagcagaattagtgtctgattcagtctggttaaatattgaagaaaaatgtggcaaccagctccaggttcatctgtctcctgatgcagatgcatattctccaggccaaactgtgtctcttaatatggcaactggaatggattcctgggtggcattagcagcagtggacagtgctgtgtatggagtccaaagaggagccaaaaagcccttggaaagagtatttcaattcttagagaagagtgatctgggctgtggggcaggtggtggcctcaacaatgccaatgtgttccacctagctggacttaccttcctcactaatgcaaatgcagatgactcccaagaaaatgatgaaccttgtaaagaaattctcaggccaagaagaacgctgcaaaagaagatagaagaaatagctgctaaatataaacattcagtagtgaagaaatgttgttacgatggagcctgcgttaataatgatgaaacctgtgagcagcgagctgcacggattagtttagggccaagatgcatcaaagctttcactgaatgttgtgtcgtcgcaagccagctccgtgctaatatctctcataaagacatgcaattgggaaggctacacatgaagaccctgttaccagtaagcaagccagaaattcggagttattttccagaaagctggttgtgggaagttcatcttgttcccagaagaaaacagttgcagtttgccctacctgattctctaaccacctgggaaattcaaggcgttggcatttcaaacactggtatatgtgttgctgatactgtcaaggcaaaggtgttcaaagatgtcttcctggaaatgaatataccatattctgttgtacgaggagaacagatccaattgaaaggaactgtttacaactataggacttctgggatgcagttctgtgttaaaatgtctgctgtggagggaatctgcacttcggaaagcccagtcattgatcatcagggcacaaagtcctccaaatgtgtgcgccagaaagtagagggctcctccagtcacttggtgacattcactgtgcttcctctggaaattggccttcacaacatcaatttttcactggagacttggtttggaaaagaaatcttagtaaaaacattacgagtggtgccagaaggtgtcaaaagggaaagctattctggtgttactttggatcctaggggtatttatggtaccattagcagacgaaaggagttcccatacaggatacccttagatttggtccccaaaacagaaatcaaaaggattttgagtgtaaaaggactgcttgtaggtgagatcttgtctgcagttctaagtcaggaaggcatcaatatcctaacccacctccccaaagggagtgcagaggcggagctgatgagcgttgtcccagtattctatgtttttcactacctggaaacaggaaatcattggaacatttttcattctgacccattaattgaaaagcagaaactgaagaaaaaattaaaagaagggatgttgagcattatgtcctacagaaatgctgactactcttacagtgtgtggaagggtggaagtgctagcacttggttaacagcttttgctttaagagtacttggacaagtaaataaatacgtagagcagaaccaaaattcaatttgtaattctttattgtggctagttgagaattatcaattagataatggatctttcaaggaaaattcacagtatcaaccaataaaattacagggtaccttgcctgttgaagcccgagagaacagcttatatcttacagcctttactgtgattggaattagaaaggctttcgatatatgccccctggtgaaaatcgacacagctctaattaaagctgacaactttctgcttgaaaatacactgccagcccagagcacctttacattggccatttctgcgtatgctctttccctgggagataaaactcacccacagtttcgttcaattgtttcagctttgaagagagaagctttggttaaaggtaatccacccatttatcgtttttggaaagacaatcttcagcataaagacagctctgtacctaacactggtacggcacgtatggtagaaacaactgcctatgctttactcaccagtctgaacttgaaagatataaattatgttaacccagtcatcaaatggctatcagaagagcagaggtatggaggtggcttttattcaacccaggacacaatcaatgccattgagggcctgacggaatattcactcctggttaaacaactccgcttgagtatggacatcgatgtttcttacaagcataaaggtgccttacataattataaaatgacagacaagaatttccttgggaggccagtagaggtgcttctcaatgatgacctcattgtcagtacaggatttggcagtggcttggctacagtacatgtaacaactgtagttcacaaaaccagtacctctgaggaagtttgcagcttttatttgaaaatcgatactcaggatattgaagcatcccactacagaggctacggaaactctgattacaaacgcatagtagcatgtgccagctacaagcccagcagggaagaatcatcatctggatcctctcatgcggtgatggacatctccttgcctactggaatcagtgcaaatgaagaagacttaaaagcccttgtggaaggggtggatcaactattcactgattaccaaatcaaagatggacatgttattctgcaactgaattcgattccctccagtgatttcctttgtgtacgattccggatatttgaactctttgaagttgggtttctcagtcctgccactttcacagtgtacgaataccacagaccagataaacagtgtaccatgttttatagcacttccaatatcaaaattcagaaagtctgtgaaggagccgcgtgcaagtgtgtagaagctgattgtgggcaaatgcaggaagaattggatctgacaatctctgcagagacaagaaaacaaacagcatgtaaaccagagattgcatatgcttataaagttagcatcacatccatcactgtagaaaatgtttttgtcaagtacaaggcaacccttctggatatctacaaaactggggaagctgttgctgagaaagactctgagattaccttcattaaaaaggtaacctgtactaacgctgagctggtaaaaggaagacagtacttaattatgggtaaagaagccctccagataaaatacaatttcagtttcaggtacatctaccctttagattccttgacctggattgaatactggcctagagacacaacatgttcatcgtgtcaagcatttttagctaatttagatgaatttgccgaagatatctttttaaatggatgctaaaattcctgaagttcagctgcatacagtttgcacttatggactcctgttgttgaagttcgtttttttgttttcttctttttttaaacattcatagctggtcttatttgtaaagctcactttacttagaattagtggcacttgcttttattagagaatgatttcaaatgctgtaactttctgaaataacatggccttggagggcatgaagacagatactcctccaaggttattggacaccggaaacaataaattggaacacctcctcaaacctaccactcaggaatgtttgctggggccgaaagaacagtccattgaaagggagtattacaaaaacatggcctttgcttgaaagaaaataccaaggaacaggaaactgatcattaaagcctgagtttgctttcaaaaaaaaaaaaaaaaaa

SEQ ID NO: 11483 - DNA, 5748 bp, Homo sapiens
gagaagaaagccagtgcgtctctgggcgcaggggccagtggggctcggaggcacaggcaccccgcgacactccaggttccccgacccacgtccctggcagccccgattatttacagcctcagcagagcacggggcgggggcagaggggcccgcccgggagggctgctacttcttaaaacctctgcgggctgcttagtcacagccccccttgcttgggtgtgtccttcgctcgctccctccctccgtcttaggtcactgttttcaacctcgaataaaaactgcagccaacttccgaggcagcctcattgcccagcggaccccagcctctgccaggttcggtccgccatcctcgtcccgtcctccgccggcccctgccccgcgcccagggatcctccagctcctttcgcccgcgccctccgttcgctccggacaccatggacaagttttggtggcacgcagcctggggactctgcctcgtgccgctgagcctggcgcagatcgatttgaatataacctgccgctttgcaggtgtattccacgtggagaaaaatggtcgctacagcatctctcggacggaggccgctgacctctgcaaggctttcaatagcaccttgcccacaatggcccagatggagaaagctctgagcatcggatttgagacctgcaggtatgggttcatagaagggcacgtggtgattccccggatccaccccaactccatctgtgcagcaaacaacacaggggtgtacatcctcacatccaacacctcccagtatgacacatattgcttcaatgcttcagctccacctgaagaagattgtacatcagtcacagacctgcccaatgcctttgatggaccaattaccataactattgttaaccgtgatggcacccgctatgtccagaaaggagaatacagaacgaatcctgaagacatctaccccagcaaccctactgatgatgacgtgagcagcggctcctccagtgaaaggagcagcacttcaggaggttacatcttttacaccttttctactgtacaccccatcccagacgaagacagtccctggatcaccgacagcacagacagaatccctgctaccactttgatgagcactagtgctacagcaactgagacagcaaccaagaggcaagaaacctgggattggttttcatggttgtttctaccatcagagtcaaagaatcatcttcacacaacaacacaaatggctggtacgtcttcaaataccatctcagcaggctgggagccaaatgaagaaaatgaagatgaaagagacagacacctcagtttttctggatcaggcattgatgatgatgaagattttatctccagcaccatttcaaccacaccacgggcttttgaccacacaaaacagaaccaggactggacccagtggaacccaagccattcaaatccggaagtgctacttcagacaaccacaaggatgactgatgtagacagaaatggcaccactgcttatgaaggaaactggaacccagaagcacaccctcccctcattcaccatgagcatcatgaggaagaagagaccccacattctacaagcacaatccaggcaactcctagtagtacaacggaagaaacagctacccagaaggaacagtggtttggcaacagatggcatgagggatatcgccaaacacccaaagaagactcccattcgacaacagggacagctgcagcctcagctcataccagccatccaatgcaaggaaggacaacaccaagcccagaggacagttcctggactgatttcttcaacccaatctcacaccccatgggacgaggtcatcaagcaggaagaaggatggatatggactccagtcatagtataacgcttcagcctactgcaaatccaaacacaggtttggtggaagatttggacaggacaggacctctttcaatgacaacgcagcagagtaattctcagagcttctctacatcacatgaaggcttggaagaagataaagaccatccaacaacttctactctgacatcaagcaataggaatgatgtcacaggtggaagaagagacccaaatcattctgaaggctcaactactttactggaaggttatacctctcattacccacacacgaaggaaagcaggaccttcatcccagtgacctcagctaagactgggtcctttggagttactgcagttactgttggagattccaactctaatgtcaatcgttccttatcaggagaccaagacacattccaccccagtggggggtcccataccactcatggatctgaatcagatggacactcacatgggagtcaagaaggtggagcaaacacaacctctggtcctataaggacaccccaaattccagaatggctgatcatcttggcatccctcttggccttggctttgattcttgcagtttgcattgcagtcaacagtcgaagaaggtgtgggcagaagaaaaagctagtgatcaacagtggcaatggagctgtggaggacagaaagccaagtggactcaacggagaggccagcaagtctcaggaaatggtgcatttggtgaacaaggagtcgtcagaaactccagaccagtttatgacagctgatgagacaaggaacctgcagaatgtggacatgaagattggggtgtaacacctacaccattatcttggaaagaaacaaccgttggaaacataaccattacagggagctgggacacttaacagatgcaatgtgctactgattgtttcattgcgaatcttttttagcataaaattttctactctttttgttttttgtgttttgttctttaaagtcaggtccaatttgtaaaaacagcattgctttctgaaattagggcccaattaataatcagcaagaatttgatcgttccagttcccacttggaggcctttcatccctcgggtgtgctatggatggcttctaacaaaaactacacatatgtattcctgatcgccaacctttcccccaccagctaaggacatttcccagggttaatagggcctggtccctgggaggaaatttgaatgggtccattttgcccttccatagcctaatccctgggcattgctttccactgaggttgggggttggggtgtactagttacacatcttcaacagaccccctctagaaatttttcagatgcttctgggagacacccaaagggtgaagctatttatctgtagtaaactatttatctgtgtttttgaaatattaaaccctggatcagtcctttgatcagtataattttttaaagttactttgtcagaggcacaaaagggtttaaactgattcataataaatatctgtacttcttcgatcttcaccttttgtgctgtgattcttcagtttctaaaccagcactgtctgggtccctacaatgtatcaggaagagctgagaatggtaaggagactcttctaagtcttcatctcagagaccctgagttcccactcagacccactcagccaaatctcatggaagaccaaggagggcagcactgtttttgttttttgttttttgttttttttttttgacactgtccaaaggttttccatcctgtcctggaatcagagttggaagctgaggagcttcagcctcttttatggtttaatggccacctgttctctcctgtgaaaggctttgcaaagtcacattaagtttgcatgacctgttatccctggggccctatttcatagaggctggccctattagtgatttccaaaaacaatatggaagtgccttttgatgtcttacaataagagaagaagccaatggaaatgaaagagattggcaaaggggaaggatgatgccatgtagatcctgtttgacatttttatggctgtatttgtaaacttaaacacaccagtgtctgttcttgatgcagttgctatttaggatgagttaagtgcctggggagtccctcaaaaggttaaagggattcccatcattggaatcttatcaccagataggcaagtttatgaccaaacaagagagtactggctttatcctctaacctcatattttctcccacttggcaagtcctttgtggcatttattcatcagtcagggtgtccgattggtcctagaacttccaaaggctgcttgtcatagaagccattgcatctataaagcaacggctcctgttaaatggtatctcctttctgaggctcctactaaaagtcatttgttacctaaacttatgtgcttaacaggcaatgcttctcagaccacaaagcagaaagaagaagaaaagctcctgactaaatcagggctgggcttagacagagttgatctgtagaatatctttaaaggagagatgtcaactttctgcactattcccagcctctgctcctccctgtctaccctctcccctccctctctccctccacttcaccccacaatcttgaaaaacttcctttctcttctgtgaacatcattggccagatccattttcagtggtctggatttctttttattttcttttcaacttgaaagaaactggacattaggccactatgtgttgttactgccactagtgttcaagtgcctcttgttttcccagagatttcctgggtctgccagaggcccagacaggctcactcaagctctttaactgaaaagcaacaagccactccaggacaaggttcaaaatggttacaacagcctctacctgtcgccccagggagaaaggggtagtgatacaagtctcatagccagagatggttttccactccttctagatattcccaaaaagaggctgagacaggaggttattttcaattttattttggaattaaatacttttttccctttattactgttgtagtccctcacttggatatacctctgttttcacgatagaaataagggaggtctagagcttctattccttggccattgtcaacggagagctggccaagtcttcacaaacccttgcaacattgcctgaagtttatggaataagatgtattctcactcccttgatctcaagggcgtaactctggaagcacagcttgactacacgtcatttttaccaatgattttcaggtgacctgggctaagtcatttaaactgggtctttataaaagtaaaaggccaacatttaattattttgcaaagcaacctaagagctaaagatgtaatttttcttgcaattgtaaatcttttgtgtctcctgaagacttcccttaaaattagctctgagtgaaaaatcaaaagagacaaaagacatcttcgaatccatatttcaagcctggtagaattggcttttctagcagaacctttccaaaagttttatattgagattcataacaacaccaagaattgattttgtagccaacattcattcaatactgttatatcagaggagtaggagagaggaaacatttgacttatctggaaaagcaaaatgtacttaagaataagaataacatggtccattcacctttatgttatagatatgtctttgtgtaaatcatttgttttgagttttcaaagaatagcccattgttcattcttgtgctgtacaatgaccactgttattgttactttgacttttcagagcacacccttcctctggtttttgtatatttattgatggatcaataataatgaggaaagcatgatatgtatattgctgagttgaaagcacttattggaaaatattaaaaggctaacattaaaagactaaaggaaacagaaaaaaaaaaaaaaaaa

SEQ ID NO: 11484 - DNA, 1843 bp, Homo sapiens
ctgcaggggggggggggggggggggctgtcatggcggcaggacggcgaacttgcagtatctccacgacccgcccctacaggtgccagtgcctccagaatgtggcagctcacaagcctcctgctgttcgtggccacctggggaatttccggcacaccagctcctcttgactcagtgttctccagcagcgagcgtgcccaccaggtgctgcggatccgcaaacgtgccaactccttcctggaggagctccgtcacagcagcctggagcgggagtgcatagaggagatctgtgacttcgaggaggccaaggaaattttccaaaatgtggatgacacactggccttctggtccaagcacgtcgacggtgaccagtgcttggtcttgcccttggagcacccgtgcgccagcctgtgctgcgggcacggcacgtgcatcgacggcatcggcagcttcagctgcgactgccgcagcggctgggagggccgcttctgccagcgcgaggtgagcttcctcaattgctcgctggacaacggcggctgcacgcattactgcctagaggaggtgggctggcggcgctgtagctgtgcgcctggctacaagctgggggacgacctcctgcagtgtcaccccgcagtgaagttcccttgtgggaggccctggaagcggatggagaagaagcgcagtcacctgaaacgagacacagaagaccaagaagaccaagtagatccgcggctcattgatgggaagatgaccaggcggggagacagcccctggcaggtggtcctgctggactcaaagaagaagctggcctgcggggcagtgctcatccacccctcctgggtgctgacagcggcccactgcatggatgagtccaagaagctccttgtcaggcttggagagtatgacctgcggcgctgggagaagtgggagctggacctggacatcaaggaggtcttcgtccaccccaactacagcaagagcaccaccgacaatgacatcgcactgctgcacctggcccagcccgccaccctctcgcagaccatagtgcccatctgcctcccggacagcggccttgcagagcgcgagctcaatcaggccggccaggagaccctcgtgacgggctggggctaccacagcagccgagagaaggaggccaagagaaaccgcaccttcgtcctcaacttcatcaagattcccgtggtcccgcacaatgagtgcagcgaggtcatgagcaacatggtgtctgagaacatgctgtgtgcgggcatcctcggggaccggcaggatgcctgcgagggcgacagtggggggcccatggtcgcctccttccacggcacctggttcctggtgggcctggtgagctggggtgagggctgtgggctccttcacaactacggcgtttacaccaaagtcagccgctacctcgactggatccatgggcacatcagagacaaggaagccccccagaagagctgggcaccttagcgaccctccctgcagggctgggcttttgcatggcaatggatgggacattaaagggacatgtaacaagcacaccggcctgctgttctgtccttccatccctcttttgggctcttctggagggaagtaacatttactgagcacctgttgtatgtcacatgccttatgaatagaatcttaactcctagagcaactctgtggggtggggaggagcagatccaagttttgcggggtctaaagctgtgtgtgttgagggggatactctgtttatgaaaaagaataaaaaacacaaccacgaaaaaaaaaaaaaaaaaaaaaaaaaaaaaaaaaaaaaaaacccccccccgccccccccccctgcag

SEQ ID NO: 11485 - DNA, 2280 bp, Homo sapiens
tccagccagaaggatggggtggctcccactcctgctgcttctgactcaatgcttaggggtccctgggcagcgctcgccattgaatgacttccaagtgctccggggcacagagctacagcacctgctacatgcggtggtgcccgggccttggcaggaggatgtggcagatgctgaagagtgtgctggtcgctgtgggcccttaatggactgccgggccttccactacaacgtgagcagccatggttgccaactgctgccatggactcaacactcgccccacacgaggctgcggcgttctgggcgctgtgacctcttccagaagaaagactacgtacggacctgcatcatgaacaatggggttgggtaccggggcaccatggccacgaccgtgggtggcctgccctgccaggcttggagccacaagttcccgaatgatcacaagtacacgcccactctccggaatggcctggaagagaacttctgccgtaaccctgatggcgaccccggaggtccttggtgctacacaacagaccctgctgtgcgcttccagagctgcggcatcaaatcctgccgggaggccgcgtgtgtctggtgcaatggcgaggaataccgcggcgcggtagaccgcacggagtcagggcgcgagtgccagcgctgggatcttcagcacccgcaccagcaccccttcgagccgggcaagttcctcgaccaaggtctggacgacaactattgccggaatcctgacggctccgagcggccatggtgctacactacggatccgcagatcgagcgagagttctgtgacctcccccgctgcgggtccgaggcacagccccgccaagaggccacaactgtcagctgcttccgcgggaagggtgagggctaccggggcacagccaataccaccactgcgggcgtaccttgccagcgttgggacgcgcaaatccctcatcagcaccgatttacgccagaaaaatacgcgtgcaaagaccttcgggagaacttctgccggaaccccgacggctcagaggcgccctggtgcttcacactgcggcccggcatgcgcgcggccttttgctaccagatccggcgttgtacagacgacgtgcggccccaggactgctaccacggcgcaggggagcagtaccgcggcacggtcagcaagacccgcaagggtgtccagtgccagcgctggtccgctgagacgccgcacaagccgcagttcacgtttacctccgaaccgcatgcacaactggaggagaacttctgccggaacccagatggggatagccatgggccctggtgctacacgatggacccaaggaccccattcgactactgtgccctgcgacgctgcgctgatgaccagccgccatcaatcctggaccccccagaccaggtgcagtttgagaagtgtggcaagagggtggatcggctggatcagcggcgttccaagctgcgcgtggttgggggccatccgggcaactcaccctggacagtcagcttgcggaatcggcagggccagcatttctgcggggggtctctagtgaaggagcagtggatactgactgcccggcagtgcttctcctcctgccatatgcctctcacgggctatgaggtatggttgggcaccctgttccagaacccacagcatggagagccaagcctacagcgggtcccagtagccaagatggtgtgtgggccctcaggctcccagcttgtcctgctcaagctggagagatctgtgaccctgaaccagcgtgtggccctgatctgcctgccccctgaatggtatgtggtgcctccagggaccaagtgtgagattgcaggctggggtgagaccaaaggtacgggtaatgacacagtcctaaatgtggccttgctgaatgtcatctctaaccaggagtgtaacatcaagcaccgaggacgtgtgcgggagagtgagatgtgcactgagggactgttggcccctgtgggggcctgtgagggtgactacgggggcccacttgcctgctttacccacaactgctgggtcctggaaggaattataatccccaaccgagtatgcgcaaggtcccgctggccagctgtcttcacgcgtgtctctgtgtttgtggactggattcacaaggtcatgagactgggttaggcccagccttgatgccatatgccttggggaggacaaaacttcttgtcagacataaagccatgtttcctctttaaaaaaaaaaaaaaaaaaaaaaaaaaaaaaaataaaaaaaaaaaaaaaaaaaaaaaaaa

SEQ ID NO: 11486 - DNA, 5666 bp, Homo sapiens
aagaaaaagaagaagaaaaagaggaagaagaagaaggaggaggaggaggaggaggaggagggggccgagaagagcagctcacccttcgcagccgcgatgggggaagacgacgccgcgcttcgggctggcagcagggggctctccgacccgtgggcagactcagtgggagtgcgaccccgcaccacggagcgccacatcgccgtacacaagcggcttgtgctggccttcgctgtgtccctcgtggcattgctcgcggtcacaatgctcgctgtgctgctcagcctgcgcttcgacgagtgcggggcgagtgccacgccaggcgccgacggtggcccctcaggctttccggagcgcggcggcaacgggagcctccctggatcggcccggcgcaaccaccacgcaggcggggactcctggcagcccgaggcgggtggggtggccagtccggggaccacgtcggcccagccgccgtcggaggaggagcgggagccgtgggagccgtggacgcagctgcgcctgtcgggccacctgaagccgctgcactacaatctgatgctcaccgccttcatggagaacttcaccttctccggggaggtcaacgtggagatcgcgtgccggaacgccacccgctacgtagtgctgcacgcttcccgagtggcggtggagaaagtgcagctggccgaggaccgggcgttcggggctgtccctgtagccggttttttcctctacccgcaaacccaggtcttagtggtggtgctgaataggacactggacgcgcagaggaattacaatctgaagattatctacaacgcgctcatcgagaatgagctcctgggcttcttccgcagctcctatgtgctccacggggagagaagattccttggtgttactcagttttcgcctacacatgccagaaaggcatttccttgttttgatgagccaatctacaaggctactttcaaaatcagcatcaagcatcaagcaacctatttatctttatctaatatgccagtggaaacttccgtgtttgaggaagatggatgggttacggatcacttttcacagacccctctcatgtccacatattatttagcctgggcaatttgcaacttcacatacagagaaactaccaccaagagtggggttgtagtacgattatatgcaagacctgatgctatcagaagaggatccggggactatgctctccatataacaaagagattaatagaattttatgaagactactttaaagtgccctattccttgccaaaactagatcttttagctgtgcctaagcatccgtatgctgctatggagaactggggactaagtatttttgtggaacaaagaatactgctggatcccagtgtttcatctatttcttatttgctggatgtcaccatggtcattgttcatgagatatgtcaccagtggtttggtgaccttgtgacgcctgtgtggtgggaagacgtgtggctgaaggaagggtttgctcactactttgaatttgttggtacagactacctctatcctggctggaacatggaaaagcagaggtttctgaccgatgttctgcatgaagtgatgctgctggacggtttggccagttcccatccagtatcacaggaagtgctgcaggcaacagatattgacagggtgtttgactggatcgcatataaaaagggtgctgctttaataagaatgctggctaattttatgggccattcagttttccagaggggtttgcaagattatttaaccattcataagtatggtaatgcagccagaaatgatctctggaatacattatcggaggctttaaaaagaaatgggaaatatgtaaatatacaagaagtaatggatcagtggacactccagatgggttatcctgttatcaccatcttgggaaacacaacagcagaaaatagaataataattacccaacagcattttatctatgatatcagtgctaaaactaaagcacttaaacttcagaataacagttacctgtggcagattccattaactattgtggtaggaaatagaagccatgtgtcttcagaagcaattatttgggtgtctaacaaatcagagcaccacagaataacttatttggacaaaggaagctggctgctggggaacatcaatcaaactggctattttagagtcaactatgacctaaggaactggagattattaattgatcaattaatccggaatcatgaggttctttctgtcagtaaccgagcgggcttgatcgatgatgccttcagcctagccagggctggctatttgcctcagaatattcctctggagattatcagatacctgtctgaggagaaggattttcttccttggcatgctgccagccgagctctttatcctctagataaattactggaccgcatggaaaactacaacattttcaatgaatatattttaaagcaagttgcaacaacatatatcaagcttgggtggccgaaaaataattttaatggatctcttgttcaagcatcctaccaacatgaagaactacgtagagaagttataatgctggcctgcagttttggcaacaagcactgtcaccaacaggcatcaacacttatttcagattggatttccagcaacaggaacagaataccactaaatgttagagacatcgtatactgtacaggagtgtcactactggatgaggatgtctgggaattcatatggatgaaattccattccaccacagcagtttctgagaagaaaatattattggaagccttaacttgcagtgatgacaggaatttattaaacaggcttctaaatctgtcactgaattctgaggtggtgctggatcaagatgcaattgatgtcataatccatgtagctcgaaatccacatggtcgagaccttgcctggaagtttttcagggataaatggaagatattaaataccaggtatggagaagcattgtttatgaattccaaactcatcagtggtgtcacagaatttcttaatactgaaggtgaactcaaagagctcaagaacttcatgaaaaactatgatggggtagctgctgcttctttctcacgagctgtggaaactgtcgaagccaatgtgcgctggaaaatgctttaccaagacgagcttttccaatggttaggaaaagctctaagacactaatatatgtatcttataaacaaacaattcaactcagaagtttatgagaagacacgctttttgtggaatgaggaaaatgtactacctagaaaatggccagattttcagtgttaacatgtgggaggaattttttttttagtttttattttttggttttgggggatattttttatttgtttcattcattctgttctgtttctctactgggtgttcctctctaaagaaactcttgcaagtgaaactagccatgattgcttcagctgtacattccttgctgtacaggaccaaatatgatagtgatgcatgttgatgttacagtcaatttggaaaaacatattcagaatatctgtgcatggatatattgtcctgcctgtgttccagcatgcttatttcaaacgtccagtgttgtgtgtgaatatgtgttacacctaggatgggcattatgcaaaagcacaaagattatatatgacaatcagtattgcaatgaaagaaaaactaaaaacagaaatgatattctcaattttgggcaatgtgagaggtaaaatagcccttgacatgatgaacatcacttatttcagcacttggattgtctggcaatgattactgtgttgctaactcattttctttgagttaaagctgtgtatacattttaaaaggcatatagatagtgtatgcatatgtatatgtacatagggaagccccatatgtatatagtatgttgtacactgcacatgtacaaagaatgtcttcagatcaaagaaaatttatctctttttataaacttaaggacagttgcaaaaggcttcaaggaatttatctcaacattattctttctatgtcctaactaaatttctcaactgttatgaatttttcatctacttcttgaacagtggtctattctgctacatgaagatgaatacaaacaaaatttttgtataaactactattccagttctcctgtgtcagtcttgcctatagattttgccatcgttttctgtcaaagttccttttgcatgaaacaattatgcaaacttataattattagtgctgaaaaagagtttattttccatcttgtttgttttcctaccttatgctgagtagtccagagagttaaaaaaattctctgcatgttggtcttttaagtctgttttgctctaatcctccattaagcgagcatacctcaagtgggtctattagcatttaatgaccttttatgccagttgtgccatcccttaagatgaaaagttccttttcttgtgttaatgtacaaagcttttcttttggcactgacaactgtgttctacctgggaattttgaatagccattttcatggctgtgtgttgtgtaacacaaatgtttttaaatggtattctcacccagtaggccagctctccaaacgttgcttagatgcttcaaaattagcatattttaagtttaccagtataaaataccaatgcaactactctacatagccaaatgtttgtaaatcacgtcttattttcctgaggtttttcactccaccaaatcttacaaatcattgaaagaaatatattctaacagtacgcactgaatagtgaaaataattagacattttaagaaccagagccatagaattattttaaattagtagaaaagaggagctatttccgaatctatagaataaagtaccacctaaaactgaattttatcatataagcaagtaatacctattagtcatacctaaatttttcagcacttcattcaattaaaatacatgaattttaaatattttacatgatgtgaataggcatgataatacttttagtataaaatctaaactttttccatttatcagaaatgataaaatccagttaccacatattcacgtttataaaatccttaattaaatgagtaacttctaaaatataacaatactaaatatcacactgtgatggaggtcccaaatatgtggtctatcaccactgaattcatgtaatagataagaaaaaaattagaggtggatgtcttgttttgtgtcatgaattactaaaatctcttagtagttgtggtatatttttgagtaaaattaccatttccagatttgagtttgaagggcttttatagttgtattttcctcctcactgttaataatcataatcctttttcagtattttagtggccttgaacaactggtttatctacaatctcaaatcctaagtgtataattatgtgcaatgttcaatacctcatataatacttgctcaacagtatagtggtaccaatggcattaagatggtgtttttgttctacatatttttcaataatttattctttctaatgttgaaattatatcaggctttaccggtttttttagttgtttaaataagtaatattttcaaaagaataaaataaccaatgatatctcttggaataatctgtaaaacgtagttataaaattctattttctacttaaaaaaaaaaaaaaaaaaaaaaaaaaaaaaaaaaaaaaaaaaaaaaaa

SEQ ID NO: 11487 - DNA, 2444 bp, Homo sapiens
agtaacagttgattgttacattcagtaacactgaatgtcagtgcagtccaatttacaggctggagcagcagctgcatcctgcatttccccgaagtattacatgattttcactccttgcaaactttaccatctttgttgcagagaatcggaaatcaatatgcatagcaaagtcacaatcatatgcatcagatttctcttttggtttcttttgctctgcatgcttattgggaagtcacatactgaagatgacatcataattgcaacaaagaatggaaaagtcagagggatgaacttgacagtttttggtggcacggtaacagcctttcttggaattccctatgcacagccacctcttggtagacttcgattcaaaaagccacagtctctgaccaagtggtctgatatttggaatgccacaaaatatgcaaattcttgctgtcagaacatagatcaaagttttccaggcttccatggatcagagatgtggaacccaaacactgacctcagtgaagactgtttatatctaaatgtatggattccagcacctaaaccaaaaaatgccactgtattgatatggatttatggtggtggttttcaaactggaacatcatctttacatgtttatgatggcaagtttctggctcgggttgaaagagttattgtagtgtcaatgaactatagggtgggtgccctaggattcttagctttgccaggaaatcctgaggctccagggaacatgggtttatttgatcaacagttggctcttcagtgggttcaaaaaaatatagcagcctttggtggaaatcctaaaagtgtaactctctttggagaaagtgcaggagcagcttcagttagcctgcatttgctttctcctggaagccattcattgttcaccagagccattctgcaaagtggatcctttaatgctccttgggcggtaacatctctttatgaagctaggaacagaacgttgaacttagctaaattgactggttgctctagagagaatgagactgaaataatcaagtgtcttagaaataaagatccccaagaaattcttctgaatgaagcatttgttgtcccctatgggactcctttgtcagtaaactttggtccgaccgtggatggtgattttctcactgacatgccagacatattacttgaacttggacaatttaaaaaaacccagattttggtgggtgttaataaagatgaagggacagcttttttagtctatggtgctcctggcttcagcaaagataacaatagtatcataactagaaaagaatttcaggaaggtttaaaaatattttttccaggagtgagtgagtttggaaaggaatccatcctttttcattacacagactgggtagatgatcagagacctgaaaactaccgtgaggccttgggtgatgttgttggggattataatttcatatgccctgccttggagttcaccaagaagttctcagaatggggaaataatgcctttttctactattttgaacaccgatcctccaaacttccgtggccagaatggatgggagtgatgcatggctatgaaattgaatttgtctttggtttacctctggaaagaagagataattacacaaaagccgaggaaattttgagtagatccatagtgaaacggtgggcaaattttgcaaaatatgggaatccaaatgagactcagaacaatagcacaagctggcctgtcttcaaaagcactgaacaaaaatatctaaccttgaatacagagtcaacaagaataatgacgaaactacgtgctcaacaatgtcgattctggacatcattttttccaaaagtcttggaaatgacaggaaatattgatgaagcagaatgggagtggaaagcaggattccatcgctggaacaattacatgatggactggaaaaatcaatttaacgattacactagcaagaaagaaagttgtgtgggtctctaattaatagatttaccctttatagaacatattttcctttagatcaaggcaaaaatatcaggagcttttttacacacctactaaaaaagttattatgtagctgaaacaaaaatgccagaaggataatattgattcctcacatctttaacttagtattttacctagcatttcaaaacccaaatggctagaacatgtttaattaaatttcacaatataaagttctacagttaattatgtgcatattaaaacaatggcctggttcaatttctttctttccttaataaatttaagttttttccccccaaaattatcagtgctctgcttttagtcacgtgtattttcattaccactcgtaaaaaggtatcttttttaaatgaattaaatattgaaacactgtacaccatagtttacaatattatgtttcctaattaaaataagaattgaatgtcaatatgagatattaaaataagcacagaaaatc

SEQ ID NO: 11488 - DNA, 2313 bp, Homo sapiens
ctcctcccgggcgggataattgaacggcgcggccctggcccagcgttggctgccgaggctcggccggagcgtggagcccgcgccgctgccccaggaccgcgcccgcgcctttgtccgccgccgcccaccgcccgtcgcccgccgcccatggagcgcgccgcgccgtcgcgccgggtcccgcttccgctgctgctgctcggcggccttgcgctgctggcggccggagtggacgcggatgtcctcctggaggcctgctgtgcggacggacaccggatggccactcatcagaaggactgctcgctgccatatgctacggaatccaaagaatgcaggatggtgcaggagcagtgctgccacagccagctggaggagctgcactgtgccacgggcatcagcctggccaacgagcaggaccgctgtgccacgccccacggtgacaacgccagcctggaggccacatttgtgaagaggtgctgccattgctgtctgctggggagggcggcccaggcccagggccagagctgcgagtacagcctcatggttggctaccagtgtggacaggtcttccgggcatgctgtgtcaagagccaggagaccggagatttggatgtcgggggcctccaagaaacggataagatcattgaggttgaggaggaacaagaggacccatatctgaatgaccgctgccgaggaggcgggccctgcaagcagcagtgccgagacacgggtgacgaggtggtctgctcctgcttcgtgggctaccagctgctgtctgatggtgtctcctgtgaagatgtcaatgaatgcatcacgggcagccacagctgccggcttggagaatcctgcatcaacacagtgggctctttccgctgccagcgggacagcagctgcgggactggctatgagctcacagaggacaatagctgcaaagatattgacgagtgtgagagtggtattcataactgcctccccgattttatctgtcagaatactctgggatccttccgctgccgacccaagctacagtgcaagagtggctttatacaagatgctctaggcaactgtattgatatcaatgagtgtttgagtatcagtgccccgtgccctatcgggcatacatgcatcaacacagagggctcctacacgtgccagaagaacgtgcccaactgtggccgtggctaccatctcaacgaggagggaacgcgctgtgttgatgtggacgagtgcgcgccacctgctgagccctgtgggaagggacatcgctgcgtgaactctcccggcagtttccgctgcgaatgcaagacgggttactattttgacggcatcagcaggatgtgtgtcgatgtcaacgagtgccagcgctaccccgggcgcctgtgtggccacaagtgcgagaacacgctgggctcctacctctgcagctgttccgtgggcttccggctctctgtggatggcaggtcatgtgaagacatcaatgagtgcagcagcagcccctgtagccaggagtgtgccaacgtctacggctcctaccagtgttactgccggcgaggctaccagctcagcgatgtggatggagtcacctgtgaagacatcgacgagtgcgccctgcccaccgggggccacatctgctcctaccgctgcatcaacatccctggaagcttccagtgcagctgcccctcgtctggctacaggctggcccccaatggccgcaactgccaagacattgatgagtgtgtgactggcatccacaactgctccatcaacgagacctgcttcaacatccagggcggcttccgctgcctggccttcgagtgccctgagaactaccgccgctccgcagccacccgctgtgagcgcttgccttgccatgagaatcgggagtgctccaagctgcctctgagaataacctactaccacctctctttccccaccaacatccaagcgcccgcggtggttttccgcatgggcccctccagtgctgtccccggggacagcatgcagctggccatcaccggcggcaatgaggagggctttttcaccacccggaaggtgagcccccacagtggggtggtggccctcaccaagcctgtccccgagcccagggacttgctcctgaccgtcaagatggatctctctcgccacggcaccgtcagctcctttgtggccaagcttttcatctttgtgtctgcagagctctgagcactcgcttcgcgtcgcggggtctccctcctgttgctttcctaaccctgccctccggggcgttaataaagtcttagcaagcgtcccacacagtgaaaaaaaaaaaaaaaaaaa

SEQ ID NO: 11489 - DNA, 2947 bp, Homo sapiens
ctcctcccgggcgggataattgaacggcgcggccctggcccagcgttggctgccgaggctcggccggagcgtggagcccgcgccgctgccccaggaccgcgcccgcgcctttgtccgccgccgcccaccgcccgtcgcccgccgcccatggagcgcgccgcgccgtcgcgccgggtcccgcttccgctgctgctgctcggcggccttgcgctgctggcggccggagtggacgcggatgtcctcctggaggcctgctgtgcggacggacaccggatggccactcatcagaaggactgctcgctgccatatgctacggaatccaaagaatgcaggatggtgcaggagcagtgctgccacagccagctggaggagctgcactgtgccacgggcatcagcctggccaacgagcaggaccgctgtgccacgccccacggtgacaacgccagcctggaggccacatttgtgaagaggtgctgccattgctgtctgctggggagggcggcccaggcccagggccagagctgcgagtacagcctcatggttggctaccagtgtggacaggtcttccgggcatgctgtgtcaagagccaggagaccggagatttggatgtcgggggcctccaagaaacggataagatcattgaggttgaggaggaacaagaggacccatatctgaatgaccgctgccgaggaggcgggccctgcaagcagcagtgccgagacacgggtgacgaggtggtctgctcctgcttcgtgggctaccagctgctgtctgatggtgtctcctgtgaagatgtcaatgaatgcatcacgggcagccacagctgccggcttggagaatcctgcatcaacacagtgggctctttccgctgccagcgggacagcagctgcgggactggctatgagctcacagaggacaatagctgcaaagatattgacgagtgtgagagtggtattcataactgcctccccgattttatctgtcagaatactctgggatccttccgctgccgacccaagctacagtgcaagagtggctttatacaagatgctctaggcaactgtattgatatcaatgagtgtttgagtatcagtgccccgtgccctatcgggcatacatgcatcaacacagagggctcctacacgtgccagaagaacgtgcccaactgtggccgtggctaccatctcaacgaggagggaacgcgctgtgttgatgtggacgagtgcgcgccacctgctgagccctgtgggaagggacatcgctgcgtgaactctcccggcagtttccgctgcgaatgcaagacgggttactattttgacggcatcagcaggatgtgtgtcgatgtcaacgagtgccagcgctaccccgggcgcctgtgtggccacaagtgcgagaacacgctgggctcctacctctgcagctgttccgtgggcttccggctctctgtggatggcaggtcatgtgaagacatcaatgagtgcagcagcagcccctgtagccaggagtgtgccaacgtctacggctcctaccagtgttactgccggcgaggctaccagctcagcgatgtggatggagtcacctgtgaagacatcgacgagtgcgccctgcccaccgggggccacatctgctcctaccgctgcatcaacatccctggaagcttccagtgcagctgcccctcgtctggctacaggctggcccccaatggccgcaactgccaagacattgatgagtgtgtgactggcatccacaactgctccatcaacgagacctgcttcaacatccagggcggcttccgctgcctggccttcgagtgccctgagaactaccgccgctccgcagccacgctccagcaggagaagacagacacggtccgctgcatcaagtcctgccgccccaacgatgtcacatgcgtgttcgaccccgtgcacaccatctcccacaccgtcatctcgctgcctaccttccgcgagttcacccgccctgaagagatcatcttcctccgggccatcacgccaccgcatcctgccagccaggctaacatcatcttcgacatcacggaagggaacctgcgggactcttttgacatcatcaagcgttacatggacggcatgaccgtgggtgtcgtgcgccaggtgcggcccatcgtgggcccatttcatgccgtcctgaagctggagatgaactatgtggtcgggggcgtggtctcccaccgaaatgttgtcaacgtccacatcttcgtctctgagtactggttctgagggctggtctgccgcacagccgcaggtgcacctccaggccaaatcattgctgccagtgactgtggtctgtacttgtttataccctcagacttttttaatgttaggtatttgtagcattaggccaacatgtattaagctgagccagatgaataagtccatctgatgtattttcggtgtttaaaaaatgagcccagttgctcaactgtttggttgaaaaccttgctcattttttaatgcgaaggctaagtgtcaccccctttctctgcctctggctgggccttgctaagggccaaggaaagaaagacattttttagggggcagccagtccaaatgccaaaagaagaccagttcttgccctgattgtatgaaatttgacattttggcactttttttttttttttggccaatcagattttctatgttctaaggacatggctgctgtagaatagcacagacgtggatgataaattatccccagaagcagcatgacagaatgcctcggggagcacttggaagggaaattgcagttctgttgaaatagaggaaaatcccttggtaaagacacagcctgttaggctcgtgtgggcctccagtatgttcaccaggggaatggctgggatttctcggcactctgcatcatccatcttttcttataggtgggaaaataaacaactttgtgatcctcctg

SEQ ID NO: 11490 - DNA, 2485 bp, Homo sapiens
ctcctcccgggcgggataattgaacggcgcggccctggcccagcgttggctgccgaggctcggccggagcgtggagcccgcgccgctgccccaggaccgcgcccgcgcctttgtccgccgccgcccaccgcccgtcgcccgccgcccatggagcgcgccgcgccgtcgcgccgggtcccgcttccgctgctgctgctcggcggccttgcgctgctggcggccggagtggacgcggatgtcctcctggaggcctgctgtgcggacggacaccggatggccactcatcagaaggactgctcgctgccatatgctacggaatccaaagaatgcaggatggtgcaggagcagtgctgccacagccagctggaggagctgcactgtgccacgggcatcagcctggccaacgagcaggaccgctgtgccacgccccacggtgacaacgccagcctggaggccacatttgtgaagaggtgctgccattgctgtctgctggggagggcggcccaggcccagggccagagctgcgagtacagcctcatggttggctaccagtgtggacaggtcttccgggcatgctgtgtcaagagccaggagaccggagatttggatgtcgggggcctccaagaaacggataagatcattgaggttgaggaggaacaagaggacccatatctgaatgaccgctgccgaggaggcgggccctgcaagcagcagtgccgagacacgggtgacgaggtggtctgctcctgcttcgtgggctaccagctgctgtctgatggtgtctcctgtgaagatgtcaatgaatgcatcacgggcagccacagctgccggcttggagaatcctgcatcaacacagtgggctctttccgctgccagcgggacagcagctgcgggactggctatgagctcacagaggacaatagctgcaaagatattgacgagtgtgagagtggtattcataactgcctccccgattttatctgtcagaatactctgggatccttccgctgccgacccaagctacagtgcaagagtggctttatacaagatgctctaggcaactgtattgatatcaatgagtgtttgagtatcagtgccccgtgccctatcgggcatacatgcatcaacacagagggctcctacacgtgccagaagaacgtgcccaactgtggccgtggctaccatctcaacgaggagggaacgcgctgtgttgatgtggacgagtgcgcgccacctgctgagccctgtgggaagggacatcgctgcgtgaactctcccggcagtttccgctgcgaatgcaagacgggttactattttgacggcatcagcaggatgtgtgtcgatgtcaacgagtgccagcgctaccccgggcgcctgtgtggccacaagtgcgagaacacgctgggctcctacctctgcagctgttccgtgggcttccggctctctgtggatggcaggtcatgtgaagacatcaatgagtgcagcagcagcccctgtagccaggagtgtgccaacgtctacggctcctaccagtgttactgccggcgaggctaccagctcagcgatgtggatggagtcacctgtgaagacatcgacgagtgcgccctgcccaccgggggccacatctgctcctaccgctgcatcaacatccctggaagcttccagtgcagctgcccctcgtctggctacaggctggcccccaatggccgcaactgccaagacattgatgagtgtgtgactggcatccacaactgctccatcaacgagacctgcttcaacatccagggcggcttccgctgcctggccttcgagtgccctgagaactaccgccgctccgcagccacatgatcgtagggaactctgcatgaggccatcggtgcaggctggagaagagaaggcaagttggcaggagtggagaccacgggcatttgagccacttcctcatgtaacttaacttgtgccttcaggacctgctcaagcccgatcacgtatataccacttccatttgatgatggaatgctgctgttcatgaccaactttatggctagatgggtcagaaagcacccagttcatgataggcagttcaggtcatatggtgacttgatgacccagagtcaaacattcagtttccaccaaagcccagtaacaggccaagagctgtctctcaaaaggagagtagttatctgcagaagatggcagggccttgctccgaaagcctagagaccgccactgtgattcacctatgggggcctgccaaaggctgcagccagcatccttatctgccactgacacctcaagcaacattggatctgctgggtcatatggcccaagtggcagagcaacttgcacaacagcctggacctgtcatagagctttctcctgttctggaccccactcaaaactggcagcctttcaggtcactcgataaatgtgctggagtaacactcaaacgaggaatgtgttgcctccaaaatccaataggccc

SEQ ID NO: 11491 - DNA, 2662 bp, Homo sapiens
ctcctcccgggcgggataattgaacggcgcggccctggcccagcgttggctgccgaggctcggccggagcgtggagcccgcgccgctgccccaggaccgcgcccgcgcctttgtccgccgccgcccaccgcccgtcgcccgccgcccatggagcgcgccgcgccgtcgcgccgggtcccgcttccgctgctgctgctcggcggccttgcgctgctggcggccggagtggacgcggatgtcctcctggaggcctgctgtgcggacggacaccggatggccactcatcagaaggactgctcgctgccatatgctacggaatccaaagaatgcaggatggtgcaggagcagtgctgccacagccagctggaggagctgcactgtgccacgggcatcagcctggccaacgagcaggaccgctgtgccacgccccacggtgacaacgccagcctggaggccacatttgtgaagaggtgctgccattgctgtctgctggggagggcggcccaggcccagggccagagctgcgagtacagcctcatggttggctaccagtgtggacaggtcttccgggcatgctgtgtcaagagccaggagaccggagatttggatgtcgggggcctccaagaaacggataagatcattgaggttgaggaggaacaagaggacccatatctgaatgaccgctgccgaggaggcgggccctgcaagcagcagtgccgagacacgggtgacgaggtggtctgctcctgcttcgtgggctaccagctgctgtctgatggtgtctcctgtgaagatgtcaatgaatgcatcacgggcagccacagctgccggcttggagaatcctgcatcaacacagtgggctctttccgctgccagcgggacagcagctgcgggactggctatgagctcacagaggacaatagctgcaaagatattgacgagtgtgagagtggtattcataactgcctccccgattttatctgtcagaatactctgggatccttccgctgccgacccaagctacagtgcaagagtggctttatacaagatgctctaggcaactgtattgatatcaatgagtgtttgagtatcagtgccccgtgccctatcgggcatacatgcatcaacacagagggctcctacacgtgccagaagaacgtgcccaactgtggccgtggctaccatctcaacgaggagggaacgcgctgtgttgatgtggacgagtgcgcgccacctgctgagccctgtgggaagggacatcgctgcgtgaactctcccggcagtttccgctgcgaatgcaagacgggttactattttgacggcatcagcaggatgtgtgtcgatgtcaacgagtgccagcgctaccccgggcgcctgtgtggccacaagtgcgagaacacgctgggctcctacctctgcagctgttccgtgggcttccggctctctgtggatggcaggtcatgtgaagacatcaatgagtgcagcagcagcccctgtagccaggagtgtgccaacgtctacggctcctaccagtgttactgccggcgaggctaccagctcagcgatgtggatggagtcacctgtgaagacatcgacgagtgcgccctgcccaccgggggccacatctgctcctaccgctgcatcaacatccctggaagcttccagtgcagctgcccctcgtctggctacaggctggcccccaatggccgcaactgccaagacattgatgagtgtgtgactggcatccacaactgctccatcaacgagacctgcttcaacatccagggcggcttccgctgcctggccttcgagtgccctgagaactaccgccgctccgcagccacgcagaaatccaagaagggaaggcagaacaccccagcgggatcaagtaaagaggactgcagggttcttccatggaagcaggggttggaggatacccaccttgatgcctagtgaggaagatggacctggacagacagtcagctccacaccttgcgctgagcagctgtgattgtgccacgggagcatgagcccttttccccacggcccttgccactgtctcctggccctctctctgatcatgccaggtttgcaccagcctcgagtctcccatgttgtagtacattctccaagatgcagcccaggagcctctctgaaggaccagtctggttacgatggtctgagcttccttagaaccttccatggttgtcttttcccagcagatgaagcatagcctccttggaatggcatgggaggcctggcctgatctggcctctgcccaccctttgagctgtacctgccccaccccagctcatccatgtgcttgtaccctggccccacggggaggcttgcccttccctgaatgtgccttcttgtggctttagcatgtgccatgctgtccccctgcagactgccattctccttgcagacttggctcagaagtcacctcctcagtgcagttagcctgagctcccctggccccaggtgcctccatcagagcatttaccccattgtgttgtggctgttccttaacgtccccactagccaggctctttgagggcagggattgtgtctggttaatttctgtattctctgcaactttgcaatgtttggcttgaagaaggagctcagtaaacatctgaataaacatgcaggttgatgg

SEQ ID NO: 11492 - DNA, 2760 bp, Homo sapiens
accccagccatgcccgccctcagtcgctgggccagcctgcccggccccagcatgcgggaggcagccttcatgtacagcacagcagtggccatcttcctggtcatcctggtggccgcactgcagggctcggctccccgtgagagccccctcccctatcacatccccctggacccggaggggtccctggagctctcatggaatgtcagctacacccaggaggccatccatttccagctcctggtgcggaggctcaaggctggcgtcctgtttgggatgtccgaccgtggcgagcttgagaacgcagatctcgtggtgctctggaccgatggggacactgcctattttgcggacgcctggagtgaccagaaggggcagatccacctggatccccagcaggactaccagctgctgcaggtgcagaggaccccagaaggcctgaccctgcttttcaagaggccctttggcacctgcgaccccaaggattacctcattgaggacggcactgtccacttggtctacgggatcctggaggagccgttccggtcactggaggccatcaacggctcgggcctgcagatggggctgcagagggtgcagctcctgaagcccaatatccccgaaccggagttgccctcagacgcgtgcaccatggaggtccaagctcccaatatccagatccccagccaggagaccacgtactggtgctacattaaggagcttccaaagggcttctctcggcaccacattatcaagtacgagcccatcgtcaccaagggcaatgaggcccttgtccaccacatggaagtcttccagtgcgcccccgagatggacagcgtcccccacttcagcgggccctgcgactccaagatgaaacccgaccgcctcaactactgccgccacgtgctggccgcctgggccctgggtgccaaggcattttactacccagaggaagccggccttgccttcgggggtccagggtcctccagatatctccgcctggaagttcactaccacaacccactggtgatagaaggacgaaacgactcctcaggcatccgcttgtactacacagccaagctgcggcgcttcaacgcggggatcatggagctgggactggtgtacacgccagtgatggccattccaccacgggagaccgccttcatcctcactggctactgcacggacaagtgcacccagctggcactgcctccctccgggatccacatcttcgcctctcagctccacacacacctgactgggagaaaggtggtcacagtgctggtccgggacggccgggagtgggagatcgtgaaccaggacaatcactacagccctcacttccaggagatccgcatgttgaagaaggtcgtgtcggtccatccgggagatgtgctcatcacctcctgcacgtacaacacggaagaccgggagctggccacagtggggggcttcgggatcctggaggagatgtgtgtcaactacgtgcactactacccccagacgcagctggagctctgcaagagcgctgtggacgccggcttcctgcagaagtacttccacctcatcaacaggttcaacaacgaggatgtctgcacctgccctcaggcgtccgtgtctcagcagttcacctctgttccctggaactccttcaaccgcgacgtactgaaggccctgtacagcttcgcgcccatctccatgcactgcaacaagtcctcagccgtccgcttccagggtgaatggaacctgcagcccctgcccaaggtcatctccacactggaagagcccaccccacagtgccccaccagccagggccgaagccctgctggccccaccgttgtcagcattggtgggggcaaaggctgaggggggacctactcctccccctcctccatgctgtccctgtgggctcacaccggcactgtgcactctactctgcgacgatccccatggaacagccctgcacgcccaggatgaaggggccagaccacgcccctgcctgagaccacggtccaatccagccttcttcccccagggtcccctgcatggctgagagggtgtgggtgccctgttgacctaccctggaccgagtggaccacgacctcgtccatttaaacccggctgactcagtgcagggacagcctgcacagtggtccagggtccagccctccgccagccctgttccgcctcactgggtgtggcctggcttctgggacaggcaccatgctgggccggggtgtggaatcaccgggaacgcccccgcccccgccccgctgctcccggtgtgcagcgggtgcgggtgccgcttaaacatttccctgctgagtggctcgtgtttcacagtgggcggcttccctgcgacggaggcaggaccaggcatttagctagttagagactcgcctgggaaattgctccattcctgagtaaacagatattttcgcccacctaaagggaagccctgacaacaactatcaccaaaagacgaggcggcaaagatccagcggggcttctgggcgccggttccacgtggggtggaattattagcaccagcttgcttctctgccggtggggccagcgctgaacagaccggggtggagtcagggctgtgctttccgcgtggttctgccacttagggagtgtgccttgggcgggccatttcacattcctgaccctcacttttctcatctgtaaaaccaggctgatgccgtgcgggctaatgagccaataaagctcacacttgggctggcacccactggaggtggg

SEQ ID NO: 11493 - DNA, 1701 bp, Homo sapiens
gagcaccgcacactcacttcaccctggttcaacacccccacgaggttgaccccgtcattatgttagagattatgcattttccacatagggaaactgaggctcaggggtgttaagtgactcacccaaggtcacacggctaggaagttgctgcacgctcctatgctccatttcctctgggagcctatcaacccagataaagcgggacctcctctctggtagaggtgcagggggcagtactcaacatgatcacagagggagcgcaggcccctcgattgttgctgccgccgctgctcctgctgctcaccctgccagccacaggctcagaccccgtgctctgcttcacccagtatgaagaatcctccggcaagtgcaagggcctcctggggggtggtgtcagcgtggaagactgctgtctcaacactgcctttgcctaccagaaacgtagtggtgggctctgtcagccttgcaggtccccacgatggtccctgtggtccacatgggccccctgttcggtgacgtgctctgagggctcccagctgcggtaccggcgctgtgtgggctggaatgggcagtgctctggaaaggtggcacctgggaccctggagtggcagctccaggcctgtgaggaccagcagtgctgtcctgagatgggcggctggtctggctgggggccctgggagccttgctctgtcacctgctccaaagggacccggacccgcaggcgagcctgtaatcaccctgctcccaagtgtgggggccactgcccaggacaggcacaggaatcagaggcctgtgacacccagcaggtctgccccacacacggggcctgggccacctggggcccctggaccccctgctcagcctcctgccacggtggaccccacgaacctaaggagacacgaagccgcaagtgttctgcacctgagccctcccagaaacctcctgggaagccctgcccggggctagcctacgagcagcggaggtgcaccggcctgccaccctgcccagtggctgggggctgggggccttggggccctgtgagcccctgccctgtgacctgtggcctgggccagaccatggaacaacggacgtgcaatcaccctgtgccccagcatgggggccccttctgtgctggcgatgccacccggacccacatctgcaacacagctgtgccctgccctgtggatggggagtgggactcgtggggggagtggagcccctgtatccgacggaacatgaagtccatcagctgtcaagaaatcccgggccagcagtcacgcgggaggacctgcaggggccgcaagtttgacggacatcgatgtgccgggcaacagcaggatatccggcactgctacagcatccagcactgccccttgaaaggatcatggtcagagtggagtacctgggggctgtgcatgcccccctgtggacctaatcctacccgtgcccgccagcgcctctgcacacccttgctccccaagtacccgcccaccgtttccatggtcgaaggtcagggcgagaagaacgtgaccttctgggggagaccgctgccacggtgtgaggagctacaagggcagaagctggtggtggaggagaaacgaccatgtctacacgtgcctgcttgcaaagaccctgaggaagaggaactctaacacttctctcctccactctgagccccctgaccttccaaacctcaataaa

SEQ ID NO: 11494 - DNA, 2436 bp, Homo sapiens
attcatttcccccagtgaccttgacaagtcagaagcttgaaagcagggaaatccggatgtctcggttatgaagtggagcagtgagtgtgagcctcaacatagttccagaactctccatccggactagttattgagcatctgcctctcatatcaccagtggccatctgaggtgtttccctggctctgaaggggtaggcacgatggccaggtgcttcagcctggtgttgcttctcacttccatctggaccacgaggctcctggtccaaggctctttgcgtgcagaagagctttccatccaggtgtcatgcagaattatggggatcacccttgtgagcaaaaaggcgaaccagcagctgaatttcacagaagctaaggaggcctgtaggctgctgggactaagtttggccggcaaggaccaagttgaaacagccttgaaagctagctttgaaacttgcagctatggctgggttggagatggattcgtggtcatctctaggattagcccaaaccccaagtgtgggaaaaatggggtgggtgtcctgatttggaaggttccagtgagccgacagtttgcagcctattgttacaactcatctgatacttggactaactcgtgcattccagaaattatcaccaccaaagatcccatattcaacactcaaactgcaacacaaacaacagaatttattgtcagtgacagtacctactcggtggcatccccttactctacaatacctgcccctactactactcctcctgctccagcttccacttctattccacggagaaaaaaattgatttgtgtcacagaagtttttatggaaactagcaccatgtctacagaaactgaaccatttgttgaaaataaagcagcattcaagaatgaagctgctgggtttggaggtgtccccacggctctgctagtgcttgctctcctcttctttggtgctgcagctggtcttggattttgctatgtcaaaaggtatgtgaaggccttcccttttacaaacaagaatcagcagaaggaaatgatcgaaaccaaagtagtaaaggaggagaaggccaatgatagcaaccctaatgaggaatcaaagaaaactgataaaaacccagaagagtccaagagtccaagcaaaactaccgtgcgatgcctggaagctgaagtttagatgagacagaaatgaggagacacacctgaggctggtttctttcatgctccttaccctgccccagctggggaaatcaaaagggccaaagaaccaaagaagaaagtccacccttggttcctaactggaatcagctcaggactgccattggactatggagtgcaccaaagagaatgcccttctccttattgtaaccctgtctggatcctatcctcctacctccaaagcttcccacggcctttctagcctggctatgtcctaataatatcccactgggagaaaggagttttgcaaagtgcaaggacctaaaacatctcatcagtatccagtggtaaaaaggcctcctggctgtctgaggctaggtgggttgaaagccaaggagtcactgagaccaaggctttctctactgattccgcagctcagaccctttcttcagctctgaaagagaaacacgtatcccacctgacatgtccttctgagcccggtaagagcaaaagaatggcagaaaagtttagcccctgaaagccatggagattctcataacttgagacctaatctctgtaaagctaaaataaagaaatagaacaaggctgaggatacgacagtacactgtcagcagggactgtaaacacagacagggtcaaagtgttttctctgaacacattgagttggaatcactgtttagaacacacacacttactttttctggtctctaccactgctgatattttctctaggaaatatacttttacaagtaacaaaaataaaaactcttataaatttctatttttatctgagttacagaaatgattactaaggaagattactcagtaatttgtttaaaaagtaataaaattcaacaaacatttgctgaatagctactatatgtcaagtgctgtgcaaggtattacactctgtaattgaatattattcctcaaaaaattgcacatagtagaacgctatctgggaagctatttttttcagttttgatatttctagcttatctacttccaaactaatttttatttttgctgagactaatcttattcattttctctaatatggcaaccattataaccttaatttattattaacatacctaagaagtacattgttacctctatataccaaagcacattttaaaagtgccattaacaaatgtatcactagccctcctttttccaacaagaagggactgagagatgcagaaatatttgtgacaaaaaattaaagcatttagaaaacttaaaaaaaaaaaaaaaaaaaaaaa

SEQ ID NO: 11495 - DNA, 11144 bp, Homo sapiens
aggaggaaatttgcaagaggcggcagcccctgagcgcccagagctcttgaaaggccacccaggagaggtgtgagacccggcggcagcatccgtccaggtgggacccgctgagcgccgtggccagtcccccattcccatcccggcaccccaaaggcgcgctcgcccgattgcttcgagttccccgacctggggattttttttttagccgctggtggtgggcgcctcgtgggctaaggcccggcgcctgctctgctacccgcgctgcctttagcggtcgcccccgccgccgctgccagggacgtgctgggaaagcccaagccccgggagaagatgccggccatcctggtcgcctccaaaatgaagtcgggactgcccaaacccgtgcacagcgccgcgcccatcctgcacgtgcccccggcccgggcgggcccccagccctgctacctgaagttgggaagcaaggtggaggtgagcaagaccacctatcctagccagatccccctgaaatcgcaggtgctgcaggggctgcaggagccagcgggggaggggctcccgctgcggaagagcggctcggtggaaaacgggttcgatacccagatctacacagactgggccaatcattacctagccaaatccggccacaagcgtctcatcagggatctccagcaagatgtgacagatggcgtcctcctggcccagattatccaggttgtggcaaatgaaaagattgaagacatcaatggctgtccgaagaacagatcccaaatgattgaaaacatagatgcctgcttgaatttcctggcagctaagggaataaacatccaggggctgtctgcagaagagatcaggaatggaaacctcaaggccattctaggcctcttcttcagcctctcccgatacaagcagcagcagcagcagccccagaagcagcacctctcctcacctctgccgcccgccgtatcccaggtggccggggccccctcccagtgccaggctggcacccctcagcagcaggtgccagtcactccccaagccccgtgccagcctcaccagccagcgccacatcagcagtcaaaagcacaagctgaaatgcagtccagtgcatcatccaaggactcatctcaaagcaaaatcatccgcttcactctgggtcagaaaaagatctctagacttccaggtcctaccgcgagggtatccgctgcaggcagcgaggccaaaacacgcggagggtcaactactgctaacaaccgacgcagccagagctttaacaactatgataaatccaaaccagtcacctccccacccccaccgccaagcagccacgagaaagagcctttggcaagttcagcctcctcccaccccggaatgagtgacaatgcacctgcttccttggagagcggcagcagctccacccctactaattgcagtacctcctcggccatcccgcagcccggtgcagccaccaagccttggcgcagcaaatccctcagcgtgaagcacagtgccacggtatccatgctctcggtcaagcctcctgggcctgaggcccccaggcccacacctgaagccatgaagccggcccccaacaatcagaagtccatgctggaaaagctgaaacttttcaacagtaaagggggctcaaaggcaggtgaggggccggggtcccgggacacaagctgtgagcggctggagactctgcccagcttcgaagagagcgaggagctggaggccgccagtcgcatgctcaccaccgtgggccctgcttccagcagccccaagattgcactcaagggcattgcccagaggacttttagccgggcactgaccaacaagaagagttctctgaaaggcaatgagaaagagaaggagaaacaacagcgggagaaggataaggagaaaagcaaggaccttgccaagagagcctctgtgacggagaggctggacctcaaggaggagccaaaagaagaccccagtggagcagctgtgcccgagatgccaaaaaagtcctccaagattgccagcttcatccccaaaggggggaagctcaacagtgccaagaaggagcccatggccccttcccacagtggaataccaaaaccaggaatgaagagcatgcccgggaaatccccaagtgccccagcgccttccaaggaaggggagcggagccggagtgggaagctgagctcaggactcccccagcagaagccccagctggacggcagacactccagttcctcttccagcctggcgtcctcagaaggaaaaggcccaggagggaccaccctgaaccacagcatcagcagccagactgtcagtgggtctgtcgggaccacccagaccacaggaagcaataccgtcagtgttcagctacctcagccccagcagcaatacaaccatcccaacactgccacggttgcacctttcctgtacaggtctcagacggacactgaagggaatgttactgccgagtcaagctcaacaggtgtgagcgtggagcccagccacttcaccaagactggacagcctgctctggaagaactcactggggaagatcctgaggctcggcggctgcggacagtgaagaacatcgctgatctgcggcagaatttggaggaaaccatgtccagtttaaggggaactcaggttacacacagcacattggaaaccacgtttgacaccaatgtcaccacggagatgagtggccgtagcatactcagcttgacagggaggcccacacctctgtcctggagactgggccagtccagccctcggctccaagcaggagacgccccctcaatgggcaatgggtatccccctcgagccaacgccagcaggttcatcaacactgagtcaggtcgctatgtgtactccgcccctctgagaaggcagctggcctcccggggcagtagtgtctgccatgtggacgtctcagacaaggcaggagatgagatggacctggaaggcatcagcatggacgcccccggctacatgagcgatggggatgttctgagcaagaacatccggaccgatgacattacaagcggatacatgactgatggtggacttggcctctatacccgtcgcctgaaccggctccctgatgggatggctgtggtacgggagaccctgcaacgaaatacctccctgggcctcggagacgctgacagctgggacgacagcagctccgtcagcagcggcatcagcgacaccatagacaacctcagcactgatgacatcaacaccagctcctccatcagctcttatgccaacacacctgcctcctctcgaaaaaacctggatgtgcagactgatgctgagaagcactcacaggtggagaggaattccctgtggtctggtgatgatgtcaagaaatcagacggaggctcagacagcggcataaaaatggagccaggttccaagtggaggcggaatccttctgatgtgtctgacgagtccgacaaaagcacgtcgggcaagaagaatcctgtcatctcccagacaggctcatggcggcgaggcatgacagctcaggtgggcatcaccatgccaaggacgaagccttcagccccggcaggcgcactgaagaccccaggaactggaaaaacagacgacgcaaaggtgtctgagaaaggaaggctttctcctaaagcctcccaggtgaagcgctccccatcagatgcaggccggagcagtggtgacgaatccaaaaagcccctccccagcagctctaggacacctactgccaatgccaacagctttgggttcaagaagcagagtggttccgccgccggcctggccatgatcacagccagcggggtgactgtcaccagcaggtcagccacactgggcaaaatcccaaagtcatctgcactcgtcagtcggtctgctggtcggaagtcaagtatggatggggctcagaatcaggatgacgggtatctagccctaagctcccggacaaaccttcagtaccggagtttgccgaggcccagtaagtccaacagccggaacggggctgggaacaggtctagcaccagcagcatagattccaacattagcagcaagtccgcaggcctgccagtgcccaaactgagggagccttccaaaacagccctaggcagctctctaccaggtctggtcaaccaaacagacaaggagaaaggcatctcatcagacaacgagagtgtggcttcctgtaactcggtgaaagtgaatccggcagcccagcctgtgtccagtccggctcagaccagtctccagcctggagccaagtacccagatgtggcctctcccacactccgcagactctttggtgggaagcctaccaagcaagtgcccatcgccacagctgaaaacatgaaaaattcggtggtcatctccaatcctcatgccaccatgactcagcaaggtaacctagactccccgtcaggcagtggcgtcctgagcagtgggagcagcagtcctctctacagcaagaatgtggacctcaaccagtctccgctagcctccagccccagctcagcccactcggccccttccaacagcctcacctggggcaccaacgccagcagctcctccgcagttagcaaggatggcctgggctttcagtctgtcagcagcctccacaccagctgtgagtccatcgacatctccctcagcagtggaggggtccccagccacaattcttccactggcctcatcgcctcctccaaggacgactccttgactccctttgtcagaactaacagtgtgaagaccacactgtcagaaagccctctctcttcccctgctgctagccctaagttctgcagaagtactctgcccaggaaacaggacagtgacccgcaccttgataggaacactttgcctaagaaaggactcaggtatactcccacctcccagcttcgcacgcaagaagatgcaaaagaatggttacggtcccattctgcaggaggccttcaggacaccgctgccaattcccccttttcctctggctccagcgtgacttctccctccggaacaagattcaacttttcccagcttgcgagtcccaccactgtcacccagatgagcttgtccaacccgaccatgctgaggactcacagcctctccaatgctgatgggcagtatgatccatacactgacagccgcttccggaatagctccatgtccctggatgagaagagcagaaccatgagccgttcaggctcattccgggatgggtttgaagaagaatcatgggagaaaagttctgtggacaactttgtcagccgtcttcacagctcacttcatttctctcttcctttgttccatcacgcaaggtatgagttagttcatggatcctcactctccttggtttccagcacatcgtcagtttattctacaccagaagaaaaatgccagtcagagattcgcaagctgcggcgggaactggatgcctcccaggagaaagtttcagctttgaccacccagctgacagcaaatgctcaccttgtggcagcctttgaacagagtcttggtaacatgacaatcaggctccagagtctgaccatgacagctgagcagaaggactcagaactgaatgagttaagaaaaaccattgagctgctaaagaaacagaacgcagctgcccaggctgccattaatggagtaattaacacacctgagctcaactgcaaaggaaacggcactgcccagtctgcagacctccgcatccgcaggcagcactcctcagacagcgtctccagcatcaacagtgccaccagccactccagcgtgggcagcaacatagagagtgactcaaagaagaagaagcggaagaactgggtcaatgagttacgcagctccttcaagcaagctttcgggaagaagaagtccccaaaatctgcgtcctctcattcagatattgaggagatgacggattcttctttgccttcctcaccaaagttaccgcacaatgggtccacaggttccaccccactgctgaggaattctcactccaactctctaatttcagaatgcatggatagtgaagctgagaccgtcatgcagctccgaaatgagttaagagacaaggagatgaagctgacggatatccgcttagaagctctcagttctgcccaccagctggaccagctccgggaggccatgaacaggatgcagagtgaaatagagaagctgaaagctgagaatgatcggctgaagtcagagtctcaaggcagtggctgcagccgggctccttcccaagtgtccatctctgcctccccgaggcagtccatgggcctctcccagcacagcttgaacctcactgagtcaaccagcctggacatgttgctggatgacactggtgaatgctcggctcggaaggaaggaggcaggcatgttaagatagttgtcagctttcaggaggaaatgaagtggaaggaggattccagaccacatctctttcttattggctgcattggagttagtggcaagacgaagtgggatgtgctcgatggggtggttagacggctgttcaaagaatacatcattcatgtcgacccagtgagtcagctagggctgaattcagacagcgttcttggctacagcattggagaaatcaagcgcagcaacacttccgaaacaccggagctgcttccttgtggctatctggttggagagaacacgaccatctcagtgactgtgaaagggctcgcagaaaacagcctggactcactggtgtttgagtccttgattcccaagcccatcctgcagcgctacgtctccctcctgatagagcaccgtcggatcattctctctggccccagcggcactgggaaaacctacctggccaaccggctgtctgagtatatagtgcttcgagagggacgggagttgacagacggggttatcgccacctttaacgtggaccataagtccagcaaggaattgcgccagtacctgtccaaccttgctgaccagtgcaacagtgagaacaatgctgtggacatgcccctcgtcatcatcctggacaacctacaccacgtgagctctctgggcgagatcttcaatgggctgctcaactgcaagtaccacaaatgcccttacataattggcacaatgaaccaggctacctcttcgactcccaacctgcagcttcaccataacttcagatgggtgctttgtgccaaccacacggagcctgtgaagggtttccttggccgattcctgaggaggaagctcatggaaacagagatcagtgggcgggtgcgcaatatggagctggtaaaaatcattgactggattcccaaggtctggcatcacctcaaccgcttcctggaggctcacagttcctcggacgtcaccatcggcccccggctcttcctgtcatgccccatcgatgtggacggctcgagagtgtggttcaccgacttgtggaactattccattatcccctatctcctggaagccgtcagagaaggactccagctctatggaaggcgcgccccctgggaggatcctgccaagtgggtgatggacacatatccatgggcagccagcccacaacagcacgagtggcctcccctgctgcagttacggcctgaggatgtcggcttcgacggctactccatgcctcgggagggatcgacaagcaagcagatgccccccagtgatgctgaaggtgacccgctgatgaacatgctgatgaggctgcaggaggcagccaactactccagcccccagagctatgacagcgactccaacagcaacagccatcacgatgacatcttggactcctctttggagtccactctgtgacaggggcccggagcccagcgccctcctcttctcctcaccgcattccacctgcatcccccacatcaccctgaagatgacttcctgagccagcccccagccacagccttagagctgcgggaacaccgagaccccccgtccttcagcctcgacctgggtgcaggcatcccgggccagctgcctgcggaccgcttccttccacagcgagaactgcactaccttctgttgtactttaattattgttttgccttgttgctgtgacctccctaagacactgaagatacttctcgggaaaggatcatcgccgttgaaatgaaaagagagacagagagaaaaaaaaaaagagaacccacatgaagctctgaaaccaaacagcatcctgccatgagcttcccagagacagaagagactggagcaaagtcggaaacacagagaagcacggcttcccctcagcacagaccctccagactgggtctcagagccgtgccacccaccctcccacacagccggccacagggagaactggtgctaaccagggtgcttgctttggtcacgttcaacgcactacagagctacgacacagggaaaccttaggagcaaataaaccgtgctttcatgttttttaaatggtgctttccttacccgagaggtattttgcctgttccaatcaaaccaccccattcaggtccatcagcctctgattaatatccgtgagagtgagtgacggagtgagagtgtgagcgagtggatgtggctgtcagtgcagaacagcatgtgtctctttccttctgatatatgaatgaatcaggtttttttttttttttttctgcaaacactgtgtatagtgagacttgttctactttggagaacaggttaccttttgaaaatgaggttgagtttcttcctttctgatgcattgatttttgaagatttttttttcccccttcccctcttggtcagaatcaatcctttggtgaaagtaagaaccgcaggagttgagttttggtttggtcctgctcagttttggtttttagttgtccatcctcacagtcctacacactcgcctcctcctgctagggctgggggtatctgtgtcctttaaaatggatgaggacctggtcctcgacatgtgggtgagccatggaccttgccttcccttctcgtccttgagggtttagaacacacaccaacacctccagcgtccccgccccagcttccggtggggtgatgcggtcaccctgcaaaagacttgcactttcctcagaaccaacatgacgcagctcaataagggtgagggtcactccctcccagaagccccgtctggacgagccttgcctgacctcttcggtgctgaccttcccaaagtgatgccttactggttttgtactaactgtgttcattttacataagtgtcgtgcctgcctggggtttgttttttttgtcattgttttccccattgaaacaaacagggctaaaaagtcatctgttcattaggagaactcaagttgctgtgacttttctcatccaaaagactcatttgtgtggatgcgtgaccatgggaaaaagaaaaaaaaaaagatccattttttaggttcttttcggtctccagctgacaacccaactggacaatgatctgtctggtgcaggagaaggcaaaagtttctacaagtctacatgaccttgctgatacttgttctaatagaaacccagtctgctgtgtcttcaacatactggtattttcattacaaagtatggtaaatttttgagttgtttgtttctgttttgtaaagagaatccttattggacaccagtgaaggtgtctctgttttaatgatcagggtttttattccatcttttgcatttcttctatttctgaaggtttgtctcttggcatctttttttagtttcttaccataagagtttgacccgaaactgctcacttcacattggatgacaccatgttcttcctctttgaaaagaaaaggggaatgtgtcccactagtgaaaggaaaacttttcaacactatccctgctttagtctcagcaaactcagactattctgcttagccttcattagtcatctgggtgtgagtgtgtcttgttctgtttttctttttaataaaacttttaaaccatatatttagcctgtgaccaggggggccaaaccctaagatttctggtaaacctgaagggtggccctcctcagacaatttatctcccagcaatgaccctactacactcgcgtactgtgaatttgggaggaggtaaagttgacttctcctcgtgggcagttttccaatcaccttgtgagtagacacctgccaatattgtttgaaacctttttttaatatgacatcctctcttgtcattctcttctcccctttcccacagacttccctcctgggtccaggttcagaaccaagacttctgtacctagtgctgcctgattggtgaacattgacttcaagtagcatagcccttgtgtgactcacaactccgtgtccttcctaaagtttcgggaagcagggttgtctaatatgcacatttcttattttggtcatatttttactttagtgtcactcaccttttacaaagtgactttgtactcatttagggctctatcggaaatgcttccattttgccttttctacagttaggccaattttgaaatatataaattctatgcaacatttatgttgagttaccaatggaagccaaaagttctcttcccaaactgccaagaatgatacaggccataattgaaatgggaataccttttaagtttcattaggggtggggtgggagtgggacaggaacaagacttgcctagatctttgttgtatcttggggacttttactttgttgtttgatgcttaaacttcaaaattctctgtattcaaatttgattgtggcgaatctacttcaaaaaggaaaaataatccaactttgtggatattaaatggaaggtttgctgttttgatctagttgtttccagtggagcagttttatgaaatatgttctataagatgtacattttttcattgtaacatagaaattgtaaataattgattaaagtgctgcattttgatgaattttttctagccatttttaaagagaaaactaggaattgagtattttgtgtacggtatgtttccatcctccctccccttcctcctcccctcctctctctctcttcctacctatttaattttcatttgtcatgaggtttttggatttgccaatgatctgctggacatcatgccccatgtcatagagaataaagctgatgattgtaccagtcttaaattattcatgattcaataaaattgatgcttatttattcagaaaaa

SEQ ID NO: 11496 - DNA, 10967 bp, Homo sapiens
aggaggaaatttgcaagaggcggcagcccctgagcgcccagagctcttgaaaggccacccaggagaggtgtgagacccggcggcagcatccgtccaggtgggacccgctgagcgccgtggccagtcccccattcccatcccggcaccccaaaggcgcgctcgcccgattgcttcgagttccccgacctggggattttttttttagccgctggtggtgggcgcctcgtgggctaaggcccggcgcctgctctgctacccgcgctgcctttagcggtcgcccccgccgccgctgccagggacgtgctgggaaagcccaagccccgggagaagatgccggccatcctggtcgcctccaaaatgaagtcgggactgcccaaacccgtgcacagcgccgcgcccatcctgcacgtgcccccggcccgggcgggcccccagccctgctacctgaagttgggaagcaaggtggaggtgagcaagaccacctatcctagccagatccccctgaaatcgcaggtgctgcaggggctgcaggagccagcgggggaggggctcccgctgcggaagagcggctcggtggaaaacgggttcgatacccagatctacacagactgggccaatcattacctagccaaatccggccacaagcgtctcatcagggatctccagcaagatgtgacagatggcgtcctcctggcccagattatccaggttgtggcaaatgaaaagattgaagacatcaatggctgtccgaagaacagatcccaaatgattgaaaacatagatgcctgcttgaatttcctggcagctaagggaataaacatccaggggctgtctgcagaagagatcaggaatggaaacctcaaggccattctaggcctcttcttcagcctctcccgatacaagcagcagcagcagcagccccagaagcagcacctctcctcacctctgccgcccgccgtatcccaggtggccggggccccctcccagtgccaggctggcacccctcagcagcaggtgccagtcactccccaagccccgtgccagcctcaccagccagcgccacatcagcagtcaaaagcacaagctgaaatgcagtccagacttccaggtcctaccgcgagggtatccgctgcaggcagcgaggccaaaacacgcggagggtcaactactgctaacaaccgacgcagccagagctttaacaactatgataaatccaaaccagtcacctccccacccccaccgccaagcagccacgagaaagagcctttggcaagttcagcctcctcccaccccggaatgagtgacaatgcacctgcttccttggagagcggcagcagctccacccctactaattgcagtacctcctcggccatcccgcagcccggtgcagccaccaagccttggcgcagcaaatccctcagcgtgaagcacagtgccacggtatccatgctctcggtcaagcctcctgggcctgaggcccccaggcccacacctgaagccatgaagccggcccccaacaatcagaagtccatgctggaaaagctgaaacttttcaacagtaaagggggctcaaaggcaggtgaggggccggggtcccgggacacaagctgtgagcggctggagactctgcccagcttcgaagagagcgaggagctggaggccgccagtcgcatgctcaccaccgtgggccctgcttccagcagccccaagattgcactcaagggcattgcccagaggacttttagccgggcactgaccaacaagaagagttctctgaaaggcaatgagaaagagaaggagaaacaacagcgggagaaggataaggagaaaagcaaggaccttgccaagagagcctctgtgacggagaggctggacctcaaggaggagccaaaagaagaccccagtggagcagctgtgcccgagatgccaaaaaagtcctccaagattgccagcttcatccccaaaggggggaagctcaacagtgccaagaaggagcccatggccccttcccacagtggaataccaaaaccaggaatgaagagcatgcccgggaaatccccaagtgccccagcgccttccaaggaaggggagcggagccggagtgggaagctgagctcaggactcccccagcagaagccccagctggacggcagacactccagttcctcttccagcctggcgtcctcagaaggaaaaggcccaggagggaccaccctgaaccacagcatcagcagccagactgtcagtgggtctgtcgggaccacccagaccacaggaagcaataccgtcagtgttcagctacctcagccccagcagcaatacaaccatcccaacactgccacggttgcacctttcctgtacaggtctcagacggacactgaagggaatgttactgccgagtcaagctcaacaggtgtgagcgtggagcccagccacttcaccaagactggacagcctgctctggaagaactcactggggaagatcctgaggctcggcggctgcggacagtgaagaacatcgctgatctgcggcagaatttggaggaaaccatgtccagtttaaggggaactcaggttacacacagcacattggaaaccacgtttgacaccaatgtcaccacggagatgagtggccgtagcatactcagcttgacagggaggcccacacctctgtcctggagactgggccagtccagccctcggctccaagcaggagacgccccctcaatgggcaatgggtatccccctcgagccaacgccagcaggttcatcaacactgagtcaggtcgctatgtgtactccgcccctctgagaaggcagctggcctcccggggcagtagtgtctgccatgtggacgtctcagacaaggcaggagatgagatggacctggaaggcatcagcatggacgcccccggctacatgagcgatggggatgttctgagcaagaacatccggaccgatgacattacaagcggatacatgactgatggtggacttggcctctatacccgtcgcctgaaccggctccctgatgggatggctgtggtacgggagaccctgcaacgaaatacctccctgggcctcggagacgctgacagctgggacgacagcagctccgtcagcagcggcatcagcgacaccatagacaacctcagcactgatgacatcaacaccagctcctccatcagctcttatgccaacacacctgcctcctctcgaaaaaacctggatgtgcagactgatgctgagaagcactcacaggtggagaggaattccctgtggtctggtgatgatgtcaagaaatcagacggaggctcagacagcggcataaaaatggagccaggttccaagtggaggcggaatccttctgatgtgtctgacgagtccgacaaaagcacgtcgggcaagaagaatcctgtcatctcccagacaggctcatggcggcgaggcatgacagctcaggtgggcatcaccatgccaaggacgaagccttcagccccggcaggcgcactgaagaccccaggaactggaaaaacagacgacgcaaaggtgtctgagaaaggaaggctttctcctaaagcctcccaggtgaagcgctccccatcagatgcaggccggagcagtggtgacgaatccaaaaagcccctccccagcagctctaggacacctactgccaatgccaacagctttgggttcaagaagcagagtggttccgccgccggcctggccatgatcacagccagcggggtgactgtcaccagcaggtcagccacactgggcaaaatcccaaagtcatctgcactcgtcagtcggtctgctggtcggaagtcaagtatggatggggctcagaatcaggatgacgggtatctagccctaagctcccggacaaaccttcagtaccggagtttgccgaggcccagtaagtccaacagccggaacggggctgggaacaggtctagcaccagcagcatagattccaacattagcagcaagtccgcaggcctgccagtgcccaaactgagggagccttccaaaacagccctaggcagctctctaccaggtctggtcaaccaaacagacaaggagaaaggcatctcatcagacaacgagagtgtggcttcctgtaactcggtgaaagtgaatccggcagcccagcctgtgtccagtccggctcagaccagtctccagcctggagccaagtacccagatgtggcctctcccacactccgcagactctttggtgggaagcctaccaagcaagtgcccatcgccacagctgaaaacatgaaaaattcggtggtcatctccaatcctcatgccaccatgactcagcaaggtaacctagactccccgtcaggcagtggcgtcctgagcagtgggagcagcagtcctctctacagcaagaatgtggacctcaaccagtctccgctagcctccagccccagctcagcccactcggccccttccaacagcctcacctggggcaccaacgccagcagctcctccgcagttagcaaggatggcctgggctttcagtctgtcagcagcctccacaccagctgtgagtccatcgacatctccctcagcagtggaggggtccccagccacaattcttccactggcctcatcgcctcctccaaggacgactccttgactccctttgtcagaactaacagtgtgaagaccacactgtcagaaagccctctctcttcccctgctgctagccctaagttctgcagaagtactctgcccaggaaacaggacagtgacccgcaccttgataggaacactttgcctaagaaaggactcaggtatactcccacctcccagcttcgcacgcaagaagatgcaaaagaatggttacggtcccattctgcaggaggccttcaggacaccgctgccaattcccccttttcctctggctccagcgtgacttctccctccggaacaagattcaacttttcccagcttgcgagtcccaccactgtcacccagatgagcttgtccaacccgaccatgctgaggactcacagcctctccaatgctgatgggcagtatgatccatacactgacagccgcttccggaatagctccatgtccctggatgagaagagcagaaccatgagccgttcaggctcattccgggatgggtttgaagaagttcatggatcctcactctccttggtttccagcacatcgtcagtttattctacaccagaagaaaaatgccagtcagagattcgcaagctgcggcgggaactggatgcctcccaggagaaagtttcagctttgaccacccagctgacagcaaatgctcaccttgtggcagcctttgaacagagtcttggtaacatgacaatcaggctccagagtctgaccatgacagctgagcagaaggactcagaactgaatgagttaagaaaaaccattgagctgctaaagaaacagaacgcagctgcccaggctgccattaatggagtaattaacacacctgagctcaactgcaaaggaaacggcactgcccagtctgcagacctccgcatccgcaggcagcactcctcagacagcgtctccagcatcaacagtgccaccagccactccagcgtgggcagcaacatagagagtgactcaaagaagaagaagcggaagaactggttacgcagctccttcaagcaagctttcgggaagaagaagtccccaaaatctgcgtcctctcattcagatattgaggagatgacggattcttctttgccttcctcaccaaagttaccgcacaatgggtccacaggttccaccccactgctgaggaattctcactccaactctctaatttcagaatgcatggatagtgaagctgagaccgtcatgcagctccgaaatgagttaagagacaaggagatgaagctgacggatatccgcttagaagctctcagttctgcccaccagctggaccagctccgggaggccatgaacaggatgcagagtgaaatagagaagctgaaagctgagaatgatcggctgaagtcagagtctcaaggcagtggctgcagccgggctccttcccaagtgtccatctctgcctccccgaggcagtccatgggcctctcccagcacagcttgaacctcactgagtcaaccagcctggacatgttgctggatgacactggtgaatgctcggctcggaaggaaggaggcaggcatgttaagatagttgtcagctttcaggaggaaatgaagtggaaggaggattccagaccacatctctttcttattggctgcattggagttagtggcaagacgaagtgggatgtgctcgatggggtggttagacggctgttcaaagaatacatcattcatgtcgacccagtgagtcagctagggctgaattcagacagcgttcttggctacagcattggagaaatcaagcgcagcaacacttccgaaacaccggagctgcttccttgtggctatctggttggagagaacacgaccatctcagtgactgtgaaagggctcgcagaaaacagcctggactcactggtgtttgagtccttgattcccaagcccatcctgcagcgctacgtctccctcctgatagagcaccgtcggatcattctctctggccccagcggcactgggaaaacctacctggccaaccggctgtctgagtatatagtgcttcgagagggacgggagttgacagacggggttatcgccacctttaacgtggaccataagtccagcaaggaattgcgccagtacctgtccaaccttgctgaccagtgcaacagtgagaacaatgctgtggacatgcccctcgtcatcatcctggacaacctacaccacgtgagctctctgggcgagatcttcaatgggctgctcaactgcaagtaccacaaatgcccttacataattggcacaatgaaccaggctacctcttcgactcccaacctgcagcttcaccataacttcagatgggtgctttgtgccaaccacacggagcctgtgaagggtttccttggccgattcctgaggaggaagctcatggaaacagagatcagtgggcgggtgcgcaatatggagctggtaaaaatcattgactggattcccaaggtctggcatcacctcaaccgcttcctggaggctcacagttcctcggacgtcaccatcggcccccggctcttcctgtcatgccccatcgatgtggacggctcgagagtgtggttcaccgacttgtggaactattccattatcccctatctcctggaagccgtcagagaaggactccagctctatggaaggcgcgccccctgggaggatcctgccaagtgggtgatggacacatatccatgggcagccagcccacaacagcacgagtggcctcccctgctgcagttacggcctgaggatgtcggcttcgacggctactccatgcctcgggagggatcgacaagcaagcagatgccccccagtgatgctgaaggtgacccgctgatgaacatgctgatgaggctgcaggaggcagccaactactccagcccccagagctatgacagcgactccaacagcaacagccatcacgatgacatcttggactcctctttggagtccactctgtgacaggggcccggagcccagcgccctcctcttctcctcaccgcattccacctgcatcccccacatcaccctgaagatgacttcctgagccagcccccagccacagccttagagctgcgggaacaccgagaccccccgtccttcagcctcgacctgggtgcaggcatcccgggccagctgcctgcggaccgcttccttccacagcgagaactgcactaccttctgttgtactttaattattgttttgccttgttgctgtgacctccctaagacactgaagatacttctcgggaaaggatcatcgccgttgaaatgaaaagagagacagagagaaaaaaaaaaagagaacccacatgaagctctgaaaccaaacagcatcctgccatgagcttcccagagacagaagagactggagcaaagtcggaaacacagagaagcacggcttcccctcagcacagaccctccagactgggtctcagagccgtgccacccaccctcccacacagccggccacagggagaactggtgctaaccagggtgcttgctttggtcacgttcaacgcactacagagctacgacacagggaaaccttaggagcaaataaaccgtgctttcatgttttttaaatggtgctttccttacccgagaggtattttgcctgttccaatcaaaccaccccattcaggtccatcagcctctgattaatatccgtgagagtgagtgacggagtgagagtgtgagcgagtggatgtggctgtcagtgcagaacagcatgtgtctctttccttctgatatatgaatgaatcaggtttttttttttttttttctgcaaacactgtgtatagtgagacttgttctactttggagaacaggttaccttttgaaaatgaggttgagtttcttcctttctgatgcattgatttttgaagatttttttttcccccttcccctcttggtcagaatcaatcctttggtgaaagtaagaaccgcaggagttgagttttggtttggtcctgctcagttttggtttttagttgtccatcctcacagtcctacacactcgcctcctcctgctagggctgggggtatctgtgtcctttaaaatggatgaggacctggtcctcgacatgtgggtgagccatggaccttgccttcccttctcgtccttgagggtttagaacacacaccaacacctccagcgtccccgccccagcttccggtggggtgatgcggtcaccctgcaaaagacttgcactttcctcagaaccaacatgacgcagctcaataagggtgagggtcactccctcccagaagccccgtctggacgagccttgcctgacctcttcggtgctgaccttcccaaagtgatgccttactggttttgtactaactgtgttcattttacataagtgtcgtgcctgcctggggtttgttttttttgtcattgttttccccattgaaacaaacagggctaaaaagtcatctgttcattaggagaactcaagttgctgtgacttttctcatccaaaagactcatttgtgtggatgcgtgaccatgggaaaaagaaaaaaaaaaagatccattttttaggttcttttcggtctccagctgacaacccaactggacaatgatctgtctggtgcaggagaaggcaaaagtttctacaagtctacatgaccttgctgatacttgttctaatagaaacccagtctgctgtgtcttcaacatactggtattttcattacaaagtatggtaaatttttgagttgtttgtttctgttttgtaaagagaatccttattggacaccagtgaaggtgtctctgttttaatgatcagggtttttattccatcttttgcatttcttctatttctgaaggtttgtctcttggcatctttttttagtttcttaccataagagtttgacccgaaactgctcacttcacattggatgacaccatgttcttcctctttgaaaagaaaaggggaatgtgtcccactagtgaaaggaaaacttttcaacactatccctgctttagtctcagcaaactcagactattctgcttagccttcattagtcatctgggtgtgagtgtgtcttgttctgtttttctttttaataaaacttttaaaccatatatttagcctgtgaccaggggggccaaaccctaagatttctggtaaacctgaagggtggccctcctcagacaatttatctcccagcaatgaccctactacactcgcgtactgtgaatttgggaggaggtaaagttgacttctcctcgtgggcagttttccaatcaccttgtgagtagacacctgccaatattgtttgaaacctttttttaatatgacatcctctcttgtcattctcttctcccctttcccacagacttccctcctgggtccaggttcagaaccaagacttctgtacctagtgctgcctgattggtgaacattgacttcaagtagcatagcccttgtgtgactcacaactccgtgtccttcctaaagtttcgggaagcagggttgtctaatatgcacatttcttattttggtcatatttttactttagtgtcactcaccttttacaaagtgactttgtactcatttagggctctatcggaaatgcttccattttgccttttctacagttaggccaattttgaaatatataaattctatgcaacatttatgttgagttaccaatggaagccaaaagttctcttcccaaactgccaagaatgatacaggccataattgaaatgggaataccttttaagtttcattaggggtggggtgggagtgggacaggaacaagacttgcctagatctttgttgtatcttggggacttttactttgttgtttgatgcttaaacttcaaaattctctgtattcaaatttgattgtggcgaatctacttcaaaaaggaaaaataatccaactttgtggatattaaatggaaggtttgctgttttgatctagttgtttccagtggagcagttttatgaaatatgttctataagatgtacattttttcattgtaacatagaaattgtaaataattgattaaagtgctgcattttgatgaattttttctagccatttttaaagagaaaactaggaattgagtattttgtgtacggtatgtttccatcctccctccccttcctcctcccctcctctctctctcttcctacctatttaattttcatttgtcatgaggtttttggatttgccaatgatctgctggacatcatgccccatgtcatagagaataaagctgatgattgtaccagtcttaaattattcatgattcaataaaattgatgcttatttattcagaaaaa

SEQ ID NO: 11497 - DNA, 2960 bp, Homo sapiens
gaattcgaggatccgggtaccatggcgcgtgaacgcagctcggctgccgctggcaggaaacaattctgcaaaaataatcatactcagcctggcaattgtctgcccctaggtctgtcgctcagccgccgtccacactcgctgcaggggggggggcacagaatttaccgcggcaagaacatccctcccagccagcagattacaatgctgcaaactaaggatctcatctggactttgtttttcctgggaactgcagtttctctgcaggtggatattgttcccagccagggggagatcagcgttggagagtccaaattcttcttatgccaagtggcaggagatgccaaagataaagacatctcctggttctcccccaatggagaaaagctcaccccaaaccagcagcggatctcagtggtgtggaatgatgattcctcctccaccctcaccatctataacgccaacatcgacgacgccggcatttacaagtgtgtggttacaggcgaggatggcagtgagtcagaggccaccgtcaacgtgaagatctttcagaagctcatgttcaagaatgcgccaaccccacaggagttccgggagggggaagatgccgtgattgtgtgtgatgtggtcagctccctcccaccaaccatcatctggaaacacaaaggccgagatgtcatcctgaaaaaagatgtccgattcatagtcctgtccaacaactacctgcagatccggggcatcaagaaaacagatgagggcacttatcgctgtgagggcagaatcctggcacggggggagatcaacttcaaggacattcaggtcattgtgaatgtgccacctaccatccaggccaggcagaatattgtgaatgccaccgccaacctcggccagtccgtcaccctggtgtgcgatgccgaaggcttcccagagcccaccatgagctggacaaaggatggggaacagatagagcaagaggaagacgatgagaagtacatcttcagcgacgatagttcccagctgaccatcaaaaaggtggataagaacgacgaggctgagtacatctgcattgctgagaacaaggctggcgagcaggatgcgaccatccacctcaaagtctttgcaaaacccaaaatcacatatgtagagaaccagactgccatggaattagaggagcaggtcactcttacctgtgaagcctccggagaccccattccctccatcacctggaggacttctacccggaacatcagcagcgaagaaaagactctggatgggcacatggtggtgcgtagccatgcccgtgtgtcgtcgctgaccctgaagagcatccagtacactgatgccggagagtacatctgcaccgccagcaacaccatcggccaggactcccagtccatgtaccttgaagtgcaatatgccccaaagctacagggccctgtggctgtgtacacttgggaggggaaccaggtgaacatcacctgcgaggtatttgcctatcccagtgccacgatctcatggtttcgggatggccagctgctgccaagctccaattacagcaatatcaagatctacaacaccccctctgccagctatctggaggtgaccccagactctgagaatgattttgggaactacaactgtactgcagtgaaccgcattgggcaggagtccttggaattcatccttgttcaagcagacaccccctcttcaccatccatcgaccaggtggagccatactccagcacagcccaggtgcagtttgatgaaccagaggccacaggtggggtgcccatcctcaaatacaaagctgagtggagagcagttggtgaagaagtatggcattccaagtggtatgatgccaaggaagccagcatggagggcatcgtcaccatcgtgggcctgaagcccgaaacaacgtacgccgtaaggctggcggcgctcaatggcaaagggctgggtgagatcagcgcggcctccgagttcaagacgcagccagtccaaggggaacccagtgcacctaagctcgaagggcagatgggagaggatggaaactctattaaagtgaacctgatcaagcaggatgacggcggctcccccatcagacactatctggtcaggtaccgagcgctctcctccgagtggaaaccagagatcaggctcccgtctggcagtgaccacgtcatgctgaagtccctggactggaatgctgagtatgaggtctacgtggtggctgagaaccagcaaggaaaatccaaggcggctcattttgtgttcaggacctcggcccagcccacagccatcccagccaacggcagccccacctcaggcctgagcaccggggccatcgtgggcatcctcatcgtcatcttcgtcctgctcctggtggttgtggacatcacctgctacttcctgaacaagtgtggcctgttcatgtgcattgcggtcaacctgtgtggaaaagccgggcccggggccaagggcaaggacatggaggagggcaaggccgccttctcgaaagatgagtccaaggagcccatcgtggaggttcgaacggaggaggagaggaccccaaaccatgatggagggaaacacacagagcccaacgagaccacgccactgacggagcccgagaagggccccgtagaagcaaagccagagtgccaggagacagaaacgaagccagcgccagccgaagtcaagacggtccccaatgacgccacacagacaaaggagaacgagagcaaagcatgatgggtgaagagaaccgagcaaagatcaaaataaaaagtgacacagcagcttcaccagagcatttccaacaccacagacacacacacgcacacacacacacaattctaggctagtttctggtcttatcattgagttacagcttagtgatgattttaagacaaaacaaacaaacaaaaaaaaaaaaaaaccatggtacccggatcctcgaattc

SEQ ID NO: 11498 - DNA, 1623 bp, Homo sapiens
aacagggcattcaccgcctggggcgcctgagtcatcaggacactgccaggagacacagaaccctagatgccctgcagaatccttcctgttacggtccccctccctgaaacatccttcattgcaatatttccaggaaaggaagggggctggctcggaggaagagaggtggggaggtgatcagggttcacagaggagggaactgaatgacatcccaggattacataaactgtcagaggcagccgaagagttcacaagtgtgaagcctggaagccggcgggtgccgctgtgtaggaaagaagctaaagcacttccagagcctgtccggagctcagaggttcggaagacttatcgaccatggagcgcgcgtcctgcttgttgctgctgctgctgccgctggtgcacgtctctgcgaccacgccagaaccttgtgagctggacgatgaagatttccgctgcgtctgcaacttctccgaacctcagcccgactggtccgaagccttccagtgtgtgtctgcagtagaggtggagatccatgccggcggtctcaacctagagccgtttctaaagcgcgtcgatgcggacgccgacccgcggcagtatgctgacacggtcaaggctctccgcgtgcggcggctcacagtgggagccgcacaggttcctgctcagctactggtaggcgccctgcgtgtgctagcgtactcccgcctcaaggaactgacgctcgaggacctaaagataaccggcaccatgcctccgctgcctctggaagccacaggacttgcactttccagcttgcgcctacgcaacgtgtcgtgggcgacagggcgttcttggctcgccgagctgcagcagtggctcaagccaggcctcaaggtactgagcattgcccaagcacactcgcctgccttttcctgcgaacaggttcgcgccttcccggcccttaccagcctagacctgtctgacaatcctggactgggcgaacgcggactgatggcggctctctgtccccacaagttcccggccatccagaatctagcgctgcgcaacacaggaatggagacgcccacaggcgtgtgcgccgcactggcggcggcaggtgtgcagccccacagcctagacctcagccacaactcgctgcgcgccaccgtaaaccctagcgctccgagatgcatgtggtccagcgccctgaactccctcaatctgtcgttcgctgggctggaacaggtgcctaaaggactgccagccaagctcagagtgctcgatctcagctgcaacagactgaacagggcgccgcagcctgacgagctgcccgaggtggataacctgacactggacgggaatcccttcctggtccctggaactgccctcccccacgagggctcaatgaactccggcgtggtcccagcctgtgcacgttcgaccctgtcggtgggggtgtcgggaaccctggtgctgctccaaggggcccggggctttgcctaagatccaagacagaataatgaatggactcaaactgccttggcttcaggggagtcccgtcaggacgttgaggacttttcgaccaattcaaccctttgccccacctttattaaaatcttaaacaacgaaaaaaaaaaaaaaaaa

SEQ ID NO: 11499 - DNA, 2315 bp, Homo sapiens
cctgaacttgcggcgcgaaaaaggcgcgcatgcgtcctacgggagcgtgctggctcaccgaccgcattgcggcttggttttctcacccagtgcatgtggcaggagcggtgagatcactgcctcacggcgatcctggactgacggtcacgactgcctaccctctaaccctgttctgagctgccccttgcccacacaccccaaacctgtgtgcaggatccgcctccatggagctacagcctcctgaagcctcgatcgccgtcgtgtcgattccgcgccagttgcctggctcacattcggaggctggtgtccagggtctcagcgcgggggacgactcagagttggggtctcactgtgttgcccagactggtctcgaactcttggcctcaggtgatcctcttccctcagcttcccagaatgccgagatgatagagacggggtctgactgtgttacccaggctggtcttcaactcttggcctcaagtgatcctcctgccttagcttccaagaatgctgaggttacaggcaccatgagccaggacaccgaggtggatatgaaggaggtggagctgaatgagttagagcccgagaagcagccgatgaacgcggcgtctggggcggccatgtccctggcgggagccgagaagaatggtctggtgaagatcaaggtggcggaagacgaggcggaggcggcagccgcggctaagttcacgggcctgtccaaggaggagctgctgaaggtggcaggcagccccggctgggtacgcacccgctgggcactgctgctgctcttctggctcggctggctcggcatgcttgctggtgccgtggtcataatcgtgcgagcgccgcgttgtcgcgagctaccggcgcagaagtggtggcacacgggcgccctctaccgcatcggcgaccttcaggccttccagggccacggcgcgggcaacctggcgggtctgaaggggcgtctcgattacctgagctctctgaaggtgaagggccttgtgctgggtccaattcacaagaaccagaaggatgatgtcgctcagactgacttgctgcagatcgaccccaattttggctccaaggaagattttgacagtctcttgcaatcggctaaaaaaaagagcatccgtgtcattctggaccttactcccaactaccggggtgagaactcgtggttctccactcaggttgacactgtggccaccaaggtgaaggatgctctggagttttggctgcaagctggcgtggatgggttccaggttcgggacatagagaatctgaaggatgcatcctcattcttggctgagtggcaaaatatcaccaagggcttcagtgaagacaggctcttgattgcggggactaactcctccgaccttcagcagatcctgagcctactcgaatccaacaaagacttgctgttgactagctcatacctgtctgattctggttctactggggagcatacaaaatccctagtcacacagtatttgaatgccactggcaatcgctggtgcagctggagtttgtctcaggcaaggctcctgacttccttcttgccggctcaacttctccgactctaccagctgatgctcttcaccctgccagggacccctgttttcagctacggggatgagattggcctggatgcagctgcccttcctggacagcctatggaggctccagtcatgctgtgggatgagtccagcttccctgacatcccaggggctgtaagtgccaacatgactgtgaagggccagagtgaagaccctggctccctcctttccttgttccggcggctgagtgaccagcggagtaaggagcgctccctactgcatggggacttccacgcgttctccgctgggcctggactcttctcctatatccgccactgggaccagaatgagcgttttctggtagtgcttaactttggggatgtgggcctctcggctggactgcaggcctccgacctgcctgccagcgccagcctgccagccaaggctgacctcctgctcagcacccagccaggccgtgaggagggctcccctcttgagctggaacgcctgaaactggagcctcacgaagggctgctgctccgcttcccctacgcggcctgacttcagcctgacatggacccactacccttctcctttccttcccaggccctttggcttctgatttttctcttttttaaaaacaaacaaacaaactgttgcagattatgagtgaacccccaaatagggtgttttctgccttcaaataaaagtcacccctgcatggtgaagtcttccctctgcttctctcaaaaaaaaaaa

SEQ ID NO: 11500 - DNA, 16382 bp, Homo sapiens
ctgcagccatgggtgccctatggagctggtggatactctgggctggagcaaccctcctgtggggattgacccaggaggcttcagtggacctcaagaacactggcagagaggaattcctcacagccttcctgcagaactatcagctggcctacagcaaggcctacccccgcctccttatctccagtctgtcagagagccccgcttcagtctccatcctcagccaggcagacaacacctcaaagaaggtcacagtgaggcccggggagtcggtcatggtcaacatcagtgccaaggctgagatgataggcagcaagatcttccagcatgcggtggtgatccattctgactatgccatctctgtgcaggcactaaatgccaagcctgacacagcggagctgacactgctgcggcccatccaggccctaggcaccgagtattttgtgctcacaccccccggcacctcagccaggaatgtcaaggagtttgccgtggtggccggtgccgcaggtgcctcggtcagtgtcacgctgaaggggtcagtgacattcaatggcaagttctatccagcaggcgatgtcctaagagtgactctacagccctacaatgtggcccagctacagagctcagtggatctctcggggtcaaaggtcacagctagtagccccgtggctgtcctctctggccacagctgtgcgcagaaacatacgacctgcaaccatgtggttgagcagctgctacccacgtctgcctggggcacccactatgtagtacccacgctggcctcccaatctcgctatgatttggccttcgttgtggccagccaggccacaaagctgacctacaaccatgggggtatcactggctcccgtgggctccaggcaggtgatgtggtagagtttgaggtccggccatcctggccactctacctgtctgcaaatgtgggcatccaggtcctgttgtttggcacaggtgccataaggaatgaagtgacttatgacccctacctggtcctgatcccagatgtggcggcctactgcccagcctatgtggtcaagagtgtaccaggctgtgagggcgtggccctggtagtggcacagacgaaggctatcagcgggctgaccatagatgggcatgcagtgggggccaagctcacctgggaggctgtgccaggcagtgagttctcgtatgctgaagtggagctcggcacagctgacatgatccacacggccgaggccaccaccaacttgggactgctcaccttcgggctggccaaggctataggctacgcaacagctgctgattgcggccggactgtactgtccccagtggagccctcctgcgaaggcatgcagtgcgcagccgggcagcgctgccaggtggtaggcgggaaggccgggtgtgtggcggagtccaccgctgtctgccgcgcccagggcgacccccattacaccaccttcgacggccgtcgctacgacatgatgggcacctgttcgtacacgatggtggagctgtgcagcgaggacgacaccctgcccgccttcagcgtggaggccaagaacgagcaccggggcagccgccgcgtctcctacgtgggcctcgtcactgtgcgcgcctacagccactctgtgtcgctgacccgcggtgaagttggcttcgtcctggttgacaaccagcgctcgcgcctgccagtctccctgagtgagggtcgcctgcgtgtgtaccagagcggaccacgggccgtggtggagctggtctttgggctggtggtcacttatgactgggactgccagctggcactcagcctgcctgcacgcttccaagaccaggtgtgcgggctgtgtggcaactataatggtgacccagcagacgacttcctcacgcctgacggggctctggctcctgacgctgtggagttcgcaagtagctggaagctggatgatggggactacctgtgtgaggatggctgccagaacaactgtcccgcctgcaccccaggccaggcccaacactatgagggcgaccgactctgtggcatgctgaccaagctcgatggccccttcgctgtctgccatgacaccctggaccccaggcccttcctggagcagtgtgtatatgacctgtgtgtggtcggtggggagcggctcagcctgtgccgtggcctcagcgcctatgcccaggcctgtctggagcttggcatctcggttggggactggagatcaccagccaactgccccctgtcctgccctgccaacagccgctatgagctctgcggccctgcttgcccgacctcctgcaacggggctgcggcgccgtccaactgctccgggcgcccctgcgtggagggctgcgtgtgcctcccaggcttcgtggccagcggcggcgcctgcgtgccggcctcgtcgtgtggctgcaccttccagggtctccagctcgctccgggccaggaagtgtgggcggacgagttgtgccaaaggcgctgcacctgcaacggcgccacccatcaggtcacctgccgcgacaagcagagctgcccggcgggtgagcgctgcagcgtccagaacggcctcctgggctgctaccccgatcgcttcgggacctgccaggggtccggggacccacactatgtgagcttcgacggccggcgcttcgacttcatgggcacctgcacgtacctgctggtcggctcatgcggccagaacgcagcgctgcctgccttccgggtgctggtggaaaacgagcatcggggcagccagactgtgagctacacgcgcgccgtgcgggtggaggcccgcggggtgaaggtggccgtgcgccgggagtaccccgggcaagtgctggtggatgacgtccttcagtatctgcccttccaagcagcagatgggcaggtgcaggtgttccgacagggcagggatgccgtcgtgcgcacggactttggcctgactgtcacttatgactggaatgcacgagtgactgccaaggtgcccagcagctatgctgaggccctgtgtggactctgtgggaacttcaacggggacccagctgatgacctggctctgcggggtgggggtcaagctgccaatgcactggcctttgggaacagctggcaagaagagacgaggcccggctgtggagcaactgaaccgggtgactgtcccaagctggactccctggtggcccagcagctgcagagcaagaatgagtgtggaatccttgccgaccccaaggggcccttccgggagtgccatagcaagctggacccccagggtgccgtgcgcgactgtgtctatgaccgctgcctgctgccaggccagtctgggccactgtgtgacgcactggccacctatgctgctgcatgccaggctgctggagccacagtgcacccctggaggagtgaagaactttgcccactgagctgcccaccccacagccactatgaggcgtgttcctacggctgcccgctgtcctgtggagacctcccagtgcccgggggctgtggctcagaatgccatgagggctgcgtgtgcgatgagggctttgcgctcagtggtgagtcctgcctgcccctggcctcctgtggctgcgtacaccagggcacctaccacccaccaggccagaccttctaccctggccccggatgtgattccctttgccactgccaggagggcggcctggtgtcctgtgagtcctccagctgcggaccgcacgaggcctgccagccatccggtggcagcttgggctgtgtggccgtgggctctagcacctgccaggcgtcaggagacccccactacaccaccttcgatggccgccgcttcgacttcatgggcacctgcgtgtatgtgctggctcagacctgcggcacccggcctggcctgcatcggtttgccgtcctgcaggagaacgtggcctggggtaatgggcgagtcagtgtgaccagggtgatcacggtccaggtggcaaacttcaccctgcggctggagcagagacagtggaaggtcacggtgaacggtgtggacatgaagctgcccgtggtgctggccaacggccagatccgtgcctcccagcatggttcagatgttgtgattgagaccgacttcggcctgcgtgtggcctacgaccttgtgtactatgtgcgggtcaccgtccccggaaactactaccagcagatgtgtggcctgtgtgggaactacaacggcgaccccaaggatgacttccagaagcccaatggctcacaggcaggcaacgccaatgagttcggcaactcctgggaggaggtggtgcccgactctccctgcctgccgcccaccccttgcccgccggggagcgaggactgtatccccagccacaagtgtcctcccgagctggagaagaagtatcagaaggaggagttctgtgggctcctctccagccccacagggccactgtcctcctgccacaagctggtggatccccagggtcccttgaaagattgcatctttgatctctgcctgggtggtgggaacctgagcattctctgcagcaacatccatgcctacgtgagtgcttgccaggcggctggaggccacgtggagccctggaggactgaaactttctgtcccatggagtgccctccgaacagtcactacgagctctgtgcggacacctgctccctgggctgctcagctctcagtgcccctccacagtgccaggatgggtgtgctgagggctgccagtgtgactccggcttcctctacaatggccaagcctgcgtgcccatccagcaatgcggctgctaccacaatggtgtctactatgagccggagcagacagtcctcattgacaactgtcggcagcagtgcacgtgccatgcgggtaaaggcatggtgtgccaggaacacagctgcaagccggggcaggtgtgccagccctccggaggcatcctgagctgcgtcaccaaagacccgtgccacggcgtgacatgccggccacaggagacatgcaaggagcagggtggccagggcgtgtgcctgcccaactatgaggccacgtgctggctgtggggcgacccacactaccactccttcgatggccggaagtttgacttccagggcacctgtaactatgtgctggcaacaactggctgcccgggggtcagcacccagggcctgacacccttcaccgtcaccaccaagaaccagaaccggggcaaccctgctgtgtcctacgtgagagtcgtcaccgtggctgccctcggcaccaacatctccatccacaaggacgagatcggcaaagtccgggtgaacggtgtgctcacagccttgcctgtctctgtggccgacgggcggatttcagtgacccagggtgcatcgaaggcactgctggtggctgactttggactgcaagtcagctatgactggaactggcgggtagacgtgacgctgcccagcagctatcatggcgcagtgtgcgggctctgcggtaacatggaccgcaaccccaacaatgaccaggtcttccctaatggcacactggctccctccatacccatctggggcggcagctggcgagccccaggctgggacccactgtgttgggacgaatgtcgggggtcctgcccaacgtgccctgaggaccggttggagcagtacgagggccctggcttctgcggacccctggcccccggcacagggggccctttcaccacctgccatgctcatgtgccacctgagagcttcttcaagggctgtgttctggacgtctgcatgggtggtggggaccgtgacattctttgcaaggctctggcttcctatgtggccgcctgccaggctgctggggttgtcatcgaagactggcgggcacaggttggctgtgagatcacctgcccagaaaacagccactatgaggtctgtggcccaccctgcccggccagctgtccgtcccctgcaccccttacgacgccagccgtatgtgagggcccctgtgtggagggctgccagtgcgacgcgggtttcgtgttaagtgctgaccgctgtgttcccctcaacaacggctgcggctgctgggccaatggcacctaccacgaggcgggcagtgagttttgggctgatggcacctgctcccagtggtgtcgctgcgggcctgggggtggctcgctggtctgcacacctgccagctgtgggctgggtgaagtgtgtggcctcctgccatccggccagcacggctgccagcccgtcagcacagctgagtgccaggcgtggggtgacccccattacgtcactctggatgggcaccgattcaatttccaaggcacctgcgagtacctgctgagtgcaccctgccacggaccacccttgggggctgagaacttcactgtcactgtagccaatgagcaccggggcagccaggctgtcagctacacccgcagtgtcaccctgcaaatctacaaccacagcctgacactgagtgcccgctggccccggaagctacaggtggacggcgtgttcgtcactctgcccttccagctggactcgctcctgcacgcacacctgagcggcgccgacgtggtggtgaccacaacctcagggctctcgctggctttcgacggggacagcttcgtgcgcctgcgcgtgccggcggcgtacgcgggctctctctgtggcttatgcgggaactacaaccaggaccccgcagacgacctgaaggcggtgggcgggaagcccgccggatggcaggtgggcggcgcccagggctgcggggaatgtgtgtccaagccatgcccgtcgccgtgcaccccagagcagcaagagtccttcggcggcccggacgcctgcggcgtgatctccgccaccgacggcccgctggcgccctgccacggccttgtgccgcccgcgcagtacttccagggctgcttgctggacgcctgccaagttcagggccatcctggaggcctctgtcctgcagtggccacctacgtggcagcctgtcaggccgctggggcccagctccgcgagtggaggcggccggacttctgtcccttccagtgccctgcccacagccactacgagctctgcggtgactcctgtcctgggagctgcccgagcctgtcggcacccgagggctgtgagtcggcctgccgtgaaggctgtgtctgcgatgctggcttcgtgctcagtggtgacacgtgtgtacctgtgggccagtgtggctgcctccacgatgaccgctactacccactgggccagaccttctaccctggccctgggtgtgattccctttgccgctgccgggagggcggtgaggtgtcctgtgagccctccagctgcggcccgcatgagacctgccggccatccggtggcagcttgggctgcgtggccgtgggctctaccacctgccaggcgtcgggagatccccactacaccaccttcgatggccgccgcttcgacttcatgggcacctgcgtgtatgtgctggctcagacctgcggcacccggcctggcctacatcggtttgccgtcctgcaggagaacgtggcctggggtaatgggcgagtcagtgtgaccagggtgatcacggtccaggtggcaaacttcaccctgcggctggagcagagacagtggaaggtcacggtgaacggtgtggacatgaagctgcccgtggtgctggccaacggccagatccgtgcctcccagcatggttcagatgttgtgattgagaccgacttcggcctgcgtgtggcctacgaccttgtgtactatgtgcgggtcaccgtccctggaaactactaccagctgatgtgtggcctgtgtgggaactacaacggcgaccccaaggatgacttccagaagcccaatggctcgcaggcaggcaacgccaatgagttcggcaactcctgggaggaggtggtgcccgactctccctgcctgccgccgcccacctgcccgccggggagcgagggctgtatccccagcgaggagtgtcctcccgagctggagaagaagtatcagaaggaggagttctgtgggctcctctccagccccacagggccactgtcctcctgccacaagctggtggatccccagggtcccttgaaagattgcatctttgatctctgcctgggtggtgggaacctgagcattctctgcagcaacatccatgcctacgtgagtgcttgccaggcggctggaggccacgtggagccctggaggaatgaaactttctgtcccatggaatgccctcagaacagtcactacgagctctgtgcggacacctgctccctgggctgctcggctctcagtgcccctctgcagtgcccagatgggtgtgctgagggctgccagtgtgactccggcttcctctacaacggccaagcctgcgtgcccatccagcaatgtggctgctaccacaatggtgcctactatgagccggagcagacagtcctcattgacaactgtcggcagcagtgcacgtgccatgcgggtaaagtcgtggtgtgccaggaacacagctgcaagccggggcaggtgtgccagccctccggaggcatcctgagctgcgtcaccaaagacccgtgccacggcgtgacatgccggccacaggagacatgcaaggagcagggtggccagggtgtgtgcctgcccaactatgaggccacgtgctggctgtggggcgacccacactaccactccttcgatggccggaagtttgacttccagggcacctgtaactatgtgctggcaacaactggctgcccgggggtcagcacccagggcctgacacccttcaccgtcaccaccaagaaccagaaccggggcaaccctgctgtatcctacgtgagagtcgtcaccgtggctgccctcggcaccaacatctccatccacaaggacgagatcggcaaagtccgggtgaacggtgtgctcacagccttgcctgtctccgtggccgacgggcggatttcagtggcccagggtgcatcgaaggcactgctggtggctgactttggactgcaagtcagctatgactggaactggcgggtagacgtgacgctccccagcagctatcatggcgcagtgtgcgggctctgcggtaacatggaccgcaaccccaacaatgaccaggtcttccctaatggcacactggctccctccatacccatctggggcggcagctggcgagccccaggctgggacccactgtgttgggacgaatgtcgggggtcctgcccaacgtgccctgaggaccggttggagcagtacgagggccctggcttctgcggacccctggcccccggcacagggggccctttcaccacctgccatgctcatgtgccacctgagagcttcttcaagggctgtgttctggacgtctgcatgggtggtggggaccatgacattctttgcaaggctctggcttcctacgtggccgcctgccaggccgctggggttgtcatcgaagactggcgggcacaggttggctgtgagatcacctgcccagaaaacagccactatgaggtctgtggcccaccctgcccggccagctgtccgtcccctgcaccccttacgacgccagccgtatgtgagggcccctgtgtggagggctgccagtgcgacgcgggtttcgtgttaagtgctgaccgctgtgttcccctcaacaacggctgcggctgctgggccaatggcacctaccacgaggcgggcagtgagttttgggctgatggcacctgctcccagtggtgtcgctgcgggcctgggggtggctcgctggtctgcacacctgccagctgtgggctgggtgaagtgtgtggcctcctgccatccggccagcacggctgccagcccgtcagcacagctgagtgccaggcgtggggtgacccccattacgtcactctggatgggcaccgattcgatttccaaggcacctgcgagtacctgctgagtgcaccctgccacggaccacccttgggggctgagaacttcactgtcactgtagccaatgagcaccggggcagccaggctgtcagctacacccgcagtgtcaccctgcaaatctacaaccacagcctgacactgagtgcccgctggccccggaagctacaggtggacggcgtgttcgtcactctgcccttccagctggactcgctcctgcacgcacacctgagcggcgccgacgtggtggtgaccacaacctcagggctctcgctggctttcgacggggacagcttcgtgcgcctgcgcgtgccggcggcgtacgcgggctctctctgtggcttatgcgggaactacaaccaggaccccgcagacgacctgaaggcggtgggcgggaagcccgccggatggcaggtgggcggcgcccagggctgcggggaatgtgtgtccaagccatgcccgtcgccgtgcaccccagagcagcaagagtccttcggcggcccggacgcctgcggcgtgatctccgccaccgacggcccgctggcgccctgccacggccttgtgccgcccgcgcagtacttccagggctgcttgctggacgcctgccaagttcagggccatcctggaggcctctgtcctgcagtggccacctacgtggcagcctgtcaggccgctggggcccagctccgcgagtggaggcggccggacttctgtcccttccagtgccctgcccacagccactacgagctctgcggtgactcctgtcctgggagctgcccgagcctgtcggcacccgagggctgtgagtcggcctgccgtgaaggctgtgtctgcgatgctggcttcgtgctcagtggtgacacgtgtgtacctgtgggccagtgtggctgcctccacgatgaccgctactacccactgggccagaccttctaccctggccctgggtgtgattccctttgccgctgccgggagggcggtgaggtgtcctgtgagccctccagctgcggcccgcatgagacctgccggccatccggtggcagcttgggctgcgtggccgtgggctctaccacctgccaggcgtcgggagatccccactacaccaccttcgatggccgccgcttcgacttcatgggcacctgcgtgtatgtgctggctcagacctgcggcacccggcctggcctacatcggtttgccgtcctgcaggagaacgtggcctggggtaatgggcgagtcagtgtgaccagggtgatcacggtccaggtggcaaacttcaccctgcggctggagcagagacagtggaaggtcacggtgaacggtgtggacatgaagctgcccgtggtgctggccaacggccagatccgtgcctcccagcatggttcagatgttgtgattgagaccgacttcggcctgcgtgtggcctacgaccttgtgtactatgtgcgggtcaccgtccctggaaactactaccagctgatgtgtggcctgtgtgggaactacaacggcgaccccaaggatgacttccagaagcccaatggctcgcaggcaggcaacgccaatgagttcggcaactcctgggaggaggtggtgcccgactctccctgcctgccgccgcccacctgcccgccggggagcgagggctgtatccccagcgaggagtgtcctcccgagctggagaagaagtatcagaaggaggagttctgtgggctcctctccagccccacagggccactgtcctcctgccacaagctggtggatccccagggtcccttgaaagattgcatctttgatctctgcctgggtggtgggaacctgagcattctctgcagcaacatccatgcctacgtgagtgcttgccaggcggctggaggccacgtggagccctggaggaatgaaactttctgtcccatggaatgccctcagaacagtcactacgagctctgtgcggacacctgctccctgggctgctcggctctcagtgcccctctgcagtgcccagatgggtgtgctgagggctgccagtgtgactccggcttcctctacaacggccaagcctgcgtgcccatccagcaatgtggctgctaccacaatggtgtctactatgagccggagcagacagtcctcattgacaactgtcggcagcagtgcacgtgccatgtgggtaaagtcgtggtgtgccaggaacacagctgcaagccggggcaggtgtgccagccctccggaggcatcctgagctgcgtcaacaaagacccgtgccacggcgtgacatgccggccacaggagacatgcaaggagcagggtggccagggtgtgtgcctgcccaactatgaggccacgtgctggctgtggggcgacccacactaccactccttcgatggccggaagtttgacttccagggcacctgtaactatgtgctggcaacaactggctgcccgggggtcagcacccagggcctgacacccttcaccgtcaccaccaagaaccagaaccggggcaaccctgctgtatcctacgtgagagtcgtcaccgtggctgccctcggcaccaacatctccatccacaaggacgagatcggcaaagtccgggtgaacggtgtgctcacagccttgcctgtctccgtggccgacgggcggatttcagtggcccagggtgcatcgaaggcactgctggtggctgactttggactgcaagtcagctatgactggaactggcgggtagacgtgacgctccccagcagctatcatggcgcagtgtgcgggctctgcggtaacatggaccgcaaccccaacaatgaccaggtcttccctaatggcacactggctccctccatacccatctggggcggcagctggcgagccccaggctgggacccactgtgttgggacgaatgtcgggggtcctgcccaacgtgccctgaggaccggttggagcagtacgaggggcctggcttctgcggacccctggcatctggcacagggggccccttcaccacctgccatgctcatgtgccacctgagagcttcttcaagggctgtgttctggacgtctgcatgggtggtggggaccatgacattctttgcaaggctctggcttcctacgtggccgcctgccaggccgctggggttgtcatcgaagactggcgggcacaggttggctgtgagatcacctgcccagaaaacagccactatgaggtctgtggcccaccctgcccggccagctgtccgtcccctgcaccccttacgacgccagccgtatgtgagggcccctgtgtggagggctgccagtgcgacgcgggtttcgtgttaagtgctgaccgctgtgttcccctcaacaacggctgcggctgctgggccaatggcacctaccacgaggcgggcagtgagttttgggctgatggcacctgctcccagtggtgtcgctgcgggcctgggggtggctcgctggtctgcacacctgccagctgtgggctgggtgaagtgtgtggcctcctgccatccggccagcacagctgccagcccgtcagcacagctgagtgccaggcgtggggtgacccccattacgtcactctggatgggcaccgattcgatttccaaggcacctgcgagtacctgctgagtgcaccctgccacggaccacccttgggggctgagaacttcactgtcactgtagccaatgagcaccggggcagccaggctgtcagctacacccgcagtgtcaccctgcaaatctacaaccacagcctgacactgagtgcccgctggccccggaagctacaggtcgacggcgtgttcgtggctctgcctttccagctggactcgctcctgcacgcacacctgagcggcgccgacgtggtggtgaccacaacctcagggctctcgctggctttcgatggggacagcttcgtgcgcctgcgcgtgccggcggcgtacgcggcctctctctgtggcttatgcgggaactacaaccaggaccccgcagacgacctgaaggctgtgggcgggaagcccgctggatggcaggtgggcggggcccagggctgcggggaatgtgtgtccaagccatgcccgtcgccgtgcaccccagagcagcaggagtccttcggcggcccggacgcctgcggcgtgatctccgccaccgacggcccgctggcaccctgccacggccttgtgccgcccgcgcagtacttccagggctgcttgctggacgcctgccaagttcagggccatcctggaggcctctgtcctgcagtggctacctacgtggcagcctgtcaggccgctggggcccagctcggcgagtggaggcggccggacttctgtcccttgcagtgccctgcccacagccactatgagctctgcggtgactcctgccctgtgagctgcccgagcctctcagcacccgagggctgtgagtcggcctgccgtgaaggctgtgtctgcgatgctggcttcgtactcagtggtgacacctgcgtacccgtgggccagtgtggctgcctccatgatggccgctactacccactgggcgaggtcttctacccgggccctgagtgtgagcgacgctgtgagtgtgggccaggtggccatgtcacctgccaggagggcgcagcctgtgggccccatgaggagtgccggttagaggatggtgtccaggcctgtcatgccacaggctgtggccgctgcctggccaacgggggcatccactacatcacccttgatggccgtgtctacgacctgcatggctcctgctcctatgtcttggcccaagtctgccacccaaagcctggggacgaggacttttccatcgtgcttgagaagaatgcagctggacatctccaacgcctcctggttactgtggctggccaggttgtgagcctagctcaggggcagcaggtcaccgtggacggcgaggctgtggccctgcctgtggctgtgggccgcgtgcgggtgaccgccgagggccgaaacatggttctgcagacgaccaaggggctgcggcttctctttgatggcgatgcccacctcctcatgtccatccccagccccttccgtggacggctctgtggcctctgtgggaacttcaatggcaactggagtgacgactttgtcctgcccaatggctcagcagcgtccagtgtggagaccttcggggctgcatggcgggtgcccggctcctccaagggctgtggcgagggctgcgggccccaaggctgcccagtgtgcttggcagaggagactgcaccctatgagagcaacgaggcctgcgggcagctccggaacccccagggccccttcgcgacctgccaggcggtgctgagtccctctgagtacttccgccaatgcgtatacgacctgtgcgcgcaaaagggtgacaaagccttcctgtgccgcagcctggcagcctacacggcggcctgtcaggcagctggcgtggccgtgaagccctggaggacagacagcttctgcccgctccattgccccgcccacagccactactccatctgcactcgcacctgccagggatcctgtgcggctctctccggcctcacgggctgcaccacccgctgttttgagggctgtgagtgcgacgaccgcttcctgctttcccagggtgtctgcatccctgtccaagattgtggctgcacccataatggccgatacttgccggtaaactcctccctgctgacctcagactgcagcgagcgctgttcctgttcctcaagctctggcctgacatgccaggccgctggctgcccaccaggccgtgtatgtgaggtcaaggctgaagcccggaactgctgggccacccgtggtctctgtgtcctgtctgtgggtgccaacctcaccacctttgatggggcccgtggtgccaccacctctcctggtgtctatgagctctcttcccgctgcccaggactacagaataccatcccctggtaccgtgtagttgccgaagtccagatctgccatggcaaaacggaggctgtgggccaggtccacatcttcttccaggatgggatggtgacgttgactccaaacaagggtgtgtgggtgaatggtctccgagtggatctcccagctgagaagttagcatctgtgtccgtgagtcgtacacctgatggctccctgctagtccgccagaaggcaggggtccaggtgtggcttggagccaatgggaaggtggctgtgattgtcagcaatgaccatgctgggaaactgtgtggggcctgtggaaactttgacggggaccagaccaatgattggcatgactcccaggagaagccagcgatggagaaatggagagcgcaggacttctccccatgttatggctgatcagtcatccaccaggaacgaagatttcctgaagaagacctggtccctctggaggttgcggtggctgaaggatgcatcatgtgctcctaccctgctctaccgcttttctgggtcacagaggccaaatgtgagagcattgaataaatatcttaagct

SEQ ID NO: 11501 - DNA, 1790 bp, Homo sapiens
gtgaatctctggggccaggaagaccctgctgcccggaagagcctcatgttccgtgggggctgggcggacatacatatacgggctccaggctgaacggctcgggccacttacacaccactgcctgataaccatgctggctgccacagtcctgaccctggccctgctgggcaatgcccatgcctgctccaaaggcacctcgcacgaggcaggcatcgtgtgccgcatcaccaagcctgccctcctggtgttgaaccacgagactgccaaggtgatccagaccgccttccagcgagccagctacccagatatcacgggcgagaaggccatgatgctccttggccaagtcaagtatgggttgcacaacatccagatcagccacttgtccatcgccagcagccaggtggagctggtggaagccaagtccattgatgtctccattcagaacgtgtctgtggtcttcaaggggaccctgaagtatggctacaccactgcctggtggctgggtattgatcagtccattgacttcgagatcgactctgccattgacctccagatcaacacacagctgacctgtgactctggtagagtgcggaccgatgcccctgactgctacctgtctttccataagctgctcctgcatctccaaggggagcgagagcctgggtggatcaagcagctgttcacaaatttcatctccttcaccctgaagctggtcctgaagggacagatctgcaaagagatcaacgtcatctctaacatcatggccgattttgtccagacaagggctgccagcatcctttcagatggagacattggggtggacatttccctgacaggtgatcccgtcatcacagcctcctacctggagtcccatcacaagggtcatttcatctacaagaatgtctcagaggacctccccctccccaccttctcgcccacactgctgggggactcccgcatgctgtacttctggttctctgagcgagtcttccactcgctggccaaggtagctttccaggatggccgcctcatgctcagcctgatgggagacgagttcaaggcagtgctggagacctggggcttcaacaccaaccaggaaatcttccaagaggttgtcggcggcttccccagccaggcccaagtcaccgtccactgcctcaagatgcccaagatctcctgccaaaacaagggagtcgtggtcaattcttcagtgatggtgaaattcctctttccacgcccagaccagcaacattctgtagcttacacatttgaagaggatatcgtgactaccgtccaggcctcctattctaagaaaaagctcttcttaagcctcttggatttccagattacaccaaagactgtttccaacttgactgagagcagctccgagtccatccagagcttcctgcagtcaatgatcaccgctgtgggcatccctgaggtcatgtctcggctcgaggtagtgtttacagccctcatgaacagcaaaggcgtgagcctcttcgacatcatcaaccctgagattatcactcgagatggcttcctgctgctgcagatggactttggcttccctgagcacctgctggtggatttcctccagagcttgagctagaagtctccaaggaggtcgggatggggcttgtagcagaaggcaagcaccaggctcacagctggaaccctggtgtctcctccagcgtggtggaagttgggttaggagtacggagatggagattggctcccaactcctccctatcctaaaggcccactggcattaaagtgctgtatccaag

SEQ ID NO: 11502 - DNA, 3494 bp, Homo sapiens
taatttttgcccagtctgcctgttgtggggctcctcccctttggggatataagcccggcctggggctgctccgttctctgcctggcctgaggctccctgagccgcctccccaccatcaccatggccaagggcttctatatttccaagtccctgggcatcctggggatcctcctgggcgtggcagccgtgtgcacaatcatcgcactgtcagtggtgtactcccaggagaagaacaagaacgccaacagctcccccgtggcctccaccaccccgtccgcctcagccaccaccaaccccgcctcggccaccaccttggaccaaagtaaagcgtggaatcgttaccgcctccccaacacgctgaaacccgattcctaccaggtgacgctgagaccgtacctcacccccaatgacaggggcctgtacgtttttaagggctccagcaccgtccgtttcacctgcaaggaggccactgacgtcatcatcatccacagcaagaagctcaactacaccctcagccaggggcacagggtggtcctgcgtggtgtgggaggctcccagccccccgacattgacaagactgagctggtggagcccaccgagtacctggtggtgcacctcaagggctccctggtgaaggacagccagtatgagatggacagcgagttcgagggggagttggcagatgacctggcgggcttctaccgcagcgagtacatggagggcaatgtcagaaaggtggtggccactacacagatgcaggctgcagatgcccggaagtccttcccatgcttcgatgagccggccatgaaggccgagttcaacatcacgcttatccaccccaaggacctgacagccctgtccaacatgcttcccaaaggtcccagcaccccacttccagaagaccccaactggaatgtcactgagttccacaccacgcccaagatgtccacgtacttgctggccttcattgtcagtgagttcgactacgtggagaagcaggcatccaatggtgtcttgatccggatctgggcccggcccagtgccattgcggcgggccacggcgattatgccctgaacgtgacgggccccatccttaacttctttgctggtcattatgacacaccctacccactcccaaaatcagaccagattggcctgccagacttcaacgccggcgccatggagaactggggactggtgacctaccgggagaactccctgctgttcgaccccctgtcctcctccagcagcaacaaggagcgggtggtcactgtgattgctcatgagctggcccaccagtggttcgggaacctggtgaccatagagtggtggaatgacctgtggctgaacgagggcttcgcctcctacgtggagtacctgggtgctgactatgcggagcccacctggaacttgaaagacctcatggtgctgaatgatgtgtaccgcgtgatggcagtggatgcactggcctcctcccacccgctgtccacacccgcctcggagatcaacacgccggcccagatcagtgagctgtttgacgccatctcctacagcaagggcgcctcagtcctcaggatgctctccagcttcctgtccgaggacgtattcaagcagggcctggcgtcctacctccacacctttgcctaccagaacaccatctacctgaacctgtgggaccacctgcaggaggctgtgaacaaccggtccatccaactccccaccaccgtgcgggacatcatgaaccgctggaccctgcagatgggcttcccggtcatcacggtggataccagcacggggaccctttcccaggagcacttcctccttgaccccgattccaatgttacccgcccctcagaattcaactacgtgtggattgtgcccatcacatccatcagagatggcagacagcagcaggactactggctgatagatgtaagagcccagaacgatctcttcagcacatcaggcaatgagtgggtcctgctgaacctcaatgtgacgggctattaccgggtgaactacgacgaagagaactggaggaagattcagactcagctgcagagagaccactcggccatccctgtcatcaatcgggcacagatcattaatgacgccttcaacctggccagtgcccataaggtccctgtcactctggcgctgaacaacaccctcttcctgattgaagagagacagtacatgccctgggaggccgccctgagcagcctgagctacttcaagctcatgtttgaccgctccgaggtctatggccccatgaagaactacctgaagaagcaggtcacacccctcttcattcacttcagaaataataccaacaactggagggagatcccagaaaacctgatggaccagtacagcgaggttaatgccatcagcaccgcctgctccaacggagttccagagtgtgaggagatggtctctggccttttcaagcagtggatggagaaccccaataataacccgatccaccccaacctgcggtccaccgtctactgcaacgctatcgcccagggcggggaggaggagtgggacttcgcctgggagcagttccgaaatgccacactggtcaatgaggctgacaagctccgggcagccctggcctgcagcaaagagttgtggatcctgaacaggtacctgagctacaccctgaacccggacttaatccggaagcaggacgccacctctaccatcatcagcattaccaacaacgtcattgggcaaggtctggtctgggactttgtccagagcaactggaagaagctttttaacgattatggtggtggctcgttctccttctccaacctcatccaggcagtgacacgacgattctccaccgagtatgagctgcagcagctggagcagttcaagaaggacaacgaggaaacaggcttcggctcaggcacccgggccctggagcaagccctggagaagacgaaagccaacatcaagtgggtgaaggagaacaaggaggtggtgctccagtggttcacagaaaacagcaaatagtccccagcccttgaagtcacccggccccgatgcaaggtgcccacatgtgtccatcccagcggctggtgcagggcctccattcctggagcccgaggcaccagtgtcctcccctcaaggacaaagtctccagcccacgttctctctgcctgtgagccagtctagttcctgatgacccaggctgcctgagcacctcccagcccctgcccctcatgccaaccccgccctaggcctggcatggcacctgtcgcccagtgccctggggctgatctcagggaagcccagctccagggccagatgagcagaagctctcgatggacaatgaacggccttgctgggggccgccctgtaccctctttcacctttccctaaagaccctaaatctgaggaatcaacagggcagcagatctgtatatttttttctaagagaaaatgtaaataaaggatttctagatgaaaaaaaaaaaaaaaaa

SEQ ID NO: 11503 - DNA, 845 bp, Homo sapiens
caggtgagcctctcactcgccacctcctcttccacccctgccaggcccagcagccaccacagcgcctgcttcctcggccctgaaatcatgcccctaggtctcctgtggctgggcctagccctgttgggggctctgcatgcccaggcccaggactccacctcagacctgatcccagccccacctctgagcaaggtccctctgcagcagaacttccaggacaaccaattccaggggaagtggtatgtggtaggcctggcagggaatgcaattctcagagaagacaaagacccgcaaaagatgtatgccaccatctatgagctgaaagaagacaagagctacaatgtcacctccgtcctgtttaggaaaaagaagtgtgactactggatcaggacttttgttccaggttgccagcccggcgagttcacgctgggcaacattaagagttaccctggattaacgagttacctcgtccgagtggtgagcaccaactacaaccagcatgctatggtgttcttcaagaaagtttctcaaaacagggagtacttcaagatcaccctctacgggagaaccaaggagctgacttcggaactaaaggagaacttcatccgcttctccaaatctctgggcctccctgaaaaccacatcgtcttccctgtcccaatcgaccagtgtatcgacggctgagtgcacaggtgccgccagctgccgcaccagcccgaacaccattgagggagctgggagaccctccccacagtgccacccatgcagctgctccccaggccaccccgctgatggagccccaccttgtctgctaaataaacatgtgccctcaggccaaaaagaaa

SEQ ID NO: 11504 - DNA, 931 bp, Homo sapiens
tttcgtcggcccgccccttggcttctgcactgatggtgggtggatgagtaatgcatccaggaagcctggaggcctgtggtttccgcacccgctgccacccccgcccctagcgtggacatttatcctctagcgctcaggccctgccgccatcgccgcagatccagcgcccagagagacaccagagaacccaccatggccccctttgagcccctggcttctggcatcctgttgttgctgtggctgatagcccccagcagggcctgcacctgtgtcccaccccacccacagacggccttctgcaattccgacctcgtcatcagggccaagttcgtggggacaccagaagtcaaccagaccaccttataccagcgttatgagatcaagatgaccaagatgtataaagggttccaagccttaggggatgccgctgacatccggttcgtctacacccccgccatggagagtgtctgcggatacttccacaggtcccacaaccgcagcgaggagtttctcattgctggaaaactgcaggatggactcttgcacatcactacctgcagttttgtggctccctggaacagcctgagcttagctcagcgccggggcttcaccaagacctacactgttggctgtgaggaatgcacagtgtttccctgtttatccatcccctgcaaactgcagagtggcactcattgcttgtggacggaccagctcctccaaggctctgaaaagggcttccagtcccgtcaccttgcctgcctgcctcgggagccagggctgtgcacctggcagtccctgcggtcccagatagcctgaatcctgcccggagtggaagctgaagcctgcacagtgtccaccctgttcccactcccatctttcttccggacaatgaaataaagagttaccacccagcagaaaaaaaaaaaaaaaa

SEQ ID NO: 11505 - DNA, 4615 bp, Homo sapiens
ggacacaaccctgagatttatccctcacaatgcggaaagacagacttcttcatttatgtcttgtgctacttcttatcctgctttctgccagtgactcaaactctacagaaccgcagtatatggtgctggtcccctccctgctccacactgaggcccctaagaagggctgtgtccttctgagccacctgaatgagacagtgactgtaagtgcttccttggagtctggcagggaaaacaggagcctcttcactgacctggtggcggagaaggacttattccactgtgtctccttcactctcccaaggatctcagcctcttcagaggtggcattccttagcatccagataaaggggcctacgcaagatttcaggaagaggaacacagttctggtactgaacacccaaagtctggtctttgtccagacagacaaacccatgtataaaccaggacagacagtaagattccgtgttgtctccgtggatgaaaattttcgccctcgaaatgaactgattccactgatataccttgagaacccaagaagaaatcgaattgcacaatggcagagtctcaagctagaagctggcatcaatcagttgtcctttcccctctcatcagagcccattcagggctcctacagggtggtggtacagacagaatcaggtggaaggatacagcaccccttcaccgtggaggaatttgtgcttcccaagtttgaggtcaaagttcaggtgccaaagataatcagtatcatggatgaaaaagtgaacataacagtctgtggagaatacacttatgggaagcctgtcccaggacttgcaactgtgagcctgtgtagaaaattatctcgtgttcttaattgtgacaagcaggaggtctgtgaggaattcagtcaacagcttaacagcaatggctgcatcacccaacaagtacacaccaaaatgctccagattacaaatacgggctttgaaatgaagcttagagtggaagccaggatcagagaagaggggacagacctggaagtcactgcaaacaggatcagtgaaatcacaaacattgtatccaaactcaaattcgtgaaagtggattcacactttagacaaggaatccccttttttgcacaggtgcttctggtggatggaaaaggtgtgcccatccccaataaactcttcttcatctctgtgaatgacgccaattattactccaatgcaaccaccaatgagcagggtcttgcacagttttcaatcaatactaccagtatctcggttaataaactttttgtccgggttttcactgtgcatcccaacttgtgttttcactattcatgggtagcagaagaccaccagggcgctcagcacactgcaaatcgtgttttctccttaagtggaagttacattcacctggagcctgtggctggtaccctgccctgtggccacacggagactatcacggcacactatacactgaatagacaggccatgggagagttatcggagctcagtttccattacctgatcatggctaagggagtcatcgtcagatctggaacccacactctgcctgtggagtcaggagacatgaaaggcagttttgccttatccttccctgtggagtcagacgttgcccccattgcacgaatgttcatctttgccattttaccagatggagaagttgttggagactctgaaaaatttgagattgaaaactgtctagccaacaaggtggatttgagcttcagcccagcacaaagtcccccagcctcacatgcccacctgcaagtagcagctgctccgcagtccctctgtgcccttcgtgctgtggaccaaagtgtgctgctcatgaagcctgaggctgagctctctgtgtcctcagtatataatctgctaactgtgaaggatctcaccaattttcctgacaatgtggaccagcaggaggaagaacaaggacactgtccccgtcctttcttcattcataatggagccatctatgttcccttatcaagtaatgaagcagatatttatagcttcctcaaggggatgggattgaaggtgttcactaactcaaaaatccgaaaaccaaagtcgtgttcagtcatcccttccgtgtctgcaggagcagtaggtcaaggatactatggagcaggtctaggagtagtagagagaccatatgttcctcaattaggcacatataatgtgatacccttaaataatgaacaaagttcagggccagtccctgaaacggtgcgaagctattttcctgagacttggatctgggagttggtggcagtgaactcatcaggtgtggctgaggtaggagtaacagtccctgacaccatcaccgagtggaaggcaggggccttctgcctgtctgaagatgctggacttggtatctcttccactgcctctctccgagccttccagcccttctttgtggagctcacaatgccttactctgtgattcgtggagaggtcttcacactcaaggccacggtcctaaactaccttcccaaatgcatccgggtcagtgtgcagctgaaagcctctccagccttcctagcttcccaaaatacaaagggagaagaatcctattgtatctgtggaagtgagagacaaaccttgtcttggacagtgactcctaaaactctggggaatgtgaacttctcagtgagtgcagaggcaatgcagtccttagaactctgtggaaatgaggttgttgaggtccctgagattaaaagaaaagacacagtcatcaaaaccctgttggtggaggctgaaggtattgagcaagaaaagactttcagttccatgacctgtgcctcaggtgctaatgtgtctgagcagttgtccttgaagctcccatcaaatgtggtcaaagaatctgccagagcttctttctcagttctgggtgacatattaggttctgctatgcaaaatatacaaaatctcctccagatgccatatggctgtggagaacagaacatggtcctatttgctcctaacatctatgtcttgaactatctgaatgaaacccagcagctgacgcaggagatcaaggccaaggccgttggctatctcatcactggttaccagagacagctgaactacaaacaccaagatggctcctacagcacctttggggaacgatatggcaggaaccagggcaacacttggctcacagcttttgtactgaagactttcgcccaggctcgatcctacatcttcattgatgaagcacacattacccaatctctcacgtggctctcccagatgcagaaggacaatggctgtttcaggagctctgggtcactgctcaacaatgccataaagggaggtgtagaagatgaagcgaccctctccgcctatgttactattgcccttctggaaattcctctcccagtcactaaccctattgttcgcaatgccctgttctgcctggagtcagcctggaatgtagcaaaggaggggacccatgggagccatgtctacaccaaggcattgctggcctatgctttttccctactgggaaagcaaaatcagaatagagaaatactgaactcacttgataaggaagctgtgaaagaagacaacctcgtccattgggagcgccctcagagacccaaggcaccagtggggcatctttaccaaacccaggctccctctgctgaggtggagatgacatcctatgtgctcctcgcttatctcacggcccagccagcccccacctcaggggacctgacctctgcaactaacattgtgaagtggatcatgaagcagcagaacgcccaaggtggtttctcctccacccaggacacagtggtggctctccatgccctgtccaggtatggagcagccactttcaccagaactgagaaaactgcacaggtcaccgttcaggattcacagaccttttctacaaatttccaagtagacaacaacaacctcctattactgcagcagatctcattgccagagctccctggagaatatgtcataacagtaactggggaaagatgtgtgtatcttcagacatccatgaaatacaatattcttccagagaaagaggactccccatttgctttaaaagtgcagactgtgccccagacttgcgatggacacaaagcccacaccagctttcagatctcactgaccatcagttacacaggaaaccgtcctgcttccaatatggtgattgttgatgtaaagatggtatctggttttattcccctgaaaccaacagtaaaaatgcttgaaagatctagctctgtgagccggacagaagtgagcaacaaccatgtcctcatttatgtggaacaggtgacaaatcagacgctaagtttttccttcatggttctgcaagacatcccagtaggagacttgaagccagcaattgttaaagtctatgattactatgagacagatgagtctgtggttgctgagtatatcgccccctgcagcacagatacagagcatggaaatgtttgaggaccatacaggctgtatattttggtggattctctgtcctatacatttacttagaaggaatggagttatttgtctctataaaatagacactaaaaatatttgctgaataaatatgtacttctggtcaaactaaaaaa

SEQ ID NO: 11506 - DNA, 3849 bp, Homo sapiens
aaaagcagaatctgtgagtcgcctggaggcagcgcggcggctgccgtgaggaggccgggtgcggagccgccggtggcccagccgctcagggccagggcctgggctgggagggagagaccggagcagcgccaggagcccgaggccggagccgaggaggaatgtgaccaggggtcggcgggggcgcgggagtacgcgagagcagggatggggcagcaggtgggccgcgtcggggaagctccggggctccagcagcctcagccccgcgggatccggggcagcagtgcagccaggccctccggccgcaggcgggacccggcggggcgcaccacagagaccggcttcaatatcttcacccagcatgatcactttgccagctgtgtggaggatggatttgagggagacaagactggaggcagtagtccagaagctttgcatcgtccctatggttgtgatgttgaaccccaggcactaaatgaggctatcaggtggagctccaaggagaacttgctcggagccactgagagtgaccctaatctcttcgttgcactttatgattttgtagcaagtggtgataacacactcagcatcactaaaggtgaaaagctacgagtccttggttacaaccagaatggtgagtggagtgaagttcgctctaagaatgggcagggctgggtgccaagcaactacatcaccccagtgaacagcctggaaaaacactcctggtaccatggacctgtgtcacgcagtgcagctgagtatctgctcagcagtctaatcaatggcagcttcctggtgcgagaaagtgagagtagccctgggcagctgtccatctcgctcaggtacgagggacgtgtgtatcactacaggatcaataccactgcagatggcaaggtgtatgtgactgctgagagccgcttcagcaccttggcagagcttgtacaccatcactccacagtggctgatgggctggtgacaacattacactacccagcacccaagtgtaataagcctacagtctatggtgtgtcccccatccacgacaaatgggaaatggagcgaacagatattaccatgaagcacaaacttgggggcggtcagtatggagaggtttacgttggcgtctggaagaaatacagccttacagttgctgtgaaaacattgaaggaagataccatggaggtagaagaattcctgaaagaagctgcagtaatgaaggaaatcaagcatcctaatctggtacaacttttaggtgtgtgtactttggagccaccattttacattgtgactgaatacatgccatacgggaatttgctggattacctccgagaatgcaaccgagaagaggtgactgcagttgtgctgctctacatggccactcagatttcttctgcaatggagtacttagagaagaagaatttcatccatagagatcttgcagctcgtaactgcctagtgggagaaaaccatgtggtaaaagtggctgactttggcttaagtagattgatgactggagacacttatactgctcatgctggagccaaatttcctattaagtggacagcaccagagagtcttgcctacaataccttctcaattaaatctgacgtctgggcttttggggtattgttgtgggaaattgctacctatggaatgtcaccatatccaggtattgacctgtctcaggtctatgacctactagaaaaaggatatcgaatggaacagcctgagggatgcccccctaaggtttatgaacttatgagagcatgctggaagtggagccctgccgataggccctcttttgctgaaacacaccaagcttttgaaaccatgttccatgactccagcatttctgaagaggtagctgaggagcttgggagagccgcctcctcgtcatctgttgttccatacctgccccggctacctatacttccttccaagactcggacactgaagaaacaggtggagaacaaggagaacattgaaggggcacaagatgccacagaaaattctgcttccagtttagcaccagggttcatcagaggtgcacaggcctctagtggatccccagcactgcctcgaaagcaaagagacaagtcacccagcagcctcttggaagatgccaaagagacatgcttcaccagggataggaaggggggcttcttcagctccttcatgaagaagagaaatgctcctacaccccccaaacgcagcagctccttccgagaaatggagaatcagccccataagaaatacgaactcacgggtaacttctcatctgttgcttctctacagcatgctgatgggttctctttcactcctgcccagcaagaggcgaatctggtgccacccaagtgctatggggggagctttgcacagaggaacctctgtaatgacgacggtggtgggggtgggggcagtggcactgctgggggtgggtggtctggcatcacaggcttctttacaccacgcttaatcaaaaagacactgggcttacgagcaggtaaacccacagccagtgatgacacttccaagccttttccaaggtcaaactctacatcttccatgtcctcagggcttccagagcaggataggatggcaatgacccttcccaggaactgccagaggtccaaactccagctggaaaggacagtgtccacctcttctcagccagaagagaatgtggacagggccaatgacatgcttccaaaaaaatcagaggaaagtgctgctccaagcagggagagaccaaaagccaagttattgcccagaggagccacagctcttcctctcagaacaccctctggggatctagccattacagagaaggaccctccaggggtgggagtggctggagtggcagctgcccccaagggtaaagagaagaatggtggggcacgacttgggatggctggagttccagaggatggagagcagccgggctggccttctccagccaaggctgcccccgtcctcccaaccactcacaaccacaaagtgccagtccttatctcacccactctgaaacacactccagctgacgtgcagctcattggcacagactctcaggggaataaattcaagctcttatctgagcatcaggtcacatcctctggagacaaggaccgaccccgacgggtaaaaccaaagtgtgccccacccccaccaccagtgatgagactactgcagcatccgtccatctgctcagaccctacagaagagccaactgccctaactgcaggacagtccacatcagaaacacaggaaggaggaaagaaggcagctctgggcgcagtgcccatcagtgggaaagctgggaggccagtgatgcctccacctcaagtgcctctgcccacatcttccatctcgccagccaaaatggccaatggcacagcaggtactaaagtggctctgagaaaaaccaaacaggccgctgagaaaatctcagcagacaaaatcagcaaagaggccctgctggaatgtgctgacctactgtccagtgcactcacggaacctgtgcccaacagccagctggtagacactggacaccagctgcttgactactgctcaggctatgtggactgcatccctcaaactcgcaacaaatttgccttccgagaggctgtgagcaaactggaactcagcctgcaggagctacaggtttcttcagcagctgctggtgtgcccgggacaaaccctgtccttaataacttattgtcatgtgtacaggaaatcagtgatgtggtgcagaggtagccactgttagcctggtgggaaaatgcacacatttctgaggggagagggaaaaggacttgttttcctgtgttcttgttttcagaaaatgaaagactc

SEQ ID NO: 11507 - DNA, 3543 bp, Homo sapiens
agaggtatggtccttgggacagttctccttccacctaatacttatggcagagatcaggacacttcactttgctgcctgtgcactgaggcctcagaatctgctctacccgacttaacagaagctttgcatcgtccctatggttgtgatgttgaaccccaggcactaaatgaggctatcaggtggagctccaaggagaacttgctcggagccactgagagtgaccctaatctcttcgttgcactttatgattttgtagcaagtggtgataacacactcagcatcactaaaggtgaaaagctacgagtccttggttacaaccagaatggtgagtggagtgaagttcgctctaagaatgggcagggctgggtgccaagcaactacatcaccccagtgaacagcctggaaaaacactcctggtaccatggacctgtgtcacgcagtgcagctgagtatctgctcagcagtctaatcaatggcagcttcctggtgcgagaaagtgagagtagccctgggcagctgtccatctcgctcaggtacgagggacgtgtgtatcactacaggatcaataccactgcagatggcaaggtgtatgtgactgctgagagccgcttcagcaccttggcagagcttgtacaccatcactccacagtggctgatgggctggtgacaacattacactacccagcacccaagtgtaataagcctacagtctatggtgtgtcccccatccacgacaaatgggaaatggagcgaacagatattaccatgaagcacaaacttgggggcggtcagtatggagaggtttacgttggcgtctggaagaaatacagccttacagttgctgtgaaaacattgaaggaagataccatggaggtagaagaattcctgaaagaagctgcagtaatgaaggaaatcaagcatcctaatctggtacaacttttaggtgtgtgtactttggagccaccattttacattgtgactgaatacatgccatacgggaatttgctggattacctccgagaatgcaaccgagaagaggtgactgcagttgtgctgctctacatggccactcagatttcttctgcaatggagtacttagagaagaagaatttcatccatagagatcttgcagctcgtaactgcctagtgggagaaaaccatgtggtaaaagtggctgactttggcttaagtagattgatgactggagacacttatactgctcatgctggagccaaatttcctattaagtggacagcaccagagagtcttgcctacaataccttctcaattaaatctgacgtctgggcttttggggtattgttgtgggaaattgctacctatggaatgtcaccatatccaggtattgacctgtctcaggtctatgacctactagaaaaaggatatcgaatggaacagcctgagggatgcccccctaaggtttatgaacttatgagagcatgctggaagtggagccctgccgataggccctcttttgctgaaacacaccaagcttttgaaaccatgttccatgactccagcatttctgaagaggtagctgaggagcttgggagagccgcctcctcgtcatctgttgttccatacctgccccggctacctatacttccttccaagactcggacactgaagaaacaggtggagaacaaggagaacattgaaggggcacaagatgccacagaaaattctgcttccagtttagcaccagggttcatcagaggtgcacaggcctctagtggatccccagcactgcctcgaaagcaaagagacaagtcacccagcagcctcttggaagatgccaaagagacatgcttcaccagggataggaaggggggcttcttcagctccttcatgaagaagagaaatgctcctacaccccccaaacgcagcagctccttccgagaaatggagaatcagccccataagaaatacgaactcacgggtaacttctcatctgttgcttctctacagcatgctgatgggttctctttcactcctgcccagcaagaggcgaatctggtgccacccaagtgctatggggggagctttgcacagaggaacctctgtaatgacgacggtggtgggggtgggggcagtggcactgctgggggtgggtggtctggcatcacaggcttctttacaccacgcttaatcaaaaagacactgggcttacgagcaggtaaacccacagccagtgatgacacttccaagccttttccaaggtcaaactctacatcttccatgtcctcagggcttccagagcaggataggatggcaatgacccttcccaggaactgccagaggtccaaactccagctggaaaggacagtgtccacctcttctcagccagaagagaatgtggacagggccaatgacatgcttccaaaaaaatcagaggaaagtgctgctccaagcagggagagaccaaaagccaagttattgcccagaggagccacagctcttcctctcagaacaccctctggggatctagccattacagagaaggaccctccaggggtgggagtggctggagtggcagctgcccccaagggtaaagagaagaatggtggggcacgacttgggatggctggagttccagaggatggagagcagccgggctggccttctccagccaaggctgcccccgtcctcccaaccactcacaaccacaaagtgccagtccttatctcacccactctgaaacacactccagctgacgtgcagctcattggcacagactctcaggggaataaattcaagctcttatctgagcatcaggtcacatcctctggagacaaggaccgaccccgacgggtaaaaccaaagtgtgccccacccccaccaccagtgatgagactactgcagcatccgtccatctgctcagaccctacagaagagccaactgccctaactgcaggacagtccacatcagaaacacaggaaggaggaaagaaggcagctctgggcgcagtgcccatcagtgggaaagctgggaggccagtgatgcctccacctcaagtgcctctgcccacatcttccatctcgccagccaaaatggccaatggcacagcaggtactaaagtggctctgagaaaaaccaaacaggccgctgagaaaatctcagcagacaaaatcagcaaagaggccctgctggaatgtgctgacctactgtccagtgcactcacggaacctgtgcccaacagccagctggtagacactggacaccagctgcttgactactgctcaggctatgtggactgcatccctcaaactcgcaacaaatttgccttccgagaggctgtgagcaaactggaactcagcctgcaggagctacaggtttcttcagcagctgctggtgtgcccgggacaaaccctgtccttaataacttattgtcatgtgtacaggaaatcagtgatgtggtgcagaggtagccactgttagcctggtgggaaaatgcacacatttctgaggggagagggaaaaggacttgttttcctgtgttcttgttttcagaaaatgaaagactc

SEQ ID NO: 11508 - DNA, 6274 bp, Homo sapiens
gttcctagaaaatggagctgtcttggcatgtagtctttattgccctgctaagtttttcatgctgggggtcagactgggagtctgatagaaatttcatttccaccgctggtcctctaaccaatgacttgctgcacaacctgagtggtctcctgggagaccagagttctaactttgtagcaggggacaaagacatgtatgtttgtcaccagccactgcccactttcctgccagaatacttcagcagtctccatgccagtcagatcacccattataaggtatttctgtcatgggcacagctcctcccagcaggaagcacccagaatccagacgagaaaacagtgcagtgctaccggcgactcctcaaggccctcaagactgcacggcttcagcccatggtcatcctgcaccaccagaccctccctgccagcaccctccggagaaccgaagcctttgctgacctcttcgccgactatgccacattcgccttccactccttcggggacctagttgggatctggttcaccttcagtgacttggaggaagtgatcaaggagcttccccaccaggaatcaagagcgtcacaactccagaccctcagtgatgcccacagaaaagcctatgagatttaccacgaaagctatgcttttcagggcggaaaactctctgttgtcctgcgagctgaagatatcccggagctcctgctagaaccacccatatctgcgcttgcccaggacacggtcgatttcctctctcttgatttgtcttatgaatgccaaaatgaggcaagtctgcggcagaagctgagtaaattgcagaccattgagccaaaagtgaaagttttcatcttcaacctaaaactcccagactgcccctccaccatgaagaacccagccagtctgctcttcagcctttttgaagccataaataaagaccaagtgctcaccattgggtttgatattaatgagtttctgagttgttcatcaagttccaagaaaagcatgtcttgttctctgactggcagcctggcccttcagcctgaccagcagcaggaccacgagaccacggactcctctcctgcctctgcctatcagagaatctgggaagcatttgccaatcagtccagggcggaaagggatgccttcctgcaggatactttccctgaaggcttcctctggggtgcctccacaggagcctttaacgtggaaggaggctgggccgagggtgggagaggggtgagcatctgggatccacgcaggcccctgaacaccactgagggccaagcgacgctggaggtggccagcgacagttaccacaaggtagcctctgacgtcgccctgctttgcggcctccgggctcaggtgtacaagttctccatctcctggtcccggatcttccccatggggcacgggagcagccccagcctcccaggcgttgcctactacaacaagctgattgacaggctacaggatgcgggcatcgagcccatggccacgctgttccactgggacctgcctcaggccctgcaggatcatggtggatggcagaatgagagcgtggtggatgccttcctggactatgcggccttctgcttctccacatttggggaccgtgtgaagctgtgggtgaccttccatgagccgtgggtgatgagctacgcaggctatggcaccggccagcaccctcccggcatctctgacccaggagtggcctcttttaaggtggctcacttggtcctcaaggctcatgccagaacttggcaccactacaacagccatcatcgcccacagcagcaggggcacgtgggcattgtgctgaactcagactgggcagaacccctgtctccagagaggcctgaggacctgagagcctctgagcgcttcttgcacttcatgctgggctggtttgcacaccccgtctttgtggatggagactacccagccaccctgaggacccagatccaacagatgaacagacagtgctcccatcctgtggctcaactccccgagttcacagaggcagagaagcagctcctgaaaggctctgctgattttctgggtctgtcgcattacacctcccgcctcatcagcaacgccccacaaaacacctgcatccctagctatgataccattggaggcttctcccaacacgtgaaccatgtgtggccccagacctcatcctcttggattcgtgtggtgccctgggggataaggaggctgttgcagtttgtatccctggaatacacaagaggaaaagttccaatataccttgccgggaatggcatgcccataggggaaagtgaaaatctctttgatgattccttaagagtagactacttcaatcaatatatcaatgaggtgctcaaggctatcaaggaagactctgtggatgttcgttcctacattgctcgttccctcattgatggcttcgaaggcccttctggttacagccagcggtttggcctgcaccacgtcaacttcagcgacagcagcaagtcaaggactcccaggaaatctgcctactttttcactagcatcatagaaaagaacggtttcctcaccaagggggcaaaaagactgctaccacctaatacagtaaacctcccctccaaagtcagagccttcacttttccatctgaggtgccctccaaggctaaagtcgtttgggaaaagttctccagccaacccaagttcgaaagagatttgttctaccacgggacgtttcgggatgactttctgtggggcgtgtcctcttccgcttatcagattgaaggcgcgtgggatgccgatggcaaaggccccagcatctgggataactttacccacacaccagggagcaatgtgaaagacaatgccactggagacatcgcctgtgacagctatcaccagctggatgccgatctgaatatgctccgagctttgaaggtgaaggcctaccgcttctctatctcctggtctcggattttcccaactgggagaaacagctctatcaacagtcatggggttgattattacaacaggctgatcaatggcttggtggcaagcaacatctttcccatggtgacattgttccattgggacctgccccaggccctccaggatatcggaggctgggagaatcctgccttgattgacttgtttgacagctacgcagacttttgtttccagacctttggtgatagagtcaagttttggatgacttttaatgagcccatgtacctggcatggctaggttatggctcaggggaatttcccccaggggtgaaggacccaggctgggcaccatataggatagcccacgccgtcatcaaagcccatgccagagtctatcacacgtacgatgagaaatacaggcaggagcagaagggggtcatctcgctgagcctcagtacacactgggcagagcccaagtcaccaggggtccccagagatgtggaagccgctgaccgaatgctgcagttctccctgggctggtttgctcaccccatttttagaaacggagactatcctgacaccatgaagtggaaagtggggaacaggagtgaactgcagcacttagccacctcccgcctgccaagcttcactgaggaagagaagaggttcatcagggcgacggccgacgtcttctgcctcaacacgtactactccagaatcgtgcagcacaaaacacccaggctaaacccaccctcctacgaagacgaccaggagatggctgaggaggaggacccttcgtggccttccacggcaatgaacagagctgcgccctgggggacgcgaaggctgctgaactggatcaaggaagagtatggtgacatccccatttacatcaccgaaaacggagtggggctgaccaatccgaacacggaggatactgataggatattttaccacaaaacctacatcaatgaggctttgaaagcctacaggctcgatggtatagaccttcgagggtatgtcgcctggtctctgatggacaactttgagtggctaaatggctacacggtcaagtttggactgtaccatgttgatttcaacaacacgaacaggcctcgcacagcaagagcctccgccaggtactacacagaggtcattaccaacaacggcatgccactggccagggaggatgagtttctgtacggacggtttcctgagggcttcatctggagtgcagcttctgctgcatatcagattgaaggtgcgtggagagcagatggcaaaggactcagcatttgggacacgttttctcacacaccactgagggttgagaacgatgccattggagacgtggcctgtgacagttatcacaagattgctgaggatctggtcaccctgcagaacctgggcgtgtcccactaccgtttttccatctcctggtctcgcatcctccctgatggaaccaccaggtacatcaatgaagcgggcctgaactactacgtgaggctcatcgatacactgctggccgccagcatccagccccaggtgaccatttaccactgggacctaccacagacgctccaagatgtaggaggctgggagaatgagaccatcgtgcagcggtttaaggagtatgcagatgtgctcttccagaggctgggagacaaggtgaagttttggatcacgctgaatgagccctttgtcattgcttaccagggctatggctacggaacagcagctccaggagtctccaataggcctggcactgccccctacattgttggccacaatctaataaaggctcatgctgaggcctggcatctgtacaacgatgtgtaccgcgccagtcaaggtggcgtgatttccatcaccatcagcagtgactgggctgaacccagagatccctctaaccaggaggatgtggaggcagccaggagatatgttcagttcatgggaggctggtttgcacatcctattttcaagaatggagattacaatgaggtgatgaagacgcggatccgtgacaggagcttggctgcaggcctcaacaagtctcggctgccagaatttacagagagtgagaagaggaggatcaacggcacctatgacttttttgggttcaatcactacaccactgtcctcgcctacaacctcaactatgccactgccatctcttcttttgatgcagacagaggagttgcttccatcgcagatcgctcgtggccagactctggctccttctggctgaagatgacgccttttggcttcaggaggatcctgaactggttaaaggaggaatacaatgaccctccaatttatgtcacagagaatggagtgtcccagcgggaagaaacagacctcaatgacactgcaaggatctactaccttcggacttacatcaatgaggccctcaaagctgtgcaggacaaggtggaccttcgaggatacacagtttggagtgcgatggacaattttgagtgggccacaggcttttcagagagatttggtctgcattttgtgaactacagtgacccttctctgccaaggatccccaaagcatcagcgaagttctacgcctctgtggtccgatgcaatggcttccctgaccccgctacagggcctcacgcttgtctccaccagccagatgctggacccaccatcagccccgtgagacaggaggaggtgcagttcctggggctaatgctcggcaccacagaagcacagacagctttgtacgttctcttttctcttgtgcttcttggagtctgtggcttggcatttctgtcatacaagtactgcaagcgctctaagcaagggaaaacacaacgaagccaacaggaattgagcccggtgtcttcattctgatgagttaccacctcaagttctatgaagcaggcctagtttcttcatctatgtttaccggccaccaaacaccttagggtcttagactctgctgatactggacttctccataaagtcctgctgcaccgttagagatgactttaatcttgaatgatttcgacttgctgagtaaaatggaaatatctccatcttgctccagtatcagagttcatttgggcatttgagaagcaagtagctcttgcggaaacgtgtagatactggtctagtgggtctgtgaaccacttaattgaacttaacagggctgttttaagtttcagagttgttaagggttgttaagggagcaaaaaccgtaaaaatccttcctataagaagaaatcaactccattgcatagactgcaatatcatctcctgcccttctgcaagctctccctagcttcacatcttgtgttttccagaaaataaaaacagcagactgtcctttc

SEQ ID NO: 11509 - DNA, 1868 bp, Homo sapiens
ccgattcctggcttttgcaaggctgtggtcggtggtcatcagtgctcttgacccaggtccagcgagccttttccctggtgttgcagctgttgttgtaccgccgccgtcgccgccgtcgccgcctgctctgcggggtcatggtgtgcttccgcctcttcccggttccgggctcagggctcgttctggtctgcctagtcctgggagctgtgcggtcttatgcattggaacttaatttgacagattcagaaaatgccacttgcctttatgcaaaatggcagatgaatttcacagtacgctatgaaactacaaataaaacttataaaactgtaaccatttcagaccatggcactgtgacatataatggaagcatttgtggggatgatcagaatggtcccaaaatagcagtgcagttcggacctggcttttcctggattgcgaattttaccaaggcagcatctacttattcaattgacagcgtctcattttcctacaacactggtgataacacaacatttcctgatgctgaagataaaggaattcttactgttgatgaacttttggccatcagaattccattgaatgacctttttagatgcaatagtttatcaactttggaaaagaatgatgttgtccaacactactgggatgttcttgtacaagcttttgtccaaaatggcacagtgagcacaaatgagttcctgtgtgataaagacaaaacttcaacagtggcacccaccatacacaccactgtgccatctcctactacaacacctactccaaaggaaaaaccagaagctggaacctattcagttaataatggcaatgatacttgtctgctggctaccatggggctgcagctgaacatcactcaggataaggttgcttcagttattaacatcaaccccaatacaactcactccacaggcagctgccgttctcacactgctctacttagactcaatagcagcaccattaagtatctagactttgtctttgctgtgaaaaatgaaaaccgattttatctgaaggaagtgaacatcagcatgtatttggttaatggctccgttttcagcattgcaaataacaatctcagctactgggatgcccccctgggaagttcttatatgtgcaacaaagagcagactgtttcagtgtctggagcatttcagataaatacctttgatctaagggttcagcctttcaatgtgacacaaggaaagtattctacagctcaagactgcagtgcagatgacgacaacttccttgtgcccatagcggtgggagctgccttggcaggagtacttattctagtgttgctggcttattttattggtctcaagcaccatcatgctggatatgagcaattttagaatctgcaacctgattgattatataaaaatacatgcaaataacaagattttcttacctctcagttgttgaaacactttgcttcttaaaattgatatgttgaaactttaattcttttatcaatcccagcattttgagatcagtctttattaataaaacctgttctctttaatcagcttaaaatccaaagtgtcatatttactggtcctggagacaaacttgttcaaaagaacatcaacgtgcaatgttttaaggtctatcttaagaagccctggccaaattttgatcctaaccttgaagtatgccttgaacttattaacatggccattataagaataaaatatgtagttgtgtcttaatggaattaataaatgtcatttcactactggtgttctgttttcaatgtataaggactatagtgatttaaactcatcaatgtgcctttgcataaagttgattaaataaatattgatgtggtataaatgcccatcagatatgct

SEQ ID NO: 11510 - DNA, 4006 bp, Homo sapiens
ccgattcctggcttttgcaaggctgtggtcggtggtcatcagtgctcttgacccaggtccagcgagccttttccctggtgttgcagctgttgttgtaccgccgccgtcgccgccgtcgccgcctgctctgcggggtcatggtgtgcttccgcctcttcccggttccgggctcagggctcgttctggtctgcctagtcctgggagctgtgcggtcttatgcattggaacttaatttgacagattcagaaaatgccacttgcctttatgcaaaatggcagatgaatttcacagtacgctatgaaactacaaataaaacttataaaactgtaaccatttcagaccatggcactgtgacatataatggaagcatttgtggggatgatcagaatggtcccaaaatagcagtgcagttcggacctggcttttcctggattgcgaattttaccaaggcagcatctacttattcaattgacagcgtctcattttcctacaacactggtgataacacaacatttcctgatgctgaagataaaggaattcttactgttgatgaacttttggccatcagaattccattgaatgacctttttagatgcaatagtttatcaactttggaaaagaatgatgttgtccaacactactgggatgttcttgtacaagcttttgtccaaaatggcacagtgagcacaaatgagttcctgtgtgataaagacaaaacttcaacagtggcacccaccatacacaccactgtgccatctcctactacaacacctactccaaaggaaaaaccagaagctggaacctattcagttaataatggcaatgatacttgtctgctggctaccatggggctgcagctgaacatcactcaggataaggttgcttcagttattaacatcaaccccaatacaactcactccacaggcagctgccgttctcacactgctctacttagactcaatagcagcaccattaagtatctagactttgtctttgctgtgaaaaatgaaaaccgattttatctgaaggaagtgaacatcagcatgtatttggttaatggctccgttttcagcattgcaaataacaatctcagctactgggatgcccccctgggaagttcttatatgtgcaacaaagagcagactgtttcagtgtctggagcatttcagataaatacctttgatctaagggttcagcctttcaatgtgacacaaggaaagtattctacagcccaagagtgttcgctggatgatgacaccattctaatcccaattatagttggtgctggtctttcaggcttgattatcgttatagtgattgcttacgtaattggcagaagaaaaagttatgctggatatcagactctgtaacactaatcaatacgtgatctctgttacaaaagaaaaaagcaagtacaagttccaacatgcaatactggtcaacttaaggtatatttagttgcagtccagctctttagaatgggtggtatgggggatttcaaacttaaacaaaaaactatcaactacaaattagttgcctgactttggtttttccaaccaaggaatttaaaactgttatttttacagcaaaagatgtgcaaaatcactggattataagttctattttactgtcttgaattagtatttcagtgttttcattttagacattcagactaaaaatacaccgtttagaaaaaacaatttttgaaaaagagattttttttccctgcaggtagttgagttgaacaacatgttctaccgtggatttgtacttgctccttttgctctttttgtgtgtgtgtgtgtgtgtgtgtgtgtgtgtgtgatttttgtttgcaggttaacttagctactttggcattgctgcatatttgacctttgagagatataatagtagatttgaacaggggctggtattattatgttcttagcaataaatgcttttctaatgccttttgaatacatttgtatttatgtggctgtaatgacaaaagatacaaaagctttttaaaatttagagtaggtattaatcttattgtttaatcttttttttaaaaaaactggatatttcaatcttttaaattgcaatatataagactattccaactgggcatttcaatccattttttaggtgctttagagataattgcttgccagtgccaattgagggcattagtactttgtgctcataaattggcctctgtatgcagtactaaaattaatgcagatttctctttagccttccaacatttcttgttgatagtgatgtattttattattttctttttcttaagaaatgccagtgtgtcctagaacctagataacgaagtgcacttacacttataaaataacttgcatctaggctgggcgtggcggctcacgcctgtaatcccagcactttgggaggccgaagtgggtggatcacttgaggccaggagtttgagaccagcctggccaacatggtgaaaccccatctctatcagaaatacaaaaaattagctgggcatggtggtgggcgcctgtaatcccagttactcgggaggctgaggcaggagaatcacttgaacccgggaggcagaggttgcggtgagccaagagcgcaccattgcactccagccttgggcgacaaaaacgaaactccatcttcaaaacaaaacaaaacaaaacaaacaaacaaacaaaacttgcatcttaaccaaaagtcttggttttatcttaatccattaaaagttggtcttgtttccagcttgcattgattgctacaacatcactaatttggctttcacatttaaatggttctgtgctaatcaaaactttcgttgttattattcgttatggtagaatcatttttaattcacgtgctttgtgttcagttttgtggtctgagagatgtaccaattgtcaaattaccgtgtaccacctaatgtttataggagaaagcaaaatacatcagcttggtagttaacacatcaaatatttcttgctgcttctaggagaacttttttggtgtgtgttggaatggctgagcaaatattaaaattgttaatatgcagccatatatggaaggttcctgtggggttgttttttcgtgttttttttttttgtggtgggattatgtgcctcccattcactagaaaatgagaaaattgtctgggttccaaaatattgacattgaatggatcaatacacacacacagacatatatatatatatatgcacacatatataggcagttgcatgcctagcatgggtattttataaccatataactgagttatattggaattataaatattttccgtcacttaaatttgttctttgtttagcctgaaaacctttatggctcaagatcagattcctgactaacccctctcttagagctacagcgagctgcattaccagcttaaaacacttcttagggattaaatatagatgtaatttttcaaaatcgtttttaatttaaactgtgttttagtgtaaaattgttaaccttgtaagatggataatgtgtataagaatgtaggccttaactatttcacatgagtcaaaacaaagcagctttaaaaaaataattggaagcacaatgcatggcactgactgaatgctgttaatatttctaaaagtttctacattcagattatatgcctgattcatagtaaaatacctctaataaacactgttttatagaaaacctgacttcagtgaatatttttgtattttacatgggccagtttatatactgctatttacactattatttcctatagctacatgttctttgtaccttttgtagttttatttgtattactagattcataccttgatggtaacgctctatctggttttgggtgtttttcatgttttagcatttgtataaagaaactggtccatgtaaatactttccatgttttttcttcaaatgtttaaaccactagttgatgtatggtatctttagatatttgcctgtctgtttgctcaaaattgcttctaaaacaataaagattctt

SEQ ID NO: 11511 - DNA, 9213 bp, Homo sapiens
gcgcgctcgcagcctcactccgctcacttccccggccccgcgcggcccccgccgcccgctgcccgctgcccgctgccctcgccccgcgcgccgggcatgtgagcgcgggcgggcgccgtcaccatggcctcgccgcgcgcctcgcggtggccgccgccgctcctgctgctgttgctgccgctgctgctgctgccgccggcggcccccgggacgcgggacccgccgccttccccggctcgccgcgcgctgagcctggcgcccctcgcgggagcggggctggagctgcagctggagcgccgcccggagcgcgagccgccgcccacgccgccccgggagcgccgcgggcccgcgacccccggccccagctacagggcccctgagccaggcgccgcgacacagcggggaccctccggccgggcccccagaggcgggagcgcggatgctgcctggaaacattggccagaaagtaacactgaggcccatgtagaaaacatcaccttctatcagaatcaagaggacttttcaacagtgtcctccaaagagggcgtgatggttcagacctctgggaagagccatgctgcttcggatgctccagaaaacctcactctactcgctgaaacagcagatgctagaggaaggagcggctcttcaagtagaacaaacttcaccattttgcctgttgggtactcactggagatagcaacagctctgacttcccagagtggcaacttagcctcagaaagtcttcacctgccatccagcagttcagagttcgatgaaagaattgccgcttttcaaacaaagagtggaacagcctcggagatgggaacagagagggcgatggggctgtcagaagaatggactgtgcacagccaagaggccaccacttcggcttggagcccgtcctttcttcctgctttggagatgggagagctgaccacgccttctaggaagagaaattcctcaggaccagatctctcctggctgcatttctacaggacagcagcttcctctcctctcttagacctttcctcatcttctgaaagtacagagaagcttaacaactccactggcctccagagctcctcagtcagtcaaacaaagacaatgcatgttgccaccgtgttcactgatggtggcccgagaacgctgcgatctttgacggtcagtctgggacctgtgagcaagacagaaggcttccccaaggactccagaattgccacgacttcatcctcagtccttctttcaccctctgcagtggaatcgagaagaaacagtagagtaactgggaatccaggggatgaggaattcattgaaccatccacagaaaatgaatttggacttacgtctttgcgttggcaaaatgattccccaacctttggagaacatcagcttgccagcagctctgaggtgcaaaatggaagtcccatgtctcagactgagactgtgtctaggtcagtcgcacccatgagaggtggagagatcactgcacactggctcttgaccaacagcacaacatctgcagatgtgacaggaagctctgcttcatatcctgaaggtgtgaatgcttcagtgttgacccagttctcagactctactgtacagtctggaggaagtcacacagcattgggagataggagttattcagagtcttcatctacatcttcctcggaaagcttgaattcatcagcaccacgtggagaacgttcgatcgctgggattagctacggtcaagtgcgtggcacagctattgaacaaaggacttccagcgaccacacagaccacacctacctgtcatctactttcaccaaaggagaacgggcgttactgtccattacagataacagttcatcctcagacattgtggagagctcaacttcttatattaaaatctcaaactcttcacattcagagtattcctccttttttcatgctcagactgagagaagtaacatctcatcctatgacggggaatatgctcagccttctactgagtcgccagttctgcatacatccaaccttccgtcctacacacccaccattaatatgccgaacacttcggttgttctggacactgatgctgagtttgttagtgactcctcctcctcctcttcctcctcctcctcttcttcttcttcagggcctcctttgcctctgccctctgtgtcacaatcccaccatttattttcatcaattttaccatcaaccagggcctctgtgcatctactaaagtctacctctgatgcatccacaccatggtcttcctcaccatcacctttaccagtatccttaacgacatctacatctgccccactttctgtctcacaaacaaccttgccacagtcatcttctacccctgtcctgcccagggcaagggagactcctgtgacttcatttcagacatcaacaatgacatcattcatgacaatgctccatagtagtcaaactgcagaccttaagagccagagcaccccacaccaagagaaagtcattacagaatcaaagtcaccaagcctggtgtctctgcccacagagtccaccaaagctgtaacaacaaactctcctttgcctccatccttaacagagtcctccacagagcaaacccttccagccacaagcaccaacttagcacaaatgtctccaactttcacaactaccattctgaagacctctcagcctcttatgaccactcctggcaccctgtcaagcacagcatctctggtcactggccctatagccgtacagactacagctggaaaacagctctcgctgacccatcctgaaatactagttcctcaaatctcaacagaaggtggcatcagcacagaaaggaaccgagtgattgtggatgctaccactggattgatccctttgaccagtgtacccacatcagcaaaagaaatgaccacaaagcttggcgttacagcagagtacagcccagcttcacgttccctcggaacatctccttctccccaaaccacagttgtttccacggctgaagacttggctcccaaatctgccacctttgctgttcagagcagcacacagtcaccaacaacagtgtcctcttcagcctcagtcaacagctgtgctgtgaacccttgtcttcacaatggcgaatgcgtcgcagacaacaccagccgtggctaccactgcaggtgcccgccttcctggcaaggggatgattgcagtgtggatgtgaatgagtgcctgtcgaacccctgcccatccacagccatgtgcaacaatactcagggatcctttatctgcaaatgcccggttgggtaccagttggaaaaagggatatgcaatttggttagaaccttcgtgacagagtttaaattaaagagaacttttcttaatacaactgtggaaaaacattcagacctacaagaagttgaaaatgagatcaccaaaacgttaaatatgtgtttttcagcgttacctagttacatccgatctacagttcacgcctctagggagtccaacgcggtggtgatctcactgcaaacaaccttttccctggcctccaatgtgacgctatttgacctggctgataggatgcagaaatgtgtcaactcctgcaagtcctctgctgaggtctgccagctcttgggatctcagaggcggatctttagagcgggcagcttgtgcaagcggaagagtcccgaatgtgacaaagacacctccatctgcactgacctggacggcgttgccctgtgccagtgcaagtcgggatactttcagttcaacaagatggaccactcctgccgagcatgtgaagatggatataggcttgaaaatgaaacctgcatgagttgcccatttggccttggtggtctcaactgtggaaacccctatcagcttatcactgtggtgatcgcagccgcgggaggtgggctcctgctcatcctaggcatcgcactgattgttacctgttgcagaaagaataaaaatgacataagcaaactcatcttcaaaagtggagatttccaaatgtccccgtatgctgaataccccaaaaatcctcgctcacaagaatggggccgagaagctattgaaatgcatgagaatggaagtaccaaaaacctcctccagatgacggatgtgtactactcgcctacaagtgtaaggaatccagaacttgaacgaaacggactctacccggcctacactggactgccaggatcacggcattcttgcattttccccggacagtataacccgtctttcatcagtgatgaaagcagaagaagagactacttttaagtccaggagagagagggactcattgctctgagccagtcacctgggacctctgctcagaggaccgcaccaggaggctgcgcccaggatttgtcgggagccacgctgagtggcaagcaggaagagggacaggcatgcggggcgtgaccacagtggaggagacaggtggatgtggaaccacaggctgctcattcagcacctttgttgttactgtgaacgtgaatgtgggccagtatcaagagagtctctctgagtgactgcaccatggcactggcaccagggcgactattagccagggcagaccactagacttcagtgcagggacctggttttcccttcgtttgcactttagtaaattgggtgggaggtttccttttggatctgttttgagactgttccagaaagaaggcttcctttcccgagacacttccataggcagcaatttggtgattcatttgcagcaaaatactggcttgttaattattttcctgcccagcgcctgcgtgctaaacaacagatgaggatgagcgtaccactgaagtctgaagatgtcgccattgaacggacagtgttttcatatgtttctaggttgtcttatgctacagtttccaagccagcccccacagtgaggaaatgtgtgaggcaccgcacacaactgcaatgtgttttttaagtcaaggtgacacatgtatttaagattttttttttaaatctctttgcagttaaatctcactttttcaaacaagcctggatcagggcaaaacaacttatatttggttttagctggaggctcagcaggcagattgcaggcaggggggcacttttcatccatgagggcccagcctggggcctgggactcgatcaccattgtggaggccagaggcagctgcgtatggaggagaaatgtcaaactgaacgcaggtttcaccactctaggaaagcagcttgttgagcccctgcagctggatgtggttagagggatgggctgaataggcaggttagatttcctgcatcaacagtgctttgggaagctgtgtggattcctgaggaagaacagggagccgagatggagccacacatgagtttgctcaccggctactgcagcactttgtacccagaatctcatgtccacaaaccccatgtaaactttcaaccactcaaagctgtttattcggctgaagaaataacttttttttctcacccagtcatttgtacctcttcatatggctatgtcgcaccctccagaaacgtggttatacttccagtcagtgtgggagaactgaagacttccggttggtcgaggaactgagggttgaccttcgggaaggaagttccactcatcttatttattatgcctgtgatgtgggtcctgccagggagacatccagtactcggtgtctttaattgccacctggggaactgtgtttattggccttctttggggcatcctggttttggatgaagtgaggggaatacagaggtaaaagaattgtctccaccctgaagcggggagtcccgcttcacatttctggaaatggtgcagccactggggacagttctgccccgggcatggttgtttcttcaaggtcctctaaatataatccctattcttacataatccttggccctgatggttttaagcaagaactcctgtgtcccatggtctccaccactcaccatcaccctgctgtagcaagagtcctagtcaggggaggtgcattttagtagttacattgcacttatccatgagataaataaaaggagaactgtttttatcagtggaggctaacctaaaatttcaaagtgtcgcctttttgaaatcttgggcctctctctctgtagaaccaatggccctttgtggctcacggcctcgcacctaactggagagttctgagctcctgcagctcacctgagcccacagactaggcttcttggctccttccgcagcatgcctgctcacccccagaacccgcagctgtgggaagagccatgtagggaggctattcccaggcatacacttccactgccttcagctgacgtcacagctgacaaatcatctcctctatcggagccagaagacttcagctccacaaaatgaagtgttctgtcctgaaaacattcttgggaagaatcccaacatcgagaaaacggtgtcctgtgagttccaacaatgcttcttgttcatgggtttcttccgtatggagtggattaagagtgttttattttgttgttctaactgagaaaaaaaggaggcacccacaaggttgaggtcacacagtctccacagtttccaggaggcgtttgggggtggggaaggcacctccagagcatgaggctctaaggggacatgagtaaagcatgtctgtgacccagtgaggaagggagaggccagctgcactcctgcacggggttcctagctgcagaagggtcccgcctaggccgaggggaaacacctgatagcagaagaggcctggatgcacacctggcacgccgaggctctccgcccagacacagtgctccatgtcagcccctgcacctggggtgtgtgattcacgtgcacagatgccacaatcctgcaccaatatcccacagatgggggaaggtgagaggaaggggcaagtgatgtgtaactgctcaagagatgcttaaacctccatagagaggagccgggcgcaggggcatctgtgtgtcccgtcacacactgcagcagggaagggtggctggctggctccctggcatcagtggtttggtttaagctccagagggtcttattgccattgtcttttcctctgccccttgagccagcctaaggccctggagtctgtttctttaggcggatgaactgacatgctcctaccatgaccaggctctgggcaaggctcctcacagtatccttgagaggtgggcatggaagtgcccatttctcaggtacagaaaccttcagagaggataaatagcttgccctgtagaagcaggactgaaacccttgtctgcctgactcccccagctactctgcccactgtagccccctgccttactgtcctggcacacccctcaccatcctgtataccttaaatatcaaagagggcaagagagaaagggctttaaagataagttatttttttaaggaaccttaatattatttttaagaagtaaccaaattagtgacgtgaaatgcaaaaaaaaaaaaaaaaaaatgctgactacccttttgaaaatgtgctttcagattgttttttatatgtaattcttagacacttgtcattaagaaaatagtggctggcttgtgctcagcaagaagcacactggcacgtggctttggtataggaagtggaaggcaaggacctgggtttctgacaagtgcagtcagacatacacatccatctgagagctgcttgccttgttcccgtggtaaggccatggctcccacatactggaagcatatttttgtgaactgttttcagaattgggaacatattcagtggaatgtcttaaacgctgacacatcttcctcctttgaggggaagtatattttcagaagcagctaagacatttagagccaaaattgctgataggtggttcagtcaagttggctgatggcatctgaggtcaaaaactaagatgtgacgattgagttcttaaagaggtaactcttaaagtgggcccaagggagaaggcagcatctttggactcctaggctggatggctacccaagaatatgccattgaaggatgacacctattcagatgtgaaagttcccagagcaggcacctttgggtcacccaccacgtgtggctttttggtgcctgcatgaaactgtgttgccccctggtgagatgcccgggtgtcctgtaagccgatttaactctgcctgaggaagaggagctgtccactccagttgcccttggctaagtttagcctaacacacagggttttgacccatagttctaaaatacacaaattttgagactacagcacttctttggaaagaggaagaatgcaaagttcagtatttcaatactttgtattttacttgaaattacccttagtagcatcttttttttcctgtctgaaagcttttgtgtggatgagaagggacatttcatttcctcccttaacaaagtgtcattctgaggttctcatgtgtgtttttggaaatagagatactggttttgtagagtttgcctttgggtatgttttctttttttcttaaatctccaaggaagagaactgactaaaatagtaggaacatgaaagtattaaatgccaattaatttgttgtagtaaagtatcttcattagcgttatactccatcatatctggtgtaaactgctcacagaaaaccctatgaaaccaaagggggaccattcaggtctaaaaagcgacaggtccgagactgggtctgtcacctgggcattttcaaagaggacattttgaagaatttgcatattcagatttttaaaatgcacttaacatacttcattacagatttcttgggtagggaggatgggataggccagggatgggatggagtcagttctgcctgggaaactaatccgaatcatttacctttctgtattaaccttggcctgtcctaaaaagagaacgactgtttcatcatgagttgctctgagttttgttaatgtttgtgttggtggattgacggttaaatgaagcatttagctggaatatgaactttgggagttttcatgttgtcctggatttctctttgtaaacctttaaaccttagcccctggttgattgtgttaaacccattatgagaatgttatttaaagttgtattataattgcaacctccactaattattcagtactgtagcagcaaagtattatttgtaagaatttggttatttttatacttatatccactctaagtctggcgttctagtcagtaaaatgatgcaataaaattaatatcattttcatt

SEQ ID NO: 11512 - DNA, 3239 bp, Homo sapiens
gcgggagcgcagttagagccgatctcccgcgccccgaggttgctcctctccgaggtctcccgcggcccaagttctccgcgccccgaggtctccgcgccccgaggtctccgcggcccgaggtctccgcccgcaccatgcggctgggcagtcctggactgctcttcctgctcttcagcagccttcgagctgatactcaggagaaggaagtcagagcgatggtaggcagcgacgtggagctcagctgcgcttgccctgaaggaagccgttttgatttaaatgatgtttacgtatattggcaaaccagtgagtcgaaaaccgtggtgacctaccacatcccacagaacagctccttggaaaacgtggacagccgctaccggaaccgagccctgatgtcaccggccggcatgctgcggggcgacttctccctgcgcttgttcaacgtcaccccccaggacgagcagaagtttcactgcctggtgttgagccaatccctgggattccaggaggttttgagcgttgaggttacactgcatgtggcagcaaacttcagcgtgcccgtcgtcagcgccccccacagcccctcccaggatgagctcaccttcacgtgtacatccataaacggctaccccaggcccaacgtgtactggatcaataagacggacaacagcctgctggaccaggctctgcagaatgacaccgtcttcttgaacatgcggggcttgtatgacgtggtcagcgtgctgaggatcgcacggacccccagcgtgaacattggctgctgcatagagaacgtgcttctgcagcagaacctgactgtcggcagccagacaggaaatgacatcggagagagagacaagatcacagagaatccagtcagtaccggcgagaaaaacgcggccacgtggagcatcctggctgtcctgtgcctgcttgtggtcgtggcggtggccataggctgggtgtgcagggaccgatgcctccaacacagctatgcaggtgcctgggctgtgagtccggagacagagctcactggccacgtttgaccggagctcaccgcccagagcgtggacagggcttccgtgagacgccaccgtgagaggccaggtggcagcttgagcatggactcccagactgcaggggagcacttggggcagcccccagaaggaccactgctggatcccagggagaacctgctggcgttggctgtgatcctggaatgaggccctttcaaaagcgtcatccacaccaaaggcaaatgtccccaagtgagtgggctccccgctgtcactgccagtcacccacaggaagggactggtgatgggctgtctctacccggagcgtgcgggattcagcaccaggctcttcccagtaccccagacccactgtgggtcttcccgtgggatgcgggatcctgagaccgaagggtgtttggtttaaaaagaagactgggcgtccgctcttccaggacggcctctgtgctgctggggtcacgcgaggctgtttgcaggggacacggtcacaggagctcttctgccctgaacgctcccaacctgcctcccgcccggaagccacaggacccactcatgtgtgtgcccacaagtgtagttagccgtccacaccgaggagcccccggaagtccccactgggcttcagtgtcctctgccacattccctgggaggaacaatgtccctcggctgttccggtgaaaagttgagccacctttggaagacgcacgggtggagtttgccagaagaaaggctgtgccagggccgtgtttggctacaggggctgccggggctcttggctctgcagcgagaaagacacagcccagcagggctggagacgcccatgtccagcaggcgcaggcctggcaacacggtccccagagtcctgagcagcagttaggtgcatggagagggtatcacctggtggccacagtcccccttctcacctcagcaatgatccccaaagtgagaggtggctcccccggcccccaccaccctcagcagccccaccccactcaaccctgagggtccccagggtcctgatgaagacctccgaccccagcgccaggctcctcggagcccaacagtcccaagggggcaggagacggggtggtccagtgctgaggggtacagccctgggccctgaccagccccggcacctgccatgctggttcccggaatgaatcagctgctgactgtctccagaagggctggaaaggatgctgccaggtgacccgaggtgcactcgccccagggagatggagtagacagcctggcctggccctcgggacacattgtctgccccggggctatgggcaaatgcccctccttcttacttcccagaatcccctgacattcccagggtcagccaggacctgttacagccctggtcacttggaactgacagctgtgtgaggcctgcacttctcagacccagacttagaacaaaaggaggagtgaggactcaaggctacaatgaggttccagtacttgttacaagaaattggttttctgcaaaaaaagtccctacctgagcctttaggtgaatgtgggatccactcccgcttttaacatgaaagcattagaagatgtgtggtgtttataaaagaacagttgtcatcaccgggcattgattggcagggacaaggagctgcttgggtgtggaaagttggggcgttggaaagtgggctgtggtgcccatttgcagtgactgtgaagtgactccaggacggacctgcgggggcacccagaggtcctaagccccaggactgagggtcgtgcatcaccactcgggtgtcccgggaggtgccctgggcccggggacctcacaggcaggacggcgacactaatgcagggagagggagtctggccccagcttttcctatcagaggcgattttccttcaccaggggatgggcaggaaagaggcaggggccccagaagcttctgtccctcatgcctgagggcacgggggacacttggaggctgctgtcaccactgtgcgtccaaggccatgctctctgcgggtcagtgcctgagtctcgcctccctgctggtccctgaagccccctcagaagccctgcctgtcacgtcggcatttgtgagacctaccctgtaacgcctgcccctctcagcccaacatcagcttcctctttctcccttgctgtagacaggctggattccagtgttgggacagccatctccagaaacctgacttaagagagtaagatgcaaa

SEQ ID NO: 11513 - DNA, 1837 bp, Homo sapiens
acaaccgtaacagccaccagacaagcttcagtggccggcccttcacatccagacttgcctgagaggacccacctctgagtgtccagtggtcagttgccccaggatggggaccacagccagagcagccttggtcttgacctatttggctgttgcttctgctgcctctgagggaggcttcacggctacaggacagaggcagctgaggccagagcactttcaagaagttggctacgcagctcccccctccccacccctatcccgaagcctccccatggatcaccctgactcctctcagcatggccctccctttgagggacagagtcaagtgcagccccctccctctcaggaggccacccctctccaacaggaaaagctgctacctgcccaactccctgctgaaaaggaagtgggtccccctctccctcaggaagctgtccccctccaaaaagagctgccctctctccagcaccccaatgaacagaaggaaggaacgccagctccatttggggaccagagccatccagaacctgagtcctggaatgcagcccagcactgccaacaggaccggtcccaagggggctggggccaccggctggatggcttcccccctgggcggccttctccagacaatctgaaccaaatctgccttcctaaccgtcagcatgtggtatatggtccctggaacctaccacagtccagctactcccacctcactcgccagggtgagaccctcaatttcctggagattggatattcccgctgctgccactgccgcagccacacaaaccgcctagagtgtgccaaacttgtgtgggaggaagcaatgagccgattctgtgaggccgagttctcggtcaagacccgaccccactggtgctgcacgcggcagggggaggctcggttctcctgcttccaggaggaagctccccagccacactaccagctccgggcctgccccagccatcagcctgatatttcctcgggtcttgagctgcctttccctcctggggtgcccacattggacaatatcaagaacatctgccacctgaggcgcttccgctctgtgccacgcaacctgccagctactgaccccctacaaagggagctgctggcactgatccagctggagagggagttccagcgctgctgccgccaggggaacaatcacacctgtacatggaaggcctgggaggatacccttgacaaatactgtgaccgggagtatgctgtgaagacccaccaccacttgtgttgccgccaccctcccagccctactcgggatgagtgctttgcccgtcgggctccttaccccaactatgaccgggacatcttgaccattgacatcagtcgagtcacccccaacctcatgggccacctctgtggaaaccaaagagttctcaccaagcataaacatattcctgggctgatccacaacatgactgcccgctgctgtgacctgccatttccagaacaggcctgctgtgcagaggaggagaaattaaccttcatcaatgatctgtgtggtccccgacgtaacatctggcgagaccctgccctctgctgttacctgagtcctggggatgaacaggtcaactgcttcaacatcaattatctgaggaacgtggctctagtgtctggagacactgagaacgccaagggccagggggagcagggctcaactggaggaacaaatatcagctccacctctgagcccaaggaagaatgagtcaccccagagccctagagggtcagatggggggaaccccaccctgccccacccatctgaacactcattacactaaacacctcttggatttggaaaaaaaaaaaaaaaaaa

SEQ ID NO: 11514 - DNA, 1462 bp, Homo sapiens
acaaccgtaacagccaccagacaagcttcagtggccggcccttcacatccagacttgcctgagaggacccacctctgagtgtccagtggtcagttgccccaggatggggaccacagccagagcagccttggtcttgacctatttggctgttgcttctgctgcctctgagggaggcttcacggctacaggacagaggcagctgaggccagagcactttcaagaagttggctacgcagctcccccctccccacccctatcccgaagcctccccatggatcaccctgactcctctcagcatggccctccctttgagggacagagtcaagtgcagccccctccctctcaggaggccacccctctccaacaggaaaagctgctacctgcccaactccctgctgaaaaggaagtgggtccccctctccctcaggaagctgtccccctccaaaaagagctgccctctctccagcaccccaatgaacagaaggaaggaacgccagctccatttggggaccagagccatccagaacctgagtcctggaatgcagcccagcactgccaacaggaccggtcccaagggggctggggccaccggctggatggcttcccccctgggcggccttctccagacaatctgaaccaaatctgccttcctaaccgtcagcatgtggtatatggtccctggaacctaccacagtccagctactcccacctcactcgccagggtgagaccctcaatttcctggagattggatattcccgctgctgccactgccgcagccacacaaaccgcctagagtgtgccaaacttgtgtgggaggatacccttgacaaatactgtgaccgggagtatgctgtgaagacccaccaccacttgtgttgccgccaccctcccagccctactcgggatgagtgctttgcccgtcgggctccttaccccaactatgaccgggacatcttgaccattgacatcagtcgagtcacccccaacctcatgggccacctctgtggaaaccaaagagttctcaccaagcataaacatattcctgggctgatccacaacatgactgcccgctgctgtgacctgccatttccagaacaggcctgctgtgcagaggaggagaaattaaccttcatcaatgatctgtgtggtccccgacgtaacatctggcgagaccctgccctctgctgttacctgagtcctggggatgaacaggtcaactgcttcaacatcaattatctgaggaacgtggctctagtgtctggagacactgagaacgccaagggccagggggagcagggctcaactggaggaacaaatatcagctccacctctgagcccaaggaagaatgagtcaccccagagccctagagggtcagatggggggaaccccaccctgccccacccatctgaacactcattacactaaacacctcttggatttggaaaaaaaaaaaaaaaaaa

SEQ ID NO: 11515 - DNA, 13938 bp, Homo sapiens
ctgggattgggacacactttctggacactgctggccagtcccaaaatggaacataaggaagtggttcttctacttcttttatttctgaaatcagcagcacctgagcaaagccatgtggtccaggattgctaccatggtgatggacagagttatcgaggcacgtactccaccactgtcacaggaaggacctgccaagcttggtcatctatgacaccacatcaacataataggaccacagaaaactacccaaatgctggcttgatcatgaactactgcaggaatccagatgctgtggcagctccttattgttatacgagggatcccggtgtcaggtgggagtactgcaacctgacgcaatgctcagacgcagaagggactgccgtcgcgcctccgactgttaccccggttccaagcctagaggctccttccgaacaagcaccgactgagcaaaggcctggggtgcaggagtgctaccatggtaatggacagagttatcgaggcacatactccaccactgtcacaggaagaacctgccaagcttggtcatctatgacaccacactcgcatagtcggaccccagaatactacccaaatgctggcttgatcatgaactactgcaggaatccagatgctgtggcagctccttattgttatacgagggatcccggtgtcaggtgggagtactgcaacctgacgcaatgctcagacgcagaagggactgccgtcgcgcctccgactgttaccccggttccaagcctagaggctccttccgaacaagcaccgactgagcaaaggcctggggtgcaggagtgctaccatggtaatggacagagttatcgaggcacatactccaccactgtcacaggaagaacctgccaagcttggtcatctatgacaccacactcgcatagtcggaccccagaatactacccaaatgctggcttgatcatgaactactgcaggaatccagatgctgtggcagctccttattgttatacgagggatcccggtgtcaggtgggagtactgcaacctgacgcaatgctcagacgcagaagggactgccgtcgcgcctccgactgttaccccggttccaagcctagaggctccttccgaacaagcaccgactgagcaaaggcctggggtgcaggagtgctaccatggtaatggacagagttatcgaggcacatactccaccactgtcacaggaagaacctgccaagcttggtcatctatgacaccacactcgcatagtcggaccccagaatactacccaaatgctggcttgatcatgaactactgcaggaatccagatgctgtggcagctccttattgttatacgagggatcccggtgtcaggtgggagtactgcaacctgacgcaatgctcagacgcagaagggactgccgtcgcgcctccgactgttaccccggttccaagcctagaggctccttccgaacaagcaccgactgagcaaaggcctggggtgcaggagtgctaccatggtaatggacagagttatcgaggcacatactccaccactgtcacaggaagaacctgccaagcttggtcatctatgacaccacactcgcatagtcggaccccagaatactacccaaatgctggcttgatcatgaactactgcaggaatccagatgctgtggcagctccttattgttatacgagggatcccggtgtcaggtgggagtactgcaacctgacgcaatgctcagacgcagaagggactgccgtcgcgcctccgactgttaccccggttccaagcctagaggctccttccgaacaagcaccgactgagcaaaggcctggggtgcaggagtgctaccatggtaatggacagagttatcgaggcacatactccaccactgtcacaggaagaacctgccaagcttggtcatctatgacaccacactcgcatagtcggaccccagaatactacccaaatgctggcttgatcatgaactactgcaggaatccagatgctgtggcagctccttattgttatacgagggatcccggtgtcaggtgggagtactgcaacctgacgcaatgctcagacgcagaagggactgccgtcgcgcctccgactgttaccccggttccaagcctagaggctccttccgaacaagcaccgactgagcaaaggcctggggtgcaggagtgctaccatggtaatggacagagttatcgaggcacatactccaccactgtcacaggaagaacctgccaagcttggtcatctatgacaccacactcgcatagtcggaccccagaatactacccaaatgctggcttgatcatgaactactgcaggaatccagatgctgtggcagctccttattgttatacgagggatcccggtgtcaggtgggagtactgcaacctgacgcaatgctcagacgcagaagggactgccgtcgcgcctccgactgttaccccggttccaagcctagaggctccttccgaacaagcaccgactgagcaaaggcctggggtgcaggagtgctaccatggtaatggacagagttatcgaggcacatactccaccactgtcacaggaagaacctgccaagcttggtcatctatgacaccacactcgcatagtcggaccccagaatactacccaaatgctggcttgatcatgaactactgcaggaatccagatgctgtggcagctccttattgttatacgagggatcccggtgtcaggtgggagtactgcaacctgacgcaatgctcagacgcagaagggactgccgtcgcgcctccgactgttaccccggttccaagcctagaggctccttccgaacaagcaccgactgagcaaaggcctggggtgcaggagtgctaccatggtaatggacagagttatcgaggcacatactccaccactgtcacaggaagaacctgccaagcttggtcatctatgacaccacactcgcatagtcggaccccagaatactacccaaatgctggcttgatcatgaactactgcaggaatccagatgctgtggcagctccttattgttatacgagggatcccggtgtcaggtgggagtactgcaacctgacgcaatgctcagacgcagaagggactgccgtcgcgcctccgactgttaccccggttccaagcctagaggctccttccgaacaagcaccgactgagcaaaggcctggggtgcaggagtgctaccatggtaatggacagagttatcgaggcacatactccaccactgtcacaggaagaacctgccaagcttggtcatctatgacaccacactcgcatagtcggaccccagaatactacccaaatgctggcttgatcatgaactactgcaggaatccagatgctgtggcagctccttattgttatacgagggatcccggtgtcaggtgggagtactgcaacctgacgcaatgctcagacgcagaagggactgccgtcgcgcctccgactgttaccccggttccaagcctagaggctccttccgaacaagcaccgactgagcaaaggcctggggtgcaggagtgctaccatggtaatggacagagttatcgaggcacatactccaccactgtcacaggaagaacctgccaagcttggtcatctatgacaccacactcgcatagtcggaccccagaatactacccaaatgctggcttgatcatgaactactgcaggaatccagatgctgtggcagctccttattgttatacgagggatcccggtgtcaggtgggagtactgcaacctgacgcaatgctcagacgcagaagggactgccgtcgcgcctccgactgttaccccggttccaagcctagaggctccttccgaacaagcaccgactgagcaaaggcctggggtgcaggagtgctaccatggtaatggacagagttatcgaggcacatactccaccactgtcacaggaagaacctgccaagcttggtcatctatgacaccacactcgcatagtcggaccccagaatactacccaaatgctggcttgatcatgaactactgcaggaatccagatgctgtggcagctccttattgttatacgagggatcccggtgtcaggtgggagtactgcaacctgacgcaatgctcagacgcagaagggactgccgtcgcgcctccgactgttaccccggttccaagcctagaggctccttccgaacaagcaccgactgagcaaaggcctggggtgcaggagtgctaccatggtaatggacagagttatcgaggcacatactccaccactgtcacaggaagaacctgccaagcttggtcatctatgacaccacactcgcatagtcggaccccagaatactacccaaatgctggcttgatcatgaactactgcaggaatccagatgctgtggcagctccttattgttatacgagggatcccggtgtcaggtgggagtactgcaacctgacgcaatgctcagacgcagaagggactgccgtcgcgcctccgactgttaccccggttccaagcctagaggctccttccgaacaagcaccgactgagcaaaggcctggggtgcaggagtgctaccatggtaatggacagagttatcgaggcacatactccaccactgtcacaggaagaacctgccaagcttggtcatctatgacaccacactcgcatagtcggaccccagaatactacccaaatgctggcttgatcatgaactactgcaggaatccagatgctgtggcagctccttattgttatacgagggatcccggtgtcaggtgggagtactgcaacctgacgcaatgctcagacgcagaagggactgccgtcgcgcctccgactgttaccccggttccaagcctagaggctccttccgaacaagcaccgactgagcaaaggcctggggtgcaggagtgctaccatggtaatggacagagttatcgaggcacatactccaccactgtcacaggaagaacctgccaagcttggtcatctatgacaccacactcgcatagtcggaccccagaatactacccaaatgctggcttgatcatgaactactgcaggaatccagatgctgtggcagctccttattgttatacgagggatcccggtgtcaggtgggagtactgcaacctgacgcaatgctcagacgcagaagggactgccgtcgcgcctccgactgttaccccggttccaagcctagaggctccttccgaacaagcaccgactgagcaaaggcctggggtgcaggagtgctaccatggtaatggacagagttatcgaggcacatactccaccactgtcacaggaagaacctgccaagcttggtcatctatgacaccacactcgcatagtcggaccccagaatactacccaaatgctggcttgatcatgaactactgcaggaatccagatgctgtggcagctccttattgttatacgagggatcccggtgtcaggtgggagtactgcaacctgacgcaatgctcagacgcagaagggactgccgtcgcgcctccgactgttaccccggttccaagcctagaggctccttccgaacaagcaccgactgagcaaaggcctggggtgcaggagtgctaccatggtaatggacagagttatcgaggcacatactccaccactgtcacaggaagaacctgccaagcttggtcatctatgacaccacactcgcatagtcggaccccagaatactacccaaatgctggcttgatcatgaactactgcaggaatccagatgctgtggcagctccttattgttatacgagggatcccggtgtcaggtgggagtactgcaacctgacgcaatgctcagacgcagaagggactgccgtcgcgcctccgactgttaccccggttccaagcctagaggctccttccgaacaagcaccgactgagcaaaggcctggggtgcaggagtgctaccatggtaatggacagagttatcgaggcacatactccaccactgtcacaggaagaacctgccaagcttggtcatctatgacaccacactcgcatagtcggaccccagaatactacccaaatgctggcttgatcatgaactactgcaggaatccagatgctgtggcagctccttattgttatacgagggatcccggtgtcaggtgggagtactgcaacctgacgcaatgctcagacgcagaagggactgccgtcgcgcctccgactgttaccccggttccaagcctagaggctccttccgaacaagcaccgactgagcaaaggcctggggtgcaggagtgctaccatggtaatggacagagttatcgaggcacatactccaccactgtcacaggaagaacctgccaagcttggtcatctatgacaccacactcgcatagtcggaccccagaatactacccaaatgctggcttgatcatgaactactgcaggaatccagatgctgtggcagctccttattgttatacgagggatcccggtgtcaggtgggagtactgcaacctgacgcaatgctcagacgcagaagggactgccgtcgcgcctccgactgttaccccggttccaagcctagaggctccttccgaacaagcaccgactgagcaaaggcctggggtgcaggagtgctaccatggtaatggacagagttatcgaggcacatactccaccactgtcacaggaagaacctgccaagcttggtcatctatgacaccacactcgcatagtcggaccccagaatactacccaaatgctggcttgatcatgaactactgcaggaatccagatgctgtggcagctccttattgttatacgagggatcccggtgtcaggtgggagtactgcaacctgacgcaatgctcagacgcagaagggactgccgtcgcgcctccgactgttaccccggttccaagcctagaggctccttccgaacaagcaccgactgagcaaaggcctggggtgcaggagtgctaccatggtaatggacagagttatcgaggcacatactccaccactgtcacaggaagaacctgccaagcttggtcatctatgacaccacactcgcatagtcggaccccagaatactacccaaatgctggcttgatcatgaactactgcaggaatccagatgctgtggcagctccttattgttatacgagggatcccggtgtcaggtgggagtactgcaacctgacgcaatgctcagacgcagaagggactgccgtcgcgcctccgactgttaccccggttccaagcctagaggctccttccgaacaagcaccgactgagcaaaggcctggggtgcaggagtgctaccatggtaatggacagagttatcgaggcacatactccaccactgtcacaggaagaacctgccaagcttggtcatctatgacaccacactcgcatagtcggaccccagaatactacccaaatgctggcttgatcatgaactactgcaggaatccagatgctgtggcagctccttattgttatacgagggatcccggtgtcaggtgggagtactgcaacctgacgcaatgctcagacgcagaagggactgccgtcgcgcctccgactgttaccccggttccaagcctagaggctccttccgaacaagcaccgactgagcaaaggcctggggtgcaggagtgctaccatggtaatggacagagttatcgaggcacatactccaccactgtcacaggaagaacctgccaagcttggtcatctatgacaccacactcgcatagtcggaccccagaatactacccaaatgctggcttgatcatgaactactgcaggaatccagatgctgtggcagctccttattgttatacgagggatcccggtgtcaggtgggagtactgcaacctgacgcaatgctcagacgcagaagggactgccgtcgcgcctccgactgttaccccggttccaagcctagaggctccttccgaacaagcaccgactgagcagaggcctggggtgcaggagtgctaccacggtaatggacagagttatcgaggcacatactccaccactgtcactggaagaacctgccaagcttggtcatctatgacaccacactcgcatagtcggaccccagaatactacccaaatgctggcttgatcatgaactactgcaggaatccagatgctgtggcagctccttattgttatacgagggatcccggtgtcaggtgggagtactgcaacctgacgcaatgctcagacgcagaagggactgccgtcgcgcctccgactgttaccccggttccaagcctagaggctccttccgaacaagcaccgactgagcaaaggcctggggtgcaggagtgctaccatggtaatggacagagttatcgaggcacatactccaccactgtcacaggaagaacctgccaagcttggtcatctatgacaccacactcgcatagtcggaccccagaatactacccaaatgctggcttgatcatgaactactgcaggaatccagatgctgtggcagctccttattgttatacgagggatcccggtgtcaggtgggagtactgcaacctgacgcaatgctcagacgcagaagggactgccgtcgcgcctccgactgttaccccggttccaagcctagaggctccttccgaacaagcaccgactgagcaaaggcctggggtgcaggagtgctaccatggtaatggacagagttatcgaggcacatactccaccactgtcacaggaagaacctgccaagcttggtcatctatgacaccacactcgcatagtcggaccccagaatactacccaaatgctggcttgatcatgaactactgcaggaatccagatgctgtggcagctccttattgttatacgagggatcccggtgtcaggtgggagtactgcaacctgacgcaatgctcagacgcagaagggactgccgtcgcgcctccgactgttaccccggttccaagcctagaggctccttccgaacaagcaccgactgagcagaggcctggggtgcaggagtgctaccacggtaatggacagagttatcgaggcacatactccaccactgtcactggaagaacctgccaagcttggtcatctatgacaccacactcgcatagtcggaccccagaatactacccaaatgctggcttgatcatgaactactgcaggaatccagatgctgtggcagctccttattgttatacgagggatcccggtgtcaggtgggagtactgcaacctgacgcaatgctcagacgcagaagggactgccgtcgcgcctccgactgttaccccggttccaagcctagaggctccttccgaacaagcaccgactgagcagaggcctggggtgcaggagtgctaccacggtaatggacagagttatcgaggcacatactccaccactgtcactggaagaacctgccaagcttggtcatctatgacaccacactcgcatagtcggaccccagaatactacccaaatgctggcttgatcatgaactactgcaggaatccagatgctgtggcagctccttattgttatacgagggatcccggtgtcaggtgggagtactgcaacctgacgcaatgctcagacgcagaagggactgccgtcgcgcctccgactgttaccccggttccaagcctagaggctccttccgaacaagcaccgactgagcagaggcctggggtgcaggagtgctaccacggtaatggacagagttatcgaggcacatactccaccactgtcactggaagaacctgccaagcttggtcatctatgacaccacactcgcatagtcggaccccagaatactacccaaatgctggcttgatcatgaactactgcaggaatccagatgctgtggcagctccttattgttatacgagggatcccggtgtcaggtgggagtactgcaacctgacgcaatgctcagacgcagaagggactgccgtcgcgcctccgactgttaccccggttccaagcctagaggctccttccgaacaagcaccgactgagcagaggcctggggtgcaggagtgctaccacggtaatggacagagttatcgaggcacatactccaccactgtcactggaagaacctgccaagcttggtcatctatgacaccacactcgcatagtcggaccccagaatactacccaaatgctggcttgatcatgaactactgcaggaatccagatcctgtggcagccccttattgttatacgagggatcccagtgtcaggtgggagtactgcaacctgacacaatgctcagacgcagaagggactgccgtcgcgcctccaactattaccccgattccaagcctagaggctccttctgaacaagcaccaactgagcaaaggcctggggtgcaggagtgctaccacggaaatggacagagttatcaaggcacatacttcattactgtcacaggaagaacctgccaagcttggtcatctatgacaccacactcgcatagtcggaccccagcatactacccaaatgctggcttgatcaagaactactgccgaaatccagatcctgtggcagccccttggtgttatacaacagatcccagtgtcaggtgggagtactgcaacctgacacgatgctcagatgcagaatggactgccttcgtccctccgaatgttattctggctccaagcctagaggctttttttgaacaagcactgactgaggaaacccccggggtacaggactgctactaccattatggacagagttaccgaggcacatactccaccactgtcacaggaagaacttgccaagcttggtcatctatgacaccacaccagcatagtcggaccccagaaaactacccaaatgctggcctgaccaggaactactgcaggaatccagatgctgagattcgcccttggtgttacaccatggatcccagtgtcaggtgggagtactgcaacctgacacaatgcctggtgacagaatcaagtgtccttgcaactctcacggtggtcccagatccaagcacagaggcttcttctgaagaagcaccaacggagcaaagccccggggtccaggattgctaccatggtgatggacagagttatcgaggctcattctctaccactgtcacaggaaggacatgtcagtcttggtcctctatgacaccacactggcatcagaggacaacagaatattatccaaatggtggcctgaccaggaactactgcaggaatccagatgctgagattagtccttggtgttataccatggatcccaatgtcagatgggagtactgcaacctgacacaatgtccagtgacagaatcaagtgtccttgcgacgtccacggctgtttctgaacaagcaccaacggagcaaagccccacagtccaggactgctaccatggtgatggacagagttatcgaggctcattctccaccactgttacaggaaggacatgtcagtcttggtcctctatgacaccacactggcatcagagaaccacagaatactacccaaatggtggcctgaccaggaactactgcaggaatccagatgctgagattcgcccttggtgttataccatggatcccagtgtcagatgggagtactgcaacctgacgcaatgtccagtgatggaatcaactctcctcacaactcccacggtggtcccagttccaagcacagagcttccttctgaagaagcaccaactgaaaacagcactggggtccaggactgctaccgaggtgatggacagagttatcgaggcacactctccaccactatcacaggaagaacatgtcagtcttggtcgtctatgacaccacattggcatcggaggatcccattatactatccaaatgctggcctgaccaggaactactgcaggaatccagatgctgagattcgcccttggtgttacaccatggatcccagtgtcaggtgggagtactgcaacctgacacgatgtccagtgacagaatcgagtgtcctcacaactcccacagtggccccggttccaagcacagaggctccttctgaacaagcaccacctgagaaaagccctgtggtccaggattgctaccatggtgatggacggagttatcgaggcatatcctccaccactgtcacaggaaggacctgtcaatcttggtcatctatgataccacactggcatcagaggaccccagaaaactacccaaatgctggcctgaccgagaactactgcaggaatccagattctgggaaacaaccctggtgttacacaaccgatccgtgtgtgaggtgggagtactgcaatctgacacaatgctcagaaacagaatcaggtgtcctagagactcccactgttgttccagttccaagcatggaggctcattctgaagcagcaccaactgagcaaacccctgtggtccggcagtgctaccatggtaatggccagagttatcgaggcacattctccaccactgtcacaggaaggacatgtcaatcttggtcatccatgacaccacaccggcatcagaggaccccagaaaactacccaaatgatggcctgacaatgaactactgcaggaatccagatgccgatacaggcccttggtgttttaccatggaccccagcatcaggtgggagtactgcaacctgacgcgatgctcagacacagaagggactgtggtcgctcctccgactgtcatccaggttccaagcctagggcctccttctgaacaagactgtatgtttgggaatgggaaaggataccggggcaagaaggcaaccactgttactgggacgccatgccaggaatgggctgcccaggagccccatagacacagcacgttcattccagggacaaataaatgggcaggtctggaaaaaaattactgccgtaaccctgatggtgacatcaatggtccctggtgctacacaatgaatccaagaaaactttttgactactgtgatatccctctctgtgcatcctcttcatttgattgtgggaagcctcaagtggagccgaagaaatgtcctggaagcattgtaggggggtgtgtggcccacccacattcctggccctggcaagtcagtctcagaacaaggtttggaaagcacttctgtggaggcaccttaatatccccagagtgggtgctgactgctgctcactgcttgaagaagtcctcaaggccttcatcctacaaggtcatcctgggtgcacaccaagaagtgaacctcgaatctcatgttcaggaaatagaagtgtctaggctgttcttggagcccacacaagcagatattgccttgctaaagctaagcaggcctgccgtcatcactgacaaagtaatgccagcttgtctgccatccccagactacatggtcaccgccaggactgaatgttacatcactggctggggagaaacccaaggtacctttgggactggccttctcaaggaagcccagctccttgttattgagaatgaagtgtgcaatcactataagtatatttgtgctgagcatttggccagaggcactgacagttgccagggtgacagtggagggcctctggtttgcttcgagaaggacaaatacattttacaaggagtcacttcttggggtcttggctgtgcacgccccaataagcctggtgtctatgctcgtgtttcaaggtttgttacttggattgagggaatgatgagaaataattaattggacgggagacagagtgaagcatcaacctacttagaagctgaaacgtgggtaaggatttagcatgctggaaataatagacagcaatcaaacgaagacactgttcccagctaccagctatgccaaaccttggcatttttggtatttttgtgtataagcttttaaggtctgactgacaaattctgtattaaggtgtcatagctatgacatttgttaaaaataaactctgcacttattttgatttga

SEQ ID NO: 11516 - DNA, 2042 bp, Homo sapiens
tgagagaatcattaacttaatttgactatctggtttgtggatgcgtttactctcatgtaagtcaacaacatcctgggattgggacacactttctgggcactgctggccagtcccaaaatggaacataaggaagtggttcttctacttctgttatttctgaaatcagcaccgactgagacagggccttctgtgcaggagtgctaccacagtaatggacagagttatcgaggcacatacttcaccactgtcacaggaagaacctgccaagcttggtcatctatgacgccacaccagcacagtagaaccccagaaaagtacccaaatgatggcttgatctcgaactactgcaggaatccggattgttcggcaggcccttggtgttatacgacggatcccaatgtcaggtgggagtactgcaacctgacacggtgctcagacgatgaagggactgtgttcgtgcctctgactgttatcccagttccaagcctagaggattcattcatacaagtggcttgatctccaactactgcaggaatccggattgttcggcaggcccttggtgttatacaacggatcccaaagtcaggtgggagtactgcaacctgacaggatgctcagacaagaatagggctgtggccgcgcctctgactattatcccggttccaagacgagaggatacttccaaacaagcactgattgatccaaggccttcaatgtaggagtgctaccatggaaatggacagagttatcgaggcacatacttcaccaccgtcacaggaagcacttgccaagcttggtcatctatgacaccacaccagcacagtaggacctcagaaaagtacccaaatgctgacttgatcatgaactactgcaggaatccagatcctgtggaaggcccttggtgttacacgatggatcccaaagtcagatgggagtactgcaacctgacacgatgctcagacacagaagggactgcagtcgtgcctctgactgttatcccggttccaagcctagaggatccttccaaaccagcaccaacagagccaaggccttgggagcagcagtgctaccacggtaatggacagagttatcgaggcacatacttcaccactgtcacaggaagaacctgccaagcttggtcatctatgacgccacatcagcacatggcctgaccaggaactactgcaggaatccagattctgggaaacaaccctggtgttacacaactgatccgtgtgtgaggtgggagtactgcaacctgacacaatgctcagaaacagaatcagtgtcctagagactcccactgttgttccagttccaagcatggaggctcattctgaagcagcaccaactgagcaaacccctgtggtccggcagtgctaccatggtaatggacagagttatcaaggcacattctccaccactgtcacaggaaggacatgtcaatcttggtcatccatgacaccacaccggcatcagaggaccccagaaaactacccaaatgatggcctgacaatgaactactgcaggaatccagatgccgatacaggcccttggtgttttaccacagaccccagcgtcaggtgggagtactgcaacctgacgcgatgctcagacagaagggactgtggtcgctcctccgactgttatccaggttccaagcctagaggctccttccgaacaagtaaaaagtctgtatccagacatctatgtgcttggacaacgggatgaaaagacatgaaaaaccacactgatgcagaagcctttagtgctgcacgggagctcgagtgttggttgagggtctgccatgaccaaggaagcctcaatgccgtccctgggaaagccagagctgtgatttttggcacaacttgcgagtgtagtgactttaggactggcgcaaaacctccagggtgctcaacttaaccactcaccttgttctaaaataggttatttcagtgtcccagtcaaattcctattctaacatgctgtcaactatgtgattctttccaagccaataaacatttccagtaatttcttaaaaa

SEQ ID NO: 11517 - DNA, 1713 bp, Homo sapiens
tgagagaatcattaacttaatttgactatctggtttgtggatgcgtttactctcatgtaagtcaacaacatcctgggattgggacacactttctgggcactgctggccagtcccaaaatggaacataaggaagtggttcttctacttctgttatttctgaaatcagcaccgactgagacagggccttctgtgcaggagtgctaccacagtaatggacagagttatcgaggcacatacttcaccactgtcacaggaagaacctgccaagcttggtcatctatgacgccacaccagcacagtagaaccccagaaaagtacccaaatgatggcttgatctcgaactactgcaggaatccggattgttcggcaggcccttggtgttatacgacggatcccaatgtcaggtgggagtactgcaacctgacacggtgctcagacgatgaagggactgtgttcgtgcctctgactgttatcccagttccaagcctagaggattcattcatacaagtggcttgatctccaactactgcaggaatccggattgttcggcaggcccttggtgttatacaacggatcccaaagtcaggtgggagtactgcaacctgacaggatgctcagacaagaatagggctgtggccgcgcctctgactattatcccggttccaagacgagaggatacttccaaacaagcactgattgatccaaggccttcaatgtaggagtgctaccatggaaatggacagagttatcgaggcacatacttcaccaccgtcacaggaagcacttgccaagcttggtcatctatgacaccacaccagcacagtaggacctcagaaaagtacccaaatgctgacttgatcatgaactactgcaggaatccagatcctgtggaaggcccttggtgttacacgatggatcccaaagtcagatgggagtactgcaacctgacacgatgctcagacacagaagggactgcagtcgtgcctctgactgttatcccggttccaagcctagaggatccttccaaaccagcaccaacagagccaaggccttgggagcagcagtgctaccacggtaatggacagagttatcgaggcacatacttcaccactgtcacaggaagaacctgccaagcttggtcatctatgacgccacatcagcacatggcctgaccaggaactactgcaggaatccagattctgggaaacaaccctggtgttacacaactgatccgtgtgtgaggtgggagtactgcaacctgacacaatgctcagaaacagaatcagtgtcctagagactcccactgttgttccagttccaagcatggaggctcattctgaagcagcaccaactgagcaaacccctgtggtccggcagtgctaccatggtaatggacagagttatcaaggcacattctccaccactgtcacaggaaggacatgtcaatcttggtcatccatgacaccacaccggcatcagaggaccccagaaaactacccaaatgactctatgtttgggaatgggaaaggataccggggcaagaaggcaaccactgttactgggacgccacgccaagaatggactgcccaagagccccatagacacagcaggttcactccagggacaagtccacgggcaggtctggaaaaaaatgtagggacatggatgaagctggaaaccatcatcctcagcaaactatcgcaaggacaaaaa

SEQ ID NO: 11518 - DNA, 5207 bp, Homo sapiens
agagttatattgtgccatttatggaaaaactctccccactgctcttggctttgacagtaggaatcaggttatatatggtctctcggtttgaagatatttgtcattaaaaaccagaacaagggctctgagatagggtcctttcctgacctactctggtaaagtctttatcctcaggatgcaaggataccaccctcttcctgtggaaagtgtcgaatcacatgcagagctctaagtctttcagttactttggagtgcagaaccatttcagacatgctgagggggactctactgtgcgcggtgctcgggcttctgcgcgcccagcccttcccctgtccgccagcttgcaagtgtgtcttccgggacgccgcgcagtgctcggggggcgacgtggcgcgcatctccgcgctgggcctgcccaccaacctcacgcacatcctgctcttcggaatgggccgcggcgtcctgcagagccagagcttcagcggcatgaccgtcctgcagcgcctcatgatctccgacagccacatttccgccgttgcccccggcaccttcagtgacctgataaaactgaaaaccctgaggctgtcgcgcaacaaaatcacgcatcttccaggtgcgctgctggataagatggtgctcctggagcagttgtttttggaccacaatgcgctaaggggcattgaccaaaacatgtttcagaaactggttaacctgcaggagctcgctctgaaccagaatcagctcgatttccttcctgccagtctcttcacgaatctggagaacctgaagttgttggatttatcgggaaacaacctgacccacctgcccaaggggttgcttggagcacaggctaagctcgagagacttctgctccactcgaaccgccttgtgtctctggattcggggctgttgaacagcctgggcgccctgacggagctgcagttccaccgaaatcacatccgttccatcgcacccggggccttcgaccggctcccaaacctcagttctttgacgctttcgagaaaccaccttgcgtttctcccctctgcgctctttcttcattcgcacaatctgactctgttgactctgttcgagaacccgctggcagagctcccgggggtgctcttcggggagatggggggcctgcaggagctgtggctgaaccgcacccagctgcgcaccctgcccgccgccgccttccgcaacctgagccgcctgcggtacttaggggtgactctgagcccgcggctgagcgcgcttccgcagggcgccttccagggccttggcgagctccaggtgctcgccctgcactccaacggcctgaccgccctccccgacggcttgctgcgcggcctcggcaagctgcgccaggtgtccctgcgccgcaacaggctgcgcgccctgccccgtgccctcttccgcaatctcagcagcctggagagcgtccagctcgaccacaaccagctggagaccctgcctggcgacgtgtttggggctctgccccggctgacggaggtcctgttggggcacaactcctggcgctgcgactgtggcctggggcccttcctggggtggctgcggcagcacctaggcctcgtgggcggggaagagcccccacggtgcgcaggccctggggcgcacgccggcctgccgctctgggccctgccggggggtgacgcggagtgcccgggcccccggggcccgcctccccgccccgctgcggacagctcctcggaagcccctgtccacccagccttggctcccaacagctcagaaccctgggtgtgggcccagccggtgaccacgggcaaaggtcaagatcatagtccgttctgggggttttattttctgcttttagctgttcaggccatgatcaccgtgatcatcgtgtttgctatgattaaaattggccaactctttcgaaaattaatcagagagagagcccttgggtaaaccaatgggaaaatcttctaattacttagaacctgaccagatgtggctcggaggggaatccagacccgctgctgtcttgctctccctcccctccccactcctcctctcttcttcctcttctctctcactgccacgccttcctttccctcctcctccccctctccgctctgtgctcttcattctcacgggcccgcaacccctcctctctctgtccccgcccgtctctggaaactgagcttgacgtttgtaaactgtggttgcctgccttcccagctccacgcggtgtgcgctgacactgccggggggctggactgtgttggacccatccttgccccgctgtgcctggcttggcctctggtggagagagggacctcttcagtgtctactgagtaaggggacagctccaggccggggctgtctcctgcacagagtaagccggtaaatgtttgtgaaatcaatgcgtggataaaggaacacatgccatccaagtgatgatggcttttcctggagggaaaggataggctgttgctctatctaattttttgtttttgtttttggacagtctagctctgtggcccaggctggcgtgcagtgggccgtctcagttcactgcagcctccgccctccaggttcaagtgattctcatgcctcagcgttctgagtagctgggattagaggcgtgtgccactacacccggctaatttttgtactttttaaagtagagacgggctttgccatattggcctggctgatctcaaactcctggtcttgaactcctggccacaagtgatctgcccgccttagcctcccaaagtgctgggattacaggcgcaagccactacacctgccctcttcatcgaattttatttgagaagtagagctcttgccattttttcccttgctccatttttctcactttatgtctctctgacctatgggctacttgggagagcactggactccattcatgcatgagcattttcaggataagcgacttctgtgaggctgagagaggaagaaaacacggagccttccctccaggtgcccagtgtaggtccagcgtgtttcctgagcctcctgtgagtttccacttgctttacatccatgcaacatgtcattttgaaactggattgatttgcatttcctggaactctgccacctcatttcacaagcatttatggagcagttaacatgtgactggtattcatgaatataatgataagcttgattctagttcagctgctgtcacagtctcatttgttcttccaactgaaagccgtaaaacctttgttgctttaattgaatgtctgtgcttatgagaggcagtggttaaaacattttctggcgagttgacaactgtgggttcaaatcccagctctaccacttactaactgcatgggactttgggtaagacacctgcttacattctctaagccttggtttcctgaaccttaaaacaggataacatagtacctgcttcatagagttttgtgagaattaaaggcaataaagcatataatgacttagcccagcggcctgcagacaatacatgttaatgaatgttagctattattactaaagatgagcaattattattggcatcatgatttctaaagaagagctttgagttggtatttttctctgtgtataagggtaagtccgaactttctcatactggaggttacattcacatcagtctgtcttcccctgcggatggcctcagccctgggtggccaggctctgtgctcacagtccagagcaatggatcctccaacaccaccaggtggatgtggagcaggagagctggatcgtggcatttgtttctgggttctgcagttgggagttggtttctgggttctccattggtctacttgtctagtcccataccagactcacggtctccattattggagctttaataatttttggtatagggtcatctctccaccttgtttttcttctattcttggttctttgcaattctatgaatatttcagggtcagcatgtcaactccattgaaaaaccctgctgggattttaatagaacttacagctcacgcctgtaatcccagcactttgggaggctgaggtgggtggatcacaggtcaggagtttgagaacagctggccaagatggtgaaaccccgtctctactaaaaatacaaaaattagctgggtgcggtggcaggtgcctgtagtcccagctacttgggacaccgaggcaggagaatcacttgaacccgggaggcggaggttgcagtgagccgagatcgtgccactgcactctagcctgggcgacagagcgagactccatctcaaaaaaaaagaaaaagaaaattgcagtaaatttaaaactaatttggggaagaatctgtatttttacaatacctagtgttcttgccagtaagcatggttcatcttcccatttatttacgtcattttaaatctttcagtgatgttttagaattttttttataaaaaccttcactataagaacagaaaaccaaacaccgcatgttctcactcataggtgggaattgaacaatgagaacacttggacacagggcggggaacgtcacacgcctggactgttgggggggtggctgggagagggatagtgttaggagaaatacctaatgtaaatgacgagttaatggtgcagccaaccaacctggcacatgtattcatatgtaacaaacctgcacgttgtgcacatgtaccctagaacttaaagtatattaaaaaaagaaaccttggcactgattttgttagatttattcctaggtatccttcctcttttttgatttgtcattgctattgtagatggcatctttttaaaaagttatattttctaaagcaaaaaataaaaaaagttgtatttctaatttttattaccaatatataagaatgtaatttatttttacataattatcttatgtctagtaataattctgataatttgcttcttcctattaaaaccttacacccattattgatttatttttctgttttaaaatatcttcctgcactggctaaaacctccactataatgttgagcagaacagtgaggcatccttagaactatcttggttgcaaagggtaggtctctaatgtttcatcaataaatgtgatgtttctagtctgagtttgctaagtatattttaaaataatcagtaaagttagattttatccatttttatcttaactattgagatgctcatatcatttttcttcttcaatgtgttaaaatggtga

SEQ ID NO: 11519 - DNA, 2466 bp, Homo sapiens
ctggagtggggtaagaggcgaattatagacacaaggggctcctctgcaggaaggaggccaagggaaagaggcttgaaaggcttgatatttcacccaccaccactcactgccggagtaagcaggtctccccttcccagggctgaggggaggcagggatgtgtgctgtcccagggctgagaagtggcaggtgagctggtgattccttactgcccaggttctgtctaggaaggtgcgtcctcaccatgctggatggtgtcctagtccaggagcaccccctgagctcctggcctagactccaaagggttgggtagatgagcaaagactttacaaagaccttaggcgatatatgtccaggagcacccaggaattactgggctaccactgcagactgcaggacaagctccaagaacaggaaggaagtcttgcagctgaagggaggcactccttggcctccgcagccgatcacatgaaggtggtgccaagtctcctgctctccgtcctcctggcacaggtgtggctggtacccggcttggcccccagtcctcagtcgccagagaccccagcccctcagaaccagaccagcagggtagtgcaggctcccaaggaggaagaggaagatgagcaggaggccagcgaggagaaggccagtgaggaagagaaagcctggctgatggccagcaggcagcagcttgccaaggagacttcaaacttcggattcagcctgctgcgaaagatctccatgaggcacgatggcaacatggtcttctctccatttggcatgtccttggccatgacaggcttgatgctgggggccacagggccgactgaaacccagatcaagagagggctccacttgcaggccctgaagcccaccaagcccgggctcctgccttccctctttaagggactcagagagaccctctcccgcaacctggaactgggcctcacacaggggagttttgccttcatccacaaggattttgatgtcaaagagactttcttcaatttatccaagaggtattttgatacagagtgcgtgcctatgaattttcgcaatgcctcacaggccaaaaggctcatgaatcattacattaacaaagagactcgggggaaaattcccaaactgtttgatgagattaatcctgaaaccaaattaattcttgtggattacatcttgttcaaagggaaatggttgaccccatttgaccctgtcttcaccgaagtcgacactttccacctggacaagtacaagaccattaaggtgcccatgatgtacggtgcaggcaagtttgcctccacctttgacaagaattttcgttgtcatgtcctcaaactgccctaccaaggaaatgccaccatgctggtggtcctcatggagaaaatgggtgaccacctcgcccttgaagactacctgaccacagacttggtggagacatggctcagaaacatgaaaaccagaaacatggaagttttctttccgaagttcaagctagatcagaagtatgagatgcatgagctgcttaggcagatgggaatcagaagaatcttctcaccctttgctgaccttagtgaactctcagctactggaagaaatctccaagtatccagggttttacaaagaacagtgattgaagttgatgaaaggggcactgaggcagtggcaggaatcttgtcagaaattactgcttattccatgcctcctgtcatcaaagtggaccggccatttcatttcatgatctatgaagaaacctctggaatgcttctgtttctgggcagggtggtgaatccgactctcctataattcaggacacgcataagcacttcgcgtgtagtagatgctgaatctgaggtatcaaacacacacaggataccagcaatggatggcaggggagagtgttccttttgttcttaactagtttagggtgttctcaaataaatacagtagtccccacttatctgagggggatacattcaaagacccccagcagatgcctgaaacggtggacagtgctgaaccttatatatattttttcctacacatacatacctatgataaagtttaatttataaattaggcacagtaagagattaacaataataacaacattaagtaaaatgagttacttgaatgcaagcactgcaataccataacagtcaaactgattatagagaaggctactaagtgactcatgggcgaggagcatagacagtgtggagacattgggcaaggggagaattcacatcctgggtgggacagagcaggacaatgcaagattccatcccactactcagaatggcatgctgcttaagacttttagattgtttatttctggaatttttcatttaatgtttttggaccatggttgaccatggttaactgagactgcagaaagcaaaaccatggataagggaggactactacaaaagcattaaattgatacatattttttaaaaaaaaaaaaaaaa

SEQ ID NO: 11520 - DNA, 3109 bp, Homo sapiens
cattggacttcagcatgactactcagttgccagcttacgtggcaattttgcttttctatgtctcaagagccagctgccaggacactttcattgcagctgtttatgagcatgcagcgatattgcccaatgccaccctaacaccagtgtctcgtgaggaggctttggcattaatgaatcggaatctggacattttggaaggagcgatcacatcagcagcagatcagggtgcgcatattattgtgactccagaagatgctatttatggctggaacttcaacagggactctctctacccatatttggaggacatcccagaccctgaagtaaactggatcccctgtaataatcgtaacagatttggccagaccccagtacaagaaagactcagctgcctggccaagaacaactctatctatgttgtggcaaatattggggacaagaagccatgcgataccagtgatcctcagtgtccccctgatggccgttaccaatacaacactgatgtggtatttgattctcaaggaaaactggtggcacgctaccataagcaaaaccttttcatgggtgaaaatcaattcaatgtacccaaggagcctgagattgtgactttcaataccacctttggaagttttggcattttcacatgctttgatatactcttccatgatcctgctgttaccttggtgaaagatttccacgtggacaccatagtattcccaacagcttggatgaatgttttgccacatttgtcagctgttgaattccactcagcttgggctatgggcatgagggtcaatttccttgcatccaacatacattacccctcaaagaaaatgacaggaagtggcatctatgcacccaattcttcaagagcatttcattatgatatgaagacagaagagggaaaactcctcctctcgcaactggattcccacccatcccattctgcagtggtgaactggacttcctatgccagcagtatagaagcgctctcatcaggaaacaaggaatttaaaggcactgtctttttcgatgaattcacttttgtgaagctcacaggagttgcaggaaattatacagtttgtcagaaagatctctgctgtcatttaagctacaaaatgtctgagaacataccaaatgaagtgtacgctctaggggcatttgacggactgcacactgtggaagggcgctattatctacagatttgtaccctgttgaaatgtaaaacgactaatttaaacacttgcggtgactcagctgaaacagcttctaccaggtttgaaatgttctccctcagtggcactttcggaacccagtatgtctttcctgaggtgttgctgagtgaaaatcagcttgcacctggagaatttcaggtgtcaactgacggacgcttgtttagtctgaagccaacatccggacctgtcttaacagtaactctgtttgggaggttgtatgagaaggactgggcatcaaatgcttcatcaggcctcacagcacaagcaagaataataatgctaatagttatagcacctattgtatgctcattaagttggtagaatattgactttttctcttttttatttgggataatttaaaaaatgatggatgagaaaagaaagattggtccgggttaatattatcctctagtataagtgaattactagtttctctttatttagacaaacacacacacaccagataatataaacttaataaattatctgttaatgtagattttatttaaaaaactatatttgaacattggtctttcttggacgtgagctaattatatcaaataagtatcacaaatcttttacgcagaagaaataaaaactacgggtagaaaacataagaactatcataaaatttacttacaaggaggctgctcttgttaccacttttattatattacgtatcacttattcagctctgctgaaaatttccaatgactttgtttgtttgctcttttagttttttacctaaacaatacattttgattctcttgtgggttgataatgtctccccaaaatttacatgttgaagcacctcagaatgtgactgtatttggagacagggtctttaaagaggtaaaataaggtcattaggatagaccctaattcaatatgactgatgatcataaaagaagaggcgagtagggcacaacaggcacaaagggagaccataaggagacacagaggaaggacaactctttacaagctaagaagagagggcctcagaagaaaccaaccctgccaacaccttgatcttggacttccagcctccaaaactatgagaaataaatttctattgtttaagtcacccagtccatggtactttgttaggcagccctggcaaatgaatcaaagacccattcctgttcctctccccaccactactgttttctactgtaatctgaagcttcaacaaaaggcttacctggtaagaatattcagctggtctgggtcctcaagactccaatagacactcttaaagaaggattgctgatggattgatagtgaaaccattagatcattgaattcctctggaattagaaaaccagagagtcccattttaagaaattagatatttaatatagcattgtgtgttctattttagtaacagcagaatctcttgacattacacaactcagtgaaacaacatcatttaagccaaaatatctcccaactgactgatagactctgagcactaatatcatagtgctgtgatgatggacaattacatagtaccgataacagccatgcactgtgcaaagcatgcccttctgcacaggagagcaaggcacttgcagtagtgatctatgccagcaaaacatcattttgagacaaacatttttgtggcagatgtttttcctaaaaagtactatatcatccaagaaatatttgagtaaaatcccttgttcttttgggtgacattaactgacatttgctttttttcaagacctaatagaaaataagaaagcccataatgtatttagaaacaggaatcctcagagcaattctctgtattctcatataatttcaatgtaaaacagaaaacatattgatgtgttggtgataggcttgaattattaaaaacttcaaaaacaaaa

SEQ ID NO: 11521 - DNA, 1315 bp, Homo sapiens
ggaattcgggcacgagtgaaagatttcaaaccccaaacagtgcaactgaaacttttgcattactatactactgagaatatctaacatgttgttactaatcaatgtcattctgaccttgtgggtttcctgtgctaatggacaagaagtgaaaccttgtgattttccagaaattcaacatggaggtctatattataagagtttgcgtagactatactttccagcagctgcaggacaatcttattcctattactgtgatcaaaattttgtgactccttcaggaagttactgggattacattcactgcacacaagatgggtggttgccaacagtcccatgcctcagaacatgctcaaaatcagatatagaaattgaaaatggattcatttctgaatcttcctctatttatattttaaataaagaaatacaatataaatgtaaaccaggatatgcaacagcagatggaaattcttcaggttcaattacatgtttgcaaaatggatggtcagcacaaccaatttgcattaaattttgtgatatgcctgtttttgagaattccagagccaagagtaatggcatgcggtttaagctccatgacacattggactacgaatgctacgatggatatgaaatcagttatggaaacaccacaggttccatagtgtgtggtgaagatgggtggtcccattttccaacatgttataattcttcagaaaagtgtgggcctcctccacctattagcaatggtgataccacctcctttctactaaaagtgtatgtgccacagtcaagagtcgagtaccaatgccagtcctactatgaacttcagggttctaattatgtaacatgtagtaatggagagtggtcggaaccaccaagatgcatacatccatgtataataactgaagaaaacatgaataaaaataacatacagttaaaaggaaaaagtgacataaaatattatgcaaaaacaggggataccattgaatttatgtgtaaattgggatataatgcgaatacatcagttctatcatttcaagcagtgtgtagggaaggcatagtggaataccccagatgcgaataaggcagcattgttaccctaaatgtatgtcaacttcacttctcactcttatggtctcaaagcttcgaaagatagcttctgatattgttgtaatttctactttatttcaaagaaaattaatataatagtttcaatttgcaacttaatatgttctcaaaaatatgttaaaacaaactaaattattgcttatgcttgtactaaaataataaaaactacccttatattggaaaaaaaaaa

SEQ ID NO: 11522 - DNA, 7172 bp, Homo sapiens
atcggaggggggtcgggaggaggaggaggaggcagcggcagagaagagagaggcgtgtgagccgtgctccaccggctagctccttcccgctgctcctgcctggcagtgccaggcagcccacaccagcatggccttgctcatccacctcaagacagtctcggagctgcggggcaggggcgaccggatcgccaaagtgactttccgagggcaatccttctactctcgggtcctggagaactgtgaggatgtggctgactttgatgagacatttcggtggccggtggccagcagcatcgacagaaatgagatgctggagattcaggttttcaactacagcaaagtcttcagcaacaagctcatcgggaccttccgcatggtgctgcagaaggtggtagaggagagccatgtggaggtgactgacacgctgattgatgacaacaatgctatcatcaagaccagcctgtgcgtggaggtccggtatcaggccactgacggcacagtgggctcctgggacgatggggacttcctgggagatgagtctcttcaagaggaagagaaggacagccaagagacggatggactgctcccaggctcccggcccagctcccggcccccaggagagaagagcttccggagagccgggaggagcgtgttctccgccatgaagctcggcaaaaaccggtctcacaaggaggagccccaaagaccagatgaaccggcggtgctggagatggaagaccttgaccatctggccattcggctaggagatggactggatcccgactcggtgtctctagcctcagtcacagctctcaccactaatgtctccaacaagcgatctaagccagacattaagatggagccaagtgctgggcggcccatggattaccaggtcagcatcacggtgatcgaggcccggcagctggtgggcttgaacatggaccctgtggtgtgcgtggaggtgggtgacgacaagaagtacacatccatgaaggagtccactaactgcccctattacaacgagtacttcgtcttcgacttccatgtctctccggatgtcatgtttgacaagatcatcaagatttcggtgattcactccaagaacctgctgcgcagtggcaccctggtgggctccttcaaaatggacgtgggaaccgtgtactcgcagccagagcaccagttccatcacaagtgggccatcctgtctgaccccgatgacatctcctcggggctgaagggctacgtgaagtgtgacgttgccgtggtgggcaaaggggacaacatcaagacgccccacaaggccaatgagaccgacgaagatgacattgaggggaacttgctgctccccgagggggtgccccccgaacgccagtgggcccggttctatgtgaaaatttaccgagcagaggggctgccccgtatgaacacaagcctcatggccaatgtaaagaaggctttcatcggtgaaaacaaggacctcgtggacccctacgtgcaagtcttctttgctggccagaagggcaagacttcagtgcagaagagcagctatgagcccctgtggaatgagcaggtcgtctttacagacctcttccccccactctgcaaacgcatgaaggtgcagatccgagactcggacaaggtcaacgacgtggccatcggcacccacttcattgacctgcgcaagatttctaatgacggagacaaaggcttcctgcccacactgggcccagcctgggtgaacatgtacggctccacacgtaactacacgctgctggatgagcatcaggacctgaacgagggcctgggggagggtgtgtccttccgggcccggctcctgctgggcctggctgtggagatcgtagacacctccaaccctgagctcaccagctccacagaggtgcaggtggagcaggccacgcccatctcggagagctgtgcaggtaaaatggaagaattctttctctttggagccttcctggaggcctcaatgatcgaccggagaaacggagacaagcccatcacctttgaggtcaccataggcaactatgggaacgaagttgatggcctgtcccggccccagcggcctcggccccggaaggagccgggggatgaggaagaagtagacctgattcagaacgcaagtgatgacgaggccggtgatgccggggacctggcctcagtctcctccactccaccaatgcggccccaggtcaccgacaggaactacttccatctgccctacctggagcgaaagccctgcatctacatcaagagctggtggccggaccagcgccgccgcctctacaatgccaacatcatggaccacattgccgacaagctggaagaaggcctgaacgacatacaggagatgatcaaaacggagaagtcctaccctgagcgtcgcctgcggggcgtcctggaggagctgagctgtggctgctgccgcttcctctccctcgctgacaaggaccagggccactcatcccgcaccaggcttgaccgggagcgcctcaagtcctgcatgagggagctggaaaacatggggcagcaggccaggatgctgcgggcccaggtgaagcggcacacggtgcgggacaagctgaggctgtgccagaacttcctgcagaagctgcgcttcctggcggacgagccccagcacagcattcccgacatcttcatctggatgatgagcaacaacaagcgtgtcgcctatgcccgtgtgccctccaaggacctgctcttctccatcgtggaggaggagactggcaaggactgcgccaaggtcaagacgctcttccttaagctgccagggaagcggggcttcggctcggcaggctggacagtgcaggccaaggtggagctgtacctgtggctgggcctcagcaaacagcgcaaggagttcctgtgcggcctgccctgtggcttccaggaggtcaaggcagcccagggcctgggcctgcatgccttcccacccgtcagcctggtctacaccaagaagcaggcgttccagctccgagcgcacatgtaccaggcccgcagcctctttgccgccgacagcagcggactctcagacccctttgcccgcgtcttcttcatcaatcagagtcagtgcacagaggtgctgaatgagaccctgtgtcccacctgggaccagatgctggtgttcgacaacctggagctctatggtgaagctcatgagctgagggacgatccgcccatcattgtcattgaaatctatgaccaggattccatgggcaaagctgacttcatgggccggaccttcgccaaacccctggtgaagatggcagacgaggcgtactgcccaccccgcttcccacctcagctcgagtactaccagatctaccgtggcaacgccacagctggagacctgctggcggccttcgagctgctgcagattggaccagcagggaaggctgacctgccccccatcaatggcccggtggacgtggaccgaggtcccatcatgcccgtgcccatgggcatccggcccgtgctcagcaagtaccgagtggaggtgctgttctggggcctacgggacctaaagcgggtgaacctggcccaggtggaccggccacgggtggacatcgagtgtgcagggaagggggtgcagtcgtccctgatccacaattataagaagaaccccaacttcaacaccctcgtcaagtggtttgaagtggacctcccagagaacgagctgctgcacccgcccttgaacatccgtgtggtggactgccgggccttcggtcgctacacactggtgggctcccatgccgtcagctccctgcgacgcttcatctaccggcccccagaccgctcggcccccagctggaacaccacggtcaggcttctccggcgctgccgtgtgctgtgcaatgggggctcctcctctcactccacaggggaggttgtggtgactatggagccagaggtacccatcaagaaactggagaccatggtgaagctggacgcgacttctgaagctgttgtcaaggtggatgtggctgaggaggagaaggagaagaagaagaagaagaagggcactgcggaggagccagaggaggaggagccagacgagagcatgctggactggtggtccaagtactttgcctccattgacaccatgaaggagcaacttcgacaacaagagccctctggaattgacttggaggagaaggaggaagtggacaataccgagggcctgaaggggtcaatgaagggcaaggagaaggcaagggctgccaaagaggagaagaagaagaaaactcagagctctggctctggccaggggtccgaggcccccgagaagaagaaacccaagattgatgagcttaaggtataccccaaagagctggagtccgagtttgataactttgaggactggctgcacactttcaacttgcttcggggcaagaccggggatgatgaggatggctccaccgaggaggagcgcattgtgggacgcttcaagggctccctctgcgtgtacaaagtgccactcccagaggacgtgtcccgggaagccggctacgactccacctacggcatgttccagggcatcccgagcaatgaccccatcaatgtgctggtccgagtctatgtggtccgggccacggacctgcaccctgctgacatcaacggcaaagctgacccctacatcgccatccggctaggcaagactgacatccgcgacaaggagaactacatctccaagcagctcaaccctgtctttgggaagtcctttgacatcgaggcctccttccccatggaatccatgctgacggtggctgtgtatgactgggacctggtgggcactgatgacctcattggggaaaccaagatcgacctggagaaccgcttctacagcaagcaccgcgccacctgcggcatcgcccagacctactccacacatggctacaatatctggcgggaccccatgaagcccagccagatcctgacccgcctctgcaaagacggcaaagtggacggcccccactttgggccccctgggagagtgaaggtggccaaccgcgtcttcactgggccctctgagattgaggacgagaacggtcagaggaagcccacagacgagcatgtggcgctgttggccctgaggcactgggaggacatcccccgcgcaggctgccgcctggtgccagagcatgtggagacgaggccgctgctcaaccccgacaagccgggcatcgagcagggccgcctggagctgtgggtggacatgttccccatggacatgccagcccctgggacgcctctggacatctcacctcggaagcccaagaagtacgagctgcgggtcatcatctggaacacagatgaggtggtcttggaggacgacgacttcttcacaggggagaagtccagtgacatcttcgtgagggggtggctgaagggccagcaggaggacaagcaggacacagacgtccactaccactccctcactggcgagggcaacttcaactggcgctacctgttccccttcgactacctggcggcggaggagaagatcgtcatctccaagaaggagtccatgttctcctgggacgagaccgagtacaagatccccgcgcggctcaccctgcagatctgggatgcggaccacttctccgctgacgacttcctgggggccatcgagctggacctgaaccggttcccgcggggcgcaaagacagccaagcagtgcaccatggagatggccaccggggaggtggacgtgcccctcgtgtccatcttcaagcaaaagcgcgtcaaaggctggtggcccctcctggcccgcaatgagaacgatgagtttgagctcacgggcaaggtggaggctgagctgcatttactgacagcagaggaggcagagaagaacccagtgggcctggcccgcaatgaacctgaccccctagagaaacccaaccggcccgacacgagcttcatctggttcctgaaccctctcaagtcggctcgctacttcttgtggcacacgtatcgctggctgctcctcaaactgttgctgctcctgctgctgctcctcctcctcgccctgttcctctactctgtgcctggctacctggtcaagaaaatcctcggggcctgagcccagtggcctcctggccggcccgacacggccttcgtctggttcctcaaccctctcaagtccatcaagtacctcatctgcacccggtacaagtggctcatcatcaagatcgtgctggcgctgttggggctgctcatgttggggctcttcctctacagcctccctggctacatggtcaaaaagctccttggggcatgaaggccgccagctcccgccagccgctccccagccctgccgcatttcctttcagtggcttggactctttcccatctcccctggggagcctgaggagcccagcgtccacttttcatgccttgggccgagcctgcctcctgcttgcgggggccgcctgtcctcactgccccaggctgcggcttgcccagtcccgcccctctgacccctgcctgtgggctggggagccttggatggggtggggacctggaatgggtctttcttgccccacctggctgaggcgccacccttcttcaggcccaggctccagaggaagactcctgaaaccctccccaggttttccaagtacaggattgaagctttagtgaaattaaccaaggaccatgggtcagtgcccagggctttaaaaagaatgaacgagcaaaaggtatccccgccgtgacccctgcagatagcaccggtatttgatccgcagcaggggccagaccctgcccacaagtcccagcgcggatgtttctgccactgctgggctccacttggctcctctcacttcccagggggtcgcctgtcctgcctgtgggtttccatggcttcccagagttccctctgccccagccagcgcctccaggcccagctgaggagctgtgagaagcagcagaggggactccccatcccgggcacaccctgtcttcccacccctgcccccttgcccttccagccctttcagctgcaggtgggagctggcccgtcaagtgctgcccctgcctgtgtctgggtttctgttggctgtttttcttttcttggagtggtgatttttctctaaataaaagaagtcaagcactgaaaaaaaaaaaaaaaa

SEQ ID NO: 11523 - DNA, 2864 bp, Homo sapiens
gactccggagcccgagcccggggcgggtggacgcggactcgaacgcagttgcttcgggacccaggaccccctcgggcccgacccgccaggaaagactgaggccgcggcctgccccgcccggctccctgcgccgccgccgcctcccgggacagaagatgtgctccagggtccctctgctgctgccgctgctcctgctactggccctggggcctggggtgcagggctgcccatccggctgccagtgcagccagccacagacagtcttctgcactgcccgccaggggaccacggtgccccgagacgtgccacccgacacggtggggctgtacgtctttgagaacggcatcaccatgctcgacgcaggcagctttgccggcctgccgggcctgcagctcctggacctgtcacagaaccagatcgccagcctgcccagcggggtcttccagccactcgccaacctcagcaacctggacctgacagccaacaggctgcatgaaatcaccaatgagaccttccgtggcctgcggcgcctcgagcgcctctacctgggcaagaaccgcatccgccacatccagcctggtgccttcgacacgctcgaccgcctcctggagctcaagctgcaggacaacgagctgcgggcactgcccccgctgcgcctgccccgcctgctgctgctggacctcagccacaacagcctcctggccctggagcccggcatcctggacactgccaacgtggaggcgctgcggctggctggtctggggctgcagcagctggacgaggggctcttcagccgcttgcgcaacctccacgacctggatgtgtccgacaaccagctggagcgagtgccacctgtgatccgaggcctccggggcctgacgcgcctgcggctggccggcaacacccgcattgcccagctgcggcccgaggacctggccggcctggctgccctgcaggagctggatgtgagcaacctaagcctgcaggccctgcctggcgacctctcgggcctcttcccccgcctgcggctgctggcagctgcccgcaaccccttcaactgcgtgtgccccctgagctggtttggcccctgggtgcgcgagagccacgtcacactggccagccctgaggagacgcgctgccacttcccgcccaagaacgctggccggctgctcctggagcttgactacgccgactttggctgcccagccaccaccaccacagccacagtgcccaccacgaggcccgtggtgcgggagcccacagccttgtcttctagcttggctcctacctggcttagccccacagagccggccactgaggcccccagcccgccctccactgccccaccgactgtagggcctgtcccccagccccaggactgcccaccgtccacctgcctcaatgggggcacatgccacctggggacacggcaccacctggcgtgcttgtgccccgaaggcttcacgggcctgtactgtgagagccagatggggcaggggacacggcccagccctacaccagtcacgccgaggccaccacggtccctgaccctgggcatcgagccggtgagccccacctccctgcgcgtggggctgcagcgctacctccaggggagctccgtgcagctcaggagcctccgtctcacctatcgcaacctatcgggccctgataagcggctggtgacgctgcgactgcctgcctcgctcgctgagtacacggtcacccagctgcggcccaacgccacttactccgtctgtgtcatgcctttggggcccgggcgggtgccggagggcgaggaggcctgcggggaggcccatacacccccagccgtccactccaaccacgccccagtcacccaggcccgcgagggcaacctgccgctcctcattgcgcccgccctggccgcggtgctcctggccgcgctggctgcggtgggggcagcctactgtgtgcggcgggggcgggccatggcagcagcggctcaggacaaagggcaggtggggccaggggctgggcccctggaactggagggagtgaaggtccccttggagccaggcccgaaggcaacagagggcggtggagaggccctgcccagcgggtctgagtgtgaggtgccactcatgggcttcccagggcctggcctccagtcacccctccacgcaaagccctacatctaagccagagagagacagggcagctggggccgggctctcagccagtgagatggccagccccctcctgctgccacaccacgtaagttctcagtcccaacctcggggatgtgtgcagacagggctgtgtgaccacagctgggccctgttccctctggacctcggtctcctcatctgtgagatgctgtggcccagctgacgagccctaacgtccccagaaccgagtgcctatgaggacagtgtccgccctgccctccgcaacgtgcagtccctgggcacggcgggccctgccatgtgctggtaacgcatgcctgggccctgctgggctctcccactccaggcggaccctgggggccagtgaaggaagctcccggaaagagcagagggagagcgggtaggcggctgtgtgactctagtcttggccccaggaagcgaaggaacaaaagaaactggaaaggaagatgctttaggaacatgttttgcttttttaaaatatatatatatttataagagatcctttcccatttattctgggaagatgtttttcaaactcagagacaaggactttggtttttgtaagacaaacgatgatatgaaggccttttgtaagaaaaaataaaagatgaagtgtgtttaaaaaaaaaaaaaaaaaaaaaaaaaaaaaaaaaaaaaaaaaaaaaaaaaaaaaaaaaa

SEQ ID NO: 11524 - DNA, 4137 bp, Homo sapiens
gaagtcagccacacaggataaaggagggaagggaaggagcagatcttttcggtaggaagacagattttgttgtcaggttcctgggagtgcaagagcaagtcaaaggagagagagaggagagaggaaaagccagagggagagagggggagaggggatctgttgcaggcaggggaaggcgtgacctgaatggagaatgccagccaattccagagacacacagggacctcagaacaaagataaggcatcacggacaccacaccgggcacgagctcacaggcaagtcaagctgggaggaccaaggccgggcagccgggagcacccaaggcaggaaaatgaggtggctgcttctctattatgctctgtgcttctccctgtcaaaggcttcagcccacaccgtggagctaaacaatatgtttggccagatccagtcgcctggttatccagactcctatcccagtgattcagaggtgacttggaatatcactgtcccagatgggtttcggatcaagctttacttcatgcacttcaacttggaatcctcctacctttgtgaatatgactatgtgaaggtagaaactgaggaccaggtgctggcaaccttctgtggcagggagaccacagacacagagcagactcccggccaggaggtggtcctctcccctggctccttcatgtccatcactttccggtcagatttctccaatgaggagcgtttcacaggctttgatgcccactacatggctgtggatgtggacgagtgcaaggagagggaggacgaggagctgtcctgtgaccactactgccacaactacattggcggctactactgctcctgccgcttcggctacatcctccacacagacaacaggacctgccgagtggagtgcagtgacaacctcttcactcaaaggactggggtgatcaccagccctgacttcccaaacccttaccccaagagctctgaatgcctgtataccatcgagctggaggagggtttcatggtcaacctgcagtttgaggacatatttgacattgaggaccatcctgaggtgccctgcccctatgactacatcaagatcaaagttggtccaaaagttttggggcctttctgtggagagaaagccccagaacccatcagcacccagagccacagtgtcctgatcctgttccatagtgacaactcgggagagaaccggggctggaggctctcatacagggctgcaggaaatgagtgcccagagctacagcctcctgtccatgggaaaatcgagccctcccaagccaagtatttcttcaaagaccaagtgctcgtcagctgtgacacaggctacaaagtgctgaaggataatgtggagatggacacattccagattgagtgtctgaaggatgggacgtggagtaacaagattcccacctgtaaaattgtagactgtagagccccaggagagctggaacacgggctgatcaccttctctacaaggaacaacctcaccacatacaagtctgagatcaaatactcctgtcaggagccctattacaagatgctcaacaataacacaggtatatatacctgttctgcccaaggagtctggatgaataaagtattggggagaagcctacccacctgccttccagagtgtggtcagccctcccgctccctgccaagcctggtcaagaggatcattgggggccgaaatgctgagcctggcctcttcccgtggcaggccctgatagtggtggaggacacttcgagagtgccaaatgacaagtggtttgggagtggggccctgctctctgcgtcctggatcctcacagcagctcatgtgctgcgctcccagcgtagagacaccacggtgataccagtctccaaggagcatgtcaccgtctacctgggcttgcatgatgtgcgagacaaatcgggggcagtcaacagctcagctgcccgagtggtgctccacccagacttcaacatccaaaactacaaccacgatatagctctggtgcagctgcaggagcctgtgcccctgggaccccacgttatgcctgtctgcctgccaaggcttgagcctgaaggcccggccccccacatgctgggcctggtggccggctggggcatctccaatcccaatgtgacagtggatgagatcatcagcagtggcacacggaccttgtcagatgtcctgcagtatgtcaagttacccgtggtgcctcacgctgagtgcaaaactagctatgagtcccgctcgggcaattacagcgtcacggagaacatgttctgtgctggctactacgagggcggcaaagacacgtgccttggagatagcggtggggcctttgtcatctttgatgacttgagccagcgctgggtggtgcaaggcctggtgtcctgggggggacctgaagaatgcggcagcaagcaggtctatggagtctacacaaaggtctccaattacgtggactgggtgtgggagcagatgggcttaccacaaagtgttgtggagccccaggtggaacggtgagctgacttacttcctcggggcctgcctcccctgagcgaagctacaccgcacttccgacagcacactccacattacttatcagaccatatggaatggaacacactgacctagcggtggcttctcctaccgagacagcccccaggaccctgagaggcagagtgtggtatagggaaaaggctccaggcaggagacctgtgttcctgagcttgtccaagtctctttccctgtctgggcctcactctaccgagtaatacaatgcaggagctcaaccaaggcctctgtgccaatcccagcactcctttccaggccatgcttcttaccccagtggcctttattcactcctgaccacttatcaaacccatcggtcctactgttggtataactgagcttggacctgactattagaaaatggtttctaacattgaactgaatgccgcatctgtatattttcctgctctgccttctgggactagccttggcctaatccttcctctaggagaagagcattcaggttttgggagatggctcatagccaagcccctctctcttagtgtgatcccttggagcaccttcatgcctggggtttctctcccaaaagcttcttgcagtctaagccttatcccttatgttccccattaaaggaatttcaaaagacatggagaaagttgggaaggtttgtgctgactgctgggagcagaatagccgtgggaggcccaccaagcccttaaattcccattgtcaactcagaacacatttgggcccatatgccaccctggaacaccagctgacaccatgggcgtccacacctgctgctccagacaagcacaaagcaatctttcagccttgaaatgtattatctgaaaggctacctgaagcccaggcccgaatatggggacttagtcgattacctggaaaaagaaaagacccacactgtgtcctgctgtgcttttgggcaggaaaatggaagaaagagtggggtgggcacattagaagtcacccaaatcctgccaggctgcctggcatccctggggcatgagctgggcggagaatccaccccgcaggatgttcagagggacccactccttcatttttcagagtcaaaggaatcagaggctcacccatggcaggcagtgaaaagagccaggagtcctgggttctagtccctgctctgcccccaactggctgtataacctttgaaaaatcattttctttgtctgagtctctggttctccgtcagcaacaggctggcataaggtcccctgcaggttccttctagctggagcactcagagcttccctgactgctagcagcctctctggccctcacagggctgattgttctccttctccctggagctctctctcctgaaaatctccatcagagcaaggcagccagagaagcccctgagagggaatgattgggaagtgtccactttctcaaccggctcatcaaacacactcctttgtctatgaatggcacatgtaaatgatgttatattttgtatcttttatatcatatgcttcaccattctgtaaagggcctctgcattgttgctcccatcaggggtctcaagtggaaataaaccctcgtggataaccaaaaaaaaaaaaaaaaaaaa

SEQ ID NO: 11525 - DNA, 4353 bp, Homo sapiens
gaagtcagccacacaggataaaggagggaagggaaggagcagatcttttcggtaggaagacagattttgttgtcaggttcctgggagtgcaagagcaagtcaaaggagagagagaggagagaggaaaagccagagggagagagggggagaggggatctgttgcaggcaggggaaggcgtgacctgaatggagaatgccagccaattccagagacacacagggacctcagaacaaagataaggcatcacggacaccacaccgggcacgagctcacaggcaagtcaagctgggaggaccaaggccgggcagccgggagcacccaaggcaggaaaatgaggtggctgcttctctattatgctctgtgcttctccctgtcaaaggcttcagcccacaccgtggagctaaacaatatgtttggccagatccagtcgcctggttatccagactcctatcccagtgattcagaggtgacttggaatatcactgtcccagatgggtttcggatcaagctttacttcatgcacttcaacttggaatcctcctacctttgtgaatatgactatgtgaaggtagaaactgaggaccaggtgctggcaaccttctgtggcagggagaccacagacacagagcagactcccggccaggaggtggtcctctcccctggctccttcatgtccatcactttccggtcagatttctccaatgaggagcgtttcacaggctttgatgcccactacatggctgtggatgtggacgagtgcaaggagagggaggacgaggagctgtcctgtgaccactactgccacaactacattggcggctactactgctcctgccgcttcggctacatcctccacacagacaacaggacctgccgagtggagtgcagtgacaacctcttcactcaaaggactggggtgatcaccagccctgacttcccaaacccttaccccaagagctctgaatgcctgtataccatcgagctggaggagggtttcatggtcaacctgcagtttgaggacatatttgacattgaggaccatcctgaggtgccctgcccctatgactacatcaagatcaaagttggtccaaaagttttggggcctttctgtggagagaaagccccagaacccatcagcacccagagccacagtgtcctgatcctgttccatagtgacaactcgggagagaaccggggctggaggctctcatacagggctgcaggaaatgagtgcccagagctacagcctcctgtccatgggaaaatcgagccctcccaagccaagtatttcttcaaagaccaagtgctcgtcagctgtgacacaggctacaaagtgctgaaggataatgtggagatggacacattccagattgagtgtctgaaggatgggacgtggagtaacaagattcccacctgtaaaattgtagactgtagagccccaggagagctggaacacgggctgatcaccttctctacaaggaacaacctcaccacatacaagtctgagatcaaatactcctgtcaggagccctattacaagatgctcaacaataacacaggtatatatacctgttctgcccaaggagtctggatgaataaagtattggggagaagcctacccacctgccttccagtgtgtgggctccccaagttctcccggaagctgatggccaggatcttcaatggacgcccagcccagaaaggcaccactccctggattgccatgctgtcacacctgaatgggcagcccttctgcggaggctcccttctaggctccagctggatcgtgaccgccgcacactgcctccaccagtcactcgatccggaagatccgaccctacgtgattcagacttgctcagcccttctgacttcaaaatcatcctgggcaagcattggaggctccggtcagatgaaaatgaacagcatctcggcgtcaaacacaccactctccacccccagtatgatcccaacacattcgagaatgacgtggctctggtggagctgttggagagcccagtgctgaatgccttcgtgatgcccatctgtctgcctgagggaccccagcaggaaggagccatggtcatcgtcagcggctgggggaagcagttcttgcaaaggttcccagagaccctgatggagattgaaatcccgattgttgaccacagcacctgccagaaggcttatgccccgctgaagaagaaagtgaccagggacatgatctgtgctggggagaaggaagggggaaaggacgcctgtgcgggtgactctggaggccccatggtgaccctgaatagagaaagaggccagtggtacctggtgggcactgtgtcctggggtgatgactgtgggaagaaggaccgctacggagtatactcttacatccaccacaacaaggactggatccagagggtcaccggagtgaggaactgaatttggctcctcagccccagcaccaccagctgtgggcagtcagtagcagaggacgatcctccgatgaaagcagccatttctcctttccttcctcccatcccccctccttcggcctatccattactgggcaatagagcaggtatcttcacccccttttcactctctttaaagagatggagcaagagagtggtcagaacacaggccgaatccaggctctatcacttactagtttgcagtgctgggcaggtgacttcatctcttcgaacttcagtttcttcataagatggaaatgctataccttacctacctcgtaaaagtctgatgaggaaaagattaactaatagatgcatagcacttaacagagtgcatagcatacactgttttcaataaatgcaccttagcagaaggtcgatgtgtctaccaggcagacgaagctctcttacaaacccctgcctgggtcttagcattgatcagtgacacacctctcccctcaaccttgaccatctccatctgcccttaaatgctgtatgcttttttgccaccgtgcaacttgcccaacatcaatcttcaccctcatccctaaaaaagtaaaacagacaaggttctgagtcctgtggtatgtcccctagcaaatgtaactaggaacatgcactagatgacagattgcgggagggcctgagagaagcagggacaggagggagcctggggattgtggtttgggaaggcagacacctggttctagaactagctctgcccttagccccctgtatgaccctatgcaagtcctcctccctcatctcaaagggtcctcaaagctctgacgatctaagatacaatgaagccattttccccctgataagatgaggtaaagccaatgtaaccaaaaggcaaaaattacaatcggttcaaaggaactttgatgcagacaaaatgctgctgctgctgctcctgaaatacccacccctttccactacgggtgggttcccaaggacatgggacaggcaaagtgtgagccaaaggatccttccttattcctaagcagagcatctgctctgggccctggcctccttcccttcttgggaaactgggctgcatgaggtgggccctggtagtttgtaccccaggcccctatactcttccttcctatgtccacagctgaccccaagcagccgttccccgactcctcacccctgagcctcaccctgaactccctcatcttgcaaggccataagtgttttccaagcaaaatgcctctcccatcctctctcaggaagcttctagagactttatgccctccagagctccaagatataagccctccaagggatcagaagctccaagttcctgtcttctgttttatagaaattgatcttccctgggggactttaactcttgacctgtatgcagctgttggagtaattccaggtctcttgaaaaaaaagaggaagataatggagaatgagaacatatatatatatatattaagccccaggctgaatactcagggacagcaattcacagcctgcctctggttctataaacaagtcattctacctctttgtgccctgctgtttattctgtaaggggaaggtggcaatgggacccagctccatcagacacttgtcaagctagcagaaactccattttcaatgccaaagaagaactgtaatgctgttttggaatcatcccaaggcatcccaagacaccatatcttcccatttcaagcactgcctgggcacaccccaacatcccaggctgtggtggctcctgtgggaactacctagatgaagagagtatcatttataccttctaggagctcctattgggagacatgaaacatatgtaattgactaccatgtaatagaacaaaccctgccaagtgctgctttggaaagtcatggaggtaaaagaaagaccattc

SEQ ID NO: 11526 - DNA, 3512 bp, Homo sapiens
gacatggcgagtgtagtgctgccgagcggatcccagtgtgcggcggcagcggcggcggcggcgcctcccgggctccggctccggcttctgctgttgctcttctccgccgcggcactgatccccacaggtgatgggcagaatctgtttacgaaagacgtgacagtgatcgagggagaggttgcgaccatcagttgccaagtcaataagagtgacgactctgtgattcagctactgaatcccaacaggcagaccatttatttcagggacttcaggcctttgaaggacagcaggtttcagttgctgaatttttctagcagtgaactcaaagtatcattgacaaacgtctcaatttctgatgaaggaagatacttttgccagctctataccgatcccccacaggaaagttacaccaccatcacagtcctggtcccaccacgtaatctgatgatcgatatccagagagacactgcggtggaaggtgaggagattgaagtcaactgcactgctatggccagcaagccagccacgactatcaggtggttcaaagggaacacagagctaaaaggcaaatcggaggtggaagagtggtcagacatgtacactgtgaccagtcagctgatgctgaaggtgcacaaggaggacgatggggtcccagtgatctgccaggtggagcaccctgcggtcactggaaacctgcagacccagcggtatctagaagtacagtataagccacaagtgcacattcagatgacttatcctctacaaggcttaacccgggaaggggacgcgcttgagttaacatgtgaagccatcgggaagccccagcctgtgatggtaacttgggtgagagtcgatgatgaaatgcctcaacacgccgtactgtctgggcccaacctgttcatcaataacctaaacaaaacagataatggtacataccgctgtgaagcttcaaacatagtggggaaagctcactcggattatatgctgtatgtatacgatccccccacaactatccctcctcccacaacaaccaccaccaccaccaccaccaccaccaccaccatccttaccatcatcacagattcccgagcaggtgaagaaggctcgatcagggcagtggatcatgccgtgatcggtggcgtcgtggcggtggtggtgttcgccatgctgtgcttgctcatcattctggggcgctattttgccagacataaaggtacatacttcactcatgaagccaaaggagccgatgacgcagcagacgcagacacagctataatcaatgcagaaggaggacagaacaactccgaagaaaagaaagagtacttcatctagatcagcctttttgtttcaatgaggtgtccaactggccctatttagatgataaagagacagtgatattggaacttgcgagaaattcgtgtgtttttttatgaatgggtggaaaggtgtgagactgggaaggcttgggatttgctgtgtaaaaaaaaaaaaaaatgttctttggaaagtacactctgctgtttgacacctcttttttcgtttgtttgtttgtttaatttttatttcttcctaccaagtcaaacttggatacttggatttagtttcagtagattgcagaaaattctgtgccttgttttttgtttgtttgttgcgttcctttcttttccccctttgtgcacatttatttcctccctctaccccaatttcggattttttccaaaatctcccattttggaatttgcctgctgggattccttagactcttttccttcccttttctgttctagttttttacttttgtttatttttatggtaactgctttctgttccaaattcagtttcataaaaggagaaccagcacagcttaggatttcatagttcagaatttagtgtatccataatgcattcttctctgttgtcgtaaagatttgggtgaacaaacaatgaaaactctttgctgctgcccatgtttcaaatacttagagcagtgaagactagaaaattagactgtgattcagaaaatgttctgtttgctgtggaactacattactgtacagggttatctgcaagtgaggtgtgtcacaatgagattgaatttcactgtctttaattctgtatctgtagacggctcagtatagataccctacgctgtccagaaaggtttggggcagaaaggactcctcctttttccatgccctaaacagacctgacaggtgaggtctgttccttttatataagtggacaaattttgagttgccacaggaggggaagtagggaggggggaaatacagttctgctctggttgtttctgttccaaatgattccatccacctttcccaatcggccttacttctcactaatttgtaggaaaaagcaagttcgtctgttgtgcgaatgactgaatgggacagagttgattttttttttttttttcctttgtgcttagttaggaaggcagtaggatgtggcctgcatgtactgtatattacagatatttgtcatgctgggatttccaactcgaatctgtgtgaaactttcattccttcagatttggcttgacaaaggcaggaggtacaaaagaagggctggtattgttctcacactggtctgctgtcgctctcagttctcgataggtcagagcagaggtggaaaaacagcatgtacggattttcagttacttaatcaaaactcaaatgtgagtgtttttatctttttacctttcatacactagccttggcctctttcctcagccttaagaaccatctgccaaaaattactgatcctcgcatgatggcagccatagtgcatagctactaaaatcagtgaccttgaacatatcttagatggggagcctcgggaaaaggtagaggagtcacgttaccatttacatgttttaaagaaagaagtgtggggattttcactgaaacgtctaggaaatctagaagtagtcctgaaggacagaaactaaactcttaccatatgtttggtaagactccagactccagctaacagtccctatggaaagatggcatcaaaaaagatagatctatatatatatataaatatatattctattacattttcagtgagtaattttggattttgcaaggtgcatttttactattgttacattatgtggaaaacttatgctgatttatttaagggggaaaaagtgtcaactctttgttatttgaaaacatgtttatttttcttgtctttattttaacctttgatagaaccattgcaatatgggggccttttgggaacggactggtatgtaaaagaaaatccattatcgagcagcattttatttacccctcccctatccctaggcacttaaccaagacaaaaagccacaatgaacatccctttttcaatgaattttataatctgcagctctattccgagcccttagcacccattccgaccatagtataatcatatcaaagggtgagaatcatttagcatgttgttgaaaggttttttttcagttgttctttttagaaaaaaag

SEQ ID NO: 11527 - DNA, 8833 bp, Homo sapiens
agctcacagctattgtggtgggaaagggagggtggttggtggatgtcacagcttgggctttatctcccccagcagtggggactccacagcccctgggctacataacagcaagacagtccggagctgtagcagacctgattgagcctttgcagcagctgagagcatggcctagggtgggcggcaccattgtccagcagctgagtttcccagggaccttggagatagccgcagccctcatttgcaggggaagatgattcctgccagatttgccggggtgctgcttgctctggccctcattttgccagggaccctttgtgcagaaggaactcgcggcaggtcatccacggcccgatgcagccttttcggaagtgacttcgtcaacacctttgatgggagcatgtacagctttgcgggatactgcagttacctcctggcagggggctgccagaaacgctccttctcgattattggggacttccagaatggcaagagagtgagcctctccgtgtatcttggggaattttttgacatccatttgtttgtcaatggtaccgtgacacagggggaccaaagagtctccatgccctatgcctccaaagggctgtatctagaaactgaggctgggtactacaagctgtccggtgaggcctatggctttgtggccaggatcgatggcagcggcaactttcaagtcctgctgtcagacagatacttcaacaagacctgcgggctgtgtggcaactttaacatctttgctgaagatgactttatgacccaagaagggaccttgacctcggacccttatgactttgccaactcatgggctctgagcagtggagaacagtggtgtgaacgggcatctcctcccagcagctcatgcaacatctcctctggggaaatgcagaagggcctgtgggagcagtgccagcttctgaagagcacctcggtgtttgcccgctgccaccctctggtggaccccgagccttttgtggccctgtgtgagaagactttgtgtgagtgtgctggggggctggagtgcgcctgccctgccctcctggagtacgcccggacctgtgcccaggagggaatggtgctgtacggctggaccgaccacagcgcgtgcagcccagtgtgccctgctggtatggagtataggcagtgtgtgtccccttgcgccaggacctgccagagcctgcacatcaatgaaatgtgtcaggagcgatgcgtggatggctgcagctgccctgagggacagctcctggatgaaggcctctgcgtggagagcaccgagtgtccctgcgtgcattccggaaagcgctaccctcccggcacctccctctctcgagactgcaacacctgcatttgccgaaacagccagtggatctgcagcaatgaagaatgtccaggggagtgccttgtcacaggtcaatcacacttcaagagctttgacaacagatacttcaccttcagtgggatctgccagtacctgctggcccgggattgccaggaccactccttctccattgtcattgagactgtccagtgtgctgatgaccgcgacgctgtgtgcacccgctccgtcaccgtccggctgcctggcctgcacaacagccttgtgaaactgaagcatggggcaggagttgccatggatggccaggacgtccagctccccctcctgaaaggtgacctccgcatccagcatacagtgacggcctccgtgcgcctcagctacggggaggacctgcagatggactgggatggccgcgggaggctgctggtgaagctgtcccccgtctatgccgggaagacctgcggcctgtgtgggaattacaatggcaaccagggcgacgacttccttaccccctctgggctggcggagccccgggtggaggacttcgggaacgcctggaagctgcacggggactgccaggacctgcagaagcagcacagcgatccctgcgccctcaacccgcgcatgaccaggttctccgaggaggcgtgcgcggtcctgacgtcccccacattcgaggcctgccatcgtgccgtcagcccgctgccctacctgcggaactgccgctacgacgtgtgctcctgctcggacggccgcgagtgcctgtgcggcgccctggccagctatgccgcggcctgcgcggggagaggcgtgcgcgtcgcgtggcgcgagccaggccgctgtgagctgaactgcccgaaaggccaggtgtacctgcagtgcgggaccccctgcaacctgacctgccgctctctctcttacccggatgaggaatgcaatgaggcctgcctggagggctgcttctgccccccagggctctacatggatgagaggggggactgcgtgcccaaggcccagtgcccctgttactatgacggtgagatcttccagccagaagacatcttctcagaccatcacaccatgtgctactgtgaggatggcttcatgcactgtaccatgagtggagtccccggaagcttgctgcctgacgctgtcctcagcagtcccctgtctcatcgcagcaaaaggagcctatcctgtcggccccccatggtcaagctggtgtgtcccgctgacaacctgcgggctgaagggctcgagtgtaccaaaacgtgccagaactatgacctggagtgcatgagcatgggctgtgtctctggctgcctctgccccccgggcatggtccggcatgagaacagatgtgtggccctggaaaggtgtccctgcttccatcagggcaaggagtatgcccctggagaaacagtgaagattggctgcaacacttgtgtctgtcgggaccggaagtggaactgcacagaccatgtgtgtgatgccacgtgctccacgatcggcatggcccactacctcaccttcgacgggctcaaatacctgttccccggggagtgccagtacgttctggtgcaggattactgcggcagtaaccctgggacctttcggatcctagtggggaataagggatgcagccacccctcagtgaaatgcaagaaacgggtcaccatcctggtggagggaggagagattgagctgtttgacggggaggtgaatgtgaagaggcccatgaaggatgagactcactttgaggtggtggagtctggccggtacatcattctgctgctgggcaaagccctctccgtggtctgggaccgccacctgagcatctccgtggtcctgaagcagacataccaggagaaagtgtgtggcctgtgtgggaattttgatggcatccagaacaatgacctcaccagcagcaacctccaagtggaggaagaccctgtggactttgggaactcctggaaagtgagctcgcagtgtgctgacaccagaaaagtgcctctggactcatcccctgccacctgccataacaacatcatgaagcagacgatggtggattcctcctgtagaatccttaccagtgacgtcttccaggactgcaacaagctggtggaccccgagccatatctggatgtctgcatttacgacacctgctcctgtgagtccattggggactgcgcctgcttctgcgacaccattgctgcctatgcccacgtgtgtgcccagcatggcaaggtggtgacctggaggacggccacattgtgcccccagagctgcgaggagaggaatctccgggagaacgggtatgagtgtgagtggcgctataacagctgtgcacctgcctgtcaagtcacgtgtcagcaccctgagccactggcctgccctgtgcagtgtgtggagggctgccatgcccactgccctccagggaaaatcctggatgagcttttgcagacctgcgttgaccctgaagactgtccagtgtgtgaggtggctggccggcgttttgcctcaggaaagaaagtcaccttgaatcccagtgaccctgagcactgccagatttgccactgtgatgttgtcaacctcacctgtgaagcctgccaggagccgggaggcctggtggtgcctcccacagatgccccggtgagccccaccactctgtatgtggaggacatctcggaaccgccgttgcacgatttctactgcagcaggctactggacctggtcttcctgctggatggctcctccaggctgtccgaggctgagtttgaagtgctgaaggcctttgtggtggacatgatggagcggctgcgcatctcccagaagtgggtccgcgtggccgtggtggagtaccacgacggctcccacgcctacatcgggctcaaggaccggaagcgaccgtcagagctgcggcgcattgccagccaggtgaagtatgcgggcagccaggtggcctccaccagcgaggtcttgaaatacacactgttccaaatcttcagcaagatcgaccgccctgaagcctcccgcatcaccctgctcctgatggccagccaggagccccaacggatgtcccggaactttgtccgctacgtccagggcctgaagaagaagaaggtcattgtgatcccggtgggcattgggccccatgccaacctcaagcagatccgcctcatcgagaagcaggcccctgagaacaaggccttcgtgctgagcagtgtggatgagctggagcagcaaagggacgagatcgttagctacctctgtgaccttgcccctgaagcccctcctcctactctgccccccgacatggcacaagtcactgtgggcccggggctcttgggggtttcgaccctggggcccaagaggaactccatggttctggatgtggcgttcgtcctggaaggatcggacaaaattggtgaagccgacttcaacaggagcaaggagttcatggaggaggtgattcagcggatggatgtgggccaggacagcatccacgtcacggtgctgcagtactcctacatggtgactgtggagtaccccttcagcgaggcacagtccaaaggggacatcctgcagcgggtgcgagagatccgctaccagggcggcaacaggaccaacactgggctggccctgcggtacctctctgaccacagcttcttggtcagccagggtgaccgggagcaggcgcccaacctggtctacatggtcaccggaaatcctgcctctgatgagatcaagaggctgcctggagacatccaggtggtgcccattggagtgggccctaatgccaacgtgcaggagctggagaggattggctggcccaatgcccctatcctcatccaggactttgagacgctcccccgagaggctcctgacctggtgctgcagaggtgctgctccggagaggggctgcagatccccaccctctcccctgcacctgactgcagccagcccctggacgtgatccttctcctggatggctcctccagtttcccagcttcttattttgatgaaatgaagagtttcgccaaggctttcatttcaaaagccaatatagggcctcgtctcactcaggtgtcagtgctgcagtatggaagcatcaccaccattgacgtgccatggaacgtggtcccggagaaagcccatttgctgagccttgtggacgtcatgcagcgggagggaggccccagccaaatcggggatgccttgggctttgctgtgcgatacttgacttcagaaatgcatggtgccaggccgggagcctcaaaggcggtggtcatcctggtcacggacgtctctgtggattcagtggatgcagcagctgatgccgccaggtccaacagagtgacagtgttccctattggaattggagatcgctacgatgcagcccagctacggatcttggcaggcccagcaggcgactccaacgtggtgaagctccagcgaatcgaagacctccctaccatggtcaccttgggcaattccttcctccacaaactgtgctctggatttgttaggatttgcatggatgaggatgggaatgagaagaggcccggggacgtctggaccttgccagaccagtgccacaccgtgacttgccagccagatggccagaccttgctgaagagtcatcgggtcaactgtgaccgggggctgaggccttcgtgccctaacagccagtcccctgttaaagtggaagagacctgtggctgccgctggacctgcccctgcgtgtgcacaggcagctccactcggcacatcgtgacctttgatgggcagaatttcaagctgactggcagctgttcttatgtcctatttcaaaacaaggagcaggacctggaggtgattctccataatggtgcctgcagccctggagcaaggcagggctgcatgaaatccatcgaggtgaagcacagtgccctctccgtcgagctgcacagtgacatggaggtgacggtgaatgggagactggtctctgttccttacgtgggtgggaacatggaagtcaacgtttatggtgccatcatgcatgaggtcagattcaatcaccttggtcacatcttcacattcactccacaaaacaatgagttccaactgcagctcagccccaagacttttgcttcaaagacgtatggtctgtgtgggatctgtgatgagaacggagccaatgacttcatgctgagggatggcacagtcaccacagactggaaaacacttgttcaggaatggactgtgcagcggccagggcagacgtgccagcccatcctggaggagcagtgtcttgtccccgacagctcccactgccaggtcctcctcttaccactgtttgctgaatgccacaaggtcctggctccagccacattctatgccatctgccagcaggacagttgccaccaggagcaagtgtgtgaggtgatcgcctcttatgcccacctctgtcggaccaacggggtctgcgttgactggaggacacctgatttctgtgctatgtcatgcccaccatctctggtctacaaccactgtgagcatggctgtccccggcactgtgatggcaacgtgagctcctgtggggaccatccctccgaaggctgtttctgccctccagataaagtcatgttggaaggcagctgtgtccctgaagaggcctgcactcagtgcattggtgaggatggagtccagcaccagttcctggaagcctgggtcccggaccaccagccctgtcagatctgcacatgcctcagcgggcggaaggtcaactgcacaacgcagccctgccccacggccaaagctcccacgtgtggcctgtgtgaagtagcccgcctccgccagaatgcagaccagtgctgccccgagtatgagtgtgtgtgtgacccagtgagctgtgacctgcccccagtgcctcactgtgaacgtggcctccagcccacactgaccaaccctggcgagtgcagacccaacttcacctgcgcctgcaggaaggaggagtgcaaaagagtgtccccaccctcctgccccccgcaccgtttgcccacccttcggaagacccagtgctgtgatgagtatgagtgtgcctgcaactgtgtcaactccacagtgagctgtccccttgggtacttggcctcaactgccaccaatgactgtggctgtaccacaaccacctgccttcccgacaaggtgtgtgtccaccgaagcaccatctaccctgtgggccagttctgggaggagggctgcgatgtgtgcacctgcaccgacatggaggatgccgtgatgggcctccgcgtggcccagtgctcccagaagccctgtgaggacagctgtcggtcgggcttcacttacgttctgcatgaaggcgagtgctgtggaaggtgcctgccatctgcctgtgaggtggtgactggctcaccgcggggggactcccagtcttcctggaagagtgtcggctcccagtgggcctccccggagaacccctgcctcatcaatgagtgtgtccgagtgaaggaggaggtctttatacaacaaaggaacgtctcctgcccccagctggaggtccctgtctgcccctcgggctttcagctgagctgtaagacctcagcgtgctgcccaagctgtcgctgtgagcgcatggaggcctgcatgctcaatggcactgtcattgggcccgggaagactgtgatgatcgatgtgtgcacgacctgccgctgcatggtgcaggtgggggtcatctctggattcaagctggagtgcaggaagaccacctgcaacccctgccccctgggttacaaggaagaaaataacacaggtgaatgttgtgggagatgtttgcctacggcttgcaccattcagctaagaggaggacagatcatgacactgaagcgtgatgagacgctccaggatggctgtgatactcacttctgcaaggtcaatgagagaggagagtacttctgggagaagagggtcacaggctgcccaccctttgatgaacacaagtgtctggctgagggaggtaaaattatgaaaattccaggcacctgctgtgacacatgtgaggagcctgagtgcaacgacatcactgccaggctgcagtatgtcaaggtgggaagctgtaagtctgaagtagaggtggatatccactactgccagggcaaatgtgccagcaaagccatgtactccattgacatcaacgatgtgcaggaccagtgctcctgctgctctccgacacggacggagcccatgcaggtggccctgcactgcaccaatggctctgttgtgtaccatgaggttctcaatgccatggagtgcaaatgctcccccaggaagtgcagcaagtgaggctgctgcagctgcatgggtgcctgctgctgcctgccttggcctgatggccaggccagagtgctgccagtcctctgcatgttctgctcttgtgcccttctgagcccacaataaaggctgagctcttatcttgcaaaaggc

SEQ ID NO: 11528 - DNA, 5890 bp, Homo sapiens
ggcagttggtgaaactcctctgtctcccgctcatcttttcattgctcgttcccctccttcccgcagacacccggacctcccctgggcgccagctccgcggctccaacgggtccagaaacaagccggattttttttttttttcttcctggaaattggctttggtgtgtgttgccctacctccctcctccccctcccacccacagcccccccccggccttttttttttttttttttttttgagacatggcccgggcagtggctcctggaagaggaacaagtgtgggaaaagggagaggaagccggagctaaatgacaggatgcaggcgacttgagacacaaaaagagaagcgttcctctcggatccaggcattgcctcgctgctttcttttctccaagacgggctgaggattgtacagctctaggcggagttggggctcttcggatcgcttagattctcctctttgctgcatttccccccacgtcctcgttctcccgcgtctgcctgcggacccggagaagggagaatggagagggggctgccgctcctctgcgccgtgctcgccctcgtcctcgccccggccggcgcttttcgcaacgataaatgtggcgatactataaaaattgaaagccccgggtaccttacatctcctggttatcctcattcttatcacccaagtgaaaaatgcgaatggctgattcaggctccggacccataccagagaattatgatcaacttcaaccctcacttcgatttggaggacagagactgcaagtatgactacgtggaagtcttcgatggagaaaatgaaaatggacattttaggggaaagttctgtggaaagatagcccctcctcctgttgtgtcttcagggccatttctttttatcaaatttgtctctgactacgaaacacatggtgcaggattttccatacgttatgaagttttcaagagaggtcctgaatgttcccagaactacacaacacctagtggagtgataaagtcccccggattccctgaaaaatatcccaacagccttgaatgcacttatattgtctttgcgccaaagatgtcagagattatcctggaatttgaaagctttgacctggagcctgactcaaatcctccaggggggatgttctgtcgctacgaccggctagaaatctgggatggattccctgatgttggccctcacattgggcgttactgtggacagaaaacaccaggtcgaatccgatcctcatcgggcattctctccatggttttttacaccgacagcgcgatagcaaaagaaggtttctcagcaaactacagtgtcttgcagagcagtgtctcagaagatttcaaatgtatggaagctctgggcatggaatcaggagaaattcattctgaccagatcacagcttcttcccagtatagcaccaactggtctgcagagcgctcccgcctgaactaccctgagaatgggtggactcccggagaggattcctaccgagagtggatacaggtagacttgggccttctgcgctttgtcacggctgtcgggacacagggcgccatttcaaaagaaaccaagaagaaatattatgtcaagacttacaagatcgacgttagctccaacggggaagactggatcaccataaaagaaggaaacaaacctgttctctttcagggaaacaccaaccccacagatgttgtggttgcagtattccccaaaccactgataactcgatttgtccgaatcaagcctgcaacttgggaaactggcatatctatgagatttgaagtatacggttgcaagataacagattatcctcgctctggaatgttgggtatggtgtctggacttatttctgactcccagatcacatcatccaaccaaggggacagaaactggatgcctgaaaacatccgcctggtaaccagtcgctctggctgggcacttccacccgcacctcattcctacatcaatgagtggctccaaatagacctgggggaggagaagatcgtgaggggcatcatcattcagggtgggaagcaccgagagaacaaggtgttcatgaggaagttcaagatcgggtacagcaacaacggctcggactggaagatgatcatggatgacagcaaacgcaaggcgaagtcttttgagggcaacaacaactatgatacacctgagctgcggacttttccagctctctccacgcgattcatcaggatctaccccgagagagccactcatggcggactggggctcagaatggagctgctgggctgtgaagtggaagcccctacagctggaccgaccactcccaacgggaacttggtggatgaatgtgatgacgaccaggccaactgccacagtggaacaggtgatgacttccagctcgcaggtggcaccactgtgctggccacagaaaagcccacggtcatagacagcaccatacaatcagagtttccaacatatggttttaactgtgaatttggctggggctctcacaagaccttctgccactgggaacatgacaatcacgtgcagctcaagtggagtgtgttgaccagcaagacgggacccattcaggatcacacaggagatggcaacttcatctattcccaagctgacgaaaatcagaagggcaaagtggctcgcctggtgagccctgtggtttattcccagaactctgcccactgcatgaccttctggtatcacatgtctgggtcccacgtcggcacactcagggtcaaactgcgctaccagaagccagaggagtacgatcagctggtctggatggccattggacaccaaggtgaccactggaaggaagggcgtgtcttgctccacaagtctctgaaactttatcaggtgattttcgagggcgaaatcggaaaaggaaaccttggtgggattgctgtggatgacattagtattaataaccacatttcacaagaagattgtgcaaaaccagcagacctggataaaaagaacccagaaattaaaattgatgaaacagggagcgcgccaggatacgaaggtgaaggagaaggtgacaagaacatctccaggaagccaggcaatgtgttgaagaccttagaccccatcctcatcaccatcatagccatgagtgccctgggggtcctcctgggggctgtctgtggggtcgtgctgtactgtgcctgttggcataatgggatgtcagaaagaaacttgtctgccctggagaactataactttgaacttgtggatggtgtgaagttgaaaaaagacaaactgaatacacagagtacttattcggaggcatgaaggcagacagagatgaaaagacagtcaaaggacggaagtggaaggacgggagtgagctggggagctgttgatctttcactatacaggctgggaagtgtgttgatgaccactgagccaggcttttctcaggagcttcaatgagtatggccgacagacatggacaaggagctgtgttcaccatcggactcatgtgcagtcagcttttttcctgttggtttcatttgaataatcagatgctggtgttgagaccaagtatgattgacataatcattcatttcgacccctcctgcccctctctctctctctcctctcccctttgtggattctttttggaaactgagcgaaatccaagatgctggcaccaagcgtattccgtgtggccctttggatggacatgctacctgaaacccagtgcccagaatatactagaatcaccgcatttcagtggactcctgaagttgtacttgtgtataattgcccgcgtcgtgcataggcaaagaaggattaggctgttttctttttaaagtactgtagcctcagtactggtgtagtgtgtcagctctgtttacgaagcaatactgtccagttttcttgctgtttttccggtgttgtactaaacctcgtgcttgtgaactccatacagaaaacggtgccatccctgaacacggctggccactgggtatactgctgacaaccgcaacaacaaaaacacaaatccttggcactggctagtctatgtcctctcaagtgcctttttgtttgtactggttcattgtgttacattaacgacccactctgcttcttgctggtgaaagccctgctctttaatcaaactctggtggcccactgactaagaagaaagtttattttcgtgtgagatgccagcccctccgggcaggcaagggctctgaagatttggcaacgtggcttaattgttctgctttttctgtagttcaatttcatgtttcttgacccttttgtataaagctacaatattctctcttattgttctttcatatggaatgtattttcaaatgtaaactctcttctctttctctctcctatctctctgtcttttttctctcttagaattggaggatttgccattgtccaggaaagaaacttgcagctttaacctgctgggaatggcaaacgattttactagactttatgtttaaaaataaataaataagggaaattcctaactttgccctccaaagtctaactttggttttcttgttaactggttaaagtgacagtatcttttttccttatctattctattcaaaatgacctttgatagaaatgttggcatttagtagaaatagtgataagttgaggaaagaaataatacaaattggctttcaagtgagacccaaaggaagaactggataaaatcttccaaatccaaaagcatgagatttttctatccaaatatgcaaaaatgacccaagagaactttcttattttgctactgagtcacacaagggaagtggaaggaagaacagttaatttaagaatgaaactataaatcctgatgcctgggggtcaagtattttaagataagagggggaaaaacacatagagtcaaacaaatgttttaaaaattcataacagcaaccttgaaaaaatagacttaaatgaatgcttctagaaacttccagcggctcacaaagaataagcctgccttagggctggcaacatctaagcctctaacagcacagggaagcaaatatcttaccaggcagcctatgaattaacccaaagaagctttggttggttttggtggatttttatcatgccatgttggacatgagattttttagatcttccttcccacattgctagacgtctcactcaaagacatttgttgggagtcacatttgcatcatagacgagacagtccattcatcttagttaaattggattgagaatgccttttgtttccaggaaaatattgatcaccatgaaagaagaatagttttttgtccccagagacattcatttagttgatataatcctaccagaaggaaagcactaagaaacactcgtttgttgtttttaaaggcaacagacttaaagttgtcctcagccaaggaaaaatgatactgcaactttaaaatttaaagtatcttgcactgataaatatatttaaaaattatatgtctataaagttattaatttgtaaaggcagtgttacaaaatgttcagtttatattgttttagattgttttgtaatttttaaaggtgtaaaataacatattttttctttatggaaatctataaaactttctgtagtaaaatgttttcattttactggtatattattgcttcatgttttgtaccatcataagattttgtgcagatttttttacagaaattattattttctatgacaatatgacacttgtaaattgttgtttcaaaatgaacagcgaagccttaactttaaatgacatttgtattctcagacactgagtagcataaaaaccacatagaactgaactgtaacttaaattccaaactatgactactacattccaaagaaacagttgaattaaacattttcataaaataaaaaaaaaaaaaaaaaa

SEQ ID NO: 11529 - DNA, 2248 bp, Homo sapiens
atgttccttctcctcgccctcctcactgagcttggaagactgcaagcccacgaaggttctgaaggaatatttctgcatgtcacagttccacggaagattaagtcaaatgacagtgaagtttcagagaggaagatgatttacatcattacaattgatggacaaccttacactctacatctcggaaaacaatcattcttaccccagaactttttggtttatacatataatgaaactggatctttgcattctgtgtctccatattttatgatgcattgccattaccaaggatatgctgccgaatttccaaattcatttgtgacactcagtatatgttctggtctcaggggatttctccagtttgaaaatatcagttatggaattgaaccagtagaatcttcagcaagatttgagcatataatttatcaaatgaaaaataatgatccaaatgtatccattttagcagtaaattacagtcatatttggcagaaagaccagccctacaaagttcctttaaactcacagataaaaaatctttcaaaactattaccccaatatctggaaatatacattatagtggaaaaagctttgtatgattatatgggatctgaaatgatggctgtaacacaaaaaattgtccaggttattgggcttgtcaacactatgtttacccagttcaaattgactgttatactgtcttccttggaattgtggtcaaatgaaaaccagatttccaccagtggggatgctgatgatatattacaaagatttttggcatggaaacgggactatctcatcctacggccccatgacatagcatacttacttgtttacaggaaacatcctaaatatgtgggagcaacatttcctggcaccgtatgcaataaaagctatgatgcaggtattgctatgtatccagatgcaataggtttggagggattttcggttattatagctcaactgcttggccttaatgtaggattaacatatgatgacatcactcagtgtttctgtctgagagctacatgcatcatgaatcatgaagcagtgagtgccagtggtagaaagatttttagcaactgcagcatgcacgactatagatattttgtttcaaaatttgagactaaatgccttcagaagctttcaaatttgcaaccattacatcaaaatcaaccagtgtgtggtaatgggattttggaatccaatgaagaatgtgactgtggtaataaaaatgaatgtcaatttaagaagtgctgtgattataacacatgtaaactgaagggctcagtaaaatgtggttctggaccatgttgtacatcaaagtgtgagttgtcaatagcaggcactccatgtagaaagagtattgatccagagtgtgattttacagagtactgcaatggaacctctagtaattgtgttcctgacacttatgcattgaatggccgtttgtgcaagttgggaactgcctattgctataacggacaatgtcaaactactgataaccagtgtgccaagatatttggaaaaggtgctcaaggtgctccatttgcctgttttaaagaagttaattctctgcatgaaagatctgaaaactgtggttttaaaaattcacaaccattaccttgtgaacggaaggatgttctctgtggaaaattagcttgtgttcagccacataaaaatgctaataaaagtgacgctcaatctacagtttattcatatattcaagaccatgtatgtgtatctatagccactggttcctccatgagatcagatggaacagacaatgcctatgtggctgatggcaccatgtgtggtccagaaatgtactgtgtaaataaaacctgcagaaaagttcatttaatgggatataactgtaatgccaccacaaaatgcaaagggaaagggatatgtaataattttggtaattgtcaatgcttccctggacatagacctccagattgtaaattccagtttggttccccagggggtagtattgatgatggaaattttcagaaatctggtgacttttatactgaaaaaggctacaatacacactggaacaactggtttattctgagtttctgcatttttctgccgtttttcatagttttcaccactgtgatctttaaaagaaatgaaataagtaaatcatgtaacagagagaatgcagagtataatcgtaattcatccgttgtatcagaaagcgatgacgtgggacattaatattgcacagaacttccatagcaaataa

SEQ ID NO: 11530 - DNA, 9962 bp, Homo sapiens
cagtttggagctcagtcttccaccaaaggccgttcagttctcctgggctccagcctcctgcaaggactgcaagagttttcctccgcagctctgagtctccacttttttggtggagaaaggctgcaaaaagaaaaagagacgcagtgagtgggaaaagtatgcatcctattcaaacctaattgaatcgaggagcccagggacacacgccttcaggtttgctcaggggttcatatttggtgcttagacaaattcaaaatgaggaaacatcggcacttgcccttagtggccgtcttttgcctctttctctcaggctttcctacaactcatgcccagcagcagcaagcagatgtcaaaaatggtgcggctgctgatataatatttctagtggattcctcttggaccattggagaggaacatttccaacttgttcgagagtttctatatgatgttgtaaaatccttagctgtgggagaaaatgatttccattttgctctggtccagttcaacggaaacccacataccgagttcctgttaaatacgtatcgtactaaacaagaagtcctttctcatatttccaacatgtcttatattgggggaaccaatcagactggaaaaggattagaatacataatgcaaagccacctcaccaaggctgctggaagccgggccggtgacggagtccctcaggttatcgtagtgttaactgatggacactcgaaggatggccttgctctgccctcagcggaacttaagtctgctgatgttaacgtgtttgcaattggagttgaggatgcagatgaaggagcgttaaaagaaatagcaagtgaaccgctcaatatgcatatgttcaacctagagaattttacctcacttcatgacatagtaggaaacttagtgtcctgtgtgcattcatccgtgagtccagaaagggctggggacacggaaacccttaaagacatcacagcacaagactctgctgacattattttccttattgatggatcaaacaacaccggaagtgtcaatttcgcagtcattctcgacttccttgtaaatctccttgagaaactcccaattggaactcagcagatccgagtgggggtggtccagtttagcgatgagcccagaaccatgttctccttggacacctactccaccaaggcccaggttctgggtgcagtgaaagccctcgggtttgctggtggggagttggccaatatcggcctcgcccttgatttcgtggtggagaaccacttcacccgggcagggggcagccgcgtggaggaaggggttccccaggtgctggtcctcataagtgccgggccttctagtgacgagattcgctacggggtggtagcactgaagcaggctagcgtgttctcattcggccttggagcccaggccgcctccagggcagagcttcagcacatagctaccgatgacaacttggtgtttactgtcccggaattccgtagctttggggacctccaggagaaattactgccgtacattgttggcgtggcccaaaggcacattgtcttgaaaccgccaaccattgtcacacaagtcattgaagtcaacaagagagacatagtcttcctggtggatggctcatctgcactgggactggccaacttcaatgccatccgagacttcattgctaaagtcatccagaggctggaaatcggacaggatcttatccaggtggcagtggcccagtatgcagacactgtgaggcctgaattttatttcaatacccatccaacaaaaagggaagtcataaccgctgtgcggaaaatgaagcccctggacggctcggccctgtacacgggctctgctctagactttgttcgtaacaacctattcacgagttcagccggctaccgggctgccgaggggattcctaagcttttggtgctgatcacaggtggtaagtccctagatgaaatcagccagcctgcccaggagctgaagagaagcagcataatggcctttgccattgggaacaagggtgccgatcaggctgagctggaagagatcgctttcgactcctccctggtgttcatcccagctgagttccgagccgccccattgcaaggcatgctgcctggcttgctggcacctctcaggaccctctctggaacccctgaagagagcaagcgagacattctgttcctctttgacggctcagccaatcttgtgggccagttccctgttgtccgtgactttctctacaagattatcgatgagctcaatgtgaagccagaggggacccgaattgcggtggctcagtacagcgatgatgtcaaggtggagtcccgttttgatgagcaccagagtaagcctgagatcctgaatcttgtgaagagaatgaagatcaagacgggcaaagccctcaacctgggctacgcgctggactatgcacagaggtacatttttgtgaagtctgctggcagccggatcgaggatggagtgcttcagttcctggtgctgctggtcgcaggaaggtcatctgaccgtgtggatgggccagcaagtaacctgaagcagagtggggttgtgcctttcatcttccaagccaagaacgcagaccctgctgagttagagcagatcgtgctgtctccagcgtttatcctggctgcagagtcgcttcccaagattggagatcttcatccacagatagtgaatctcttaaaatcagtgcacaacggagcaccagcaccagtttcaggtgaaaaggacgtggtgtttctgcttgatggctctgagggcgtcaggagcggcttccctctgttgaaagagtttgtccagagagtggtggaaagcctggatgtgggccaggaccgggtccgcgtggccgtggtgcagtacagcgaccggaccaggcccgagttctacctgaattcatacatgaacaagcaggacgtcgtcaacgctgtccgccagctgaccctgctgggagggccgacccccaacaccggggccgccctggagtttgtcctgaggaacatcctggtcagctctgcgggaagcaggataacagaaggtgtgccccagctgctgatcgtcctcacggccgacaggtctggggatgatgtgcggaacccctccgtggtcgtgaagaggggtggggctgtgcccattggcattggcatcgggaacgctgacatcacagagatgcagaccatctccttcatcccggactttgccgtggccattcccacctttcgccagctggggaccgtccaacaggtcatctctgagagggtgacccagctcacccgcgaggagctgagcaggctgcagccggtgttgcagcctctaccgagcccaggtgttggtggcaagagggacgtggtctttctcatcgatgggtcccaaagtgccgggcctgagttccagtacgttcgcaccctcatagagaggctggttgactacctggacgtgggctttgacaccacccgggtggctgtcatccagttcagcgatgaccccaaggtggagttcctgctgaacgcccattccagcaaggatgaagtgcagaacgcggtgcagcggctgaggcccaagggagggcggcagatcaacgtgggcaatgccctggagtacgtgtccaggaacatcttcaagaggcccctggggagccgcattgaagagggcgtcccgcagttcctggtcctcatctcgtctggaaagtctgacgatgaggtggacgacccggcggtggagctcaagcagtttggcgtggcccctttcacgatcgccaggaacgcagaccaggaggagctggtgaagatctcgctgagccccgaatatgtgttctcggtgagcaccttccgggagctgcccagcctggagcagaaactgctgacgcccatcacgaccctgacctcagagcagatccagaagctcttagccagcactcgctatccacctccagcagttgagagtgatgctgcagacattgtctttctgatcgacagctctgagggagttaggccagatggctttgcacatattcgagattttgttagcaggattgttcgaagactcaacatcggccccagtaaagtgagagttggggtcgtgcagttcagcaatgatgtcttcccagaattctatctgaaaacctacagatcccaggccccggtgctggacgccatacggcgcctgaggctcagaggggggtccccactgaacactggcaaggctctcgaatttgtggcaagaaacctctttgttaagtctgcggggagtcgcatagaagacggggtgccccaacacctggtcctggtcctgggtggaaaatcccaggacgatgtgtccaggttcgcccaggtgatccgttcctcgggcattgtgagtttaggggtaggagaccggaacatcgacagaacagagctgcagaccatcaccaatgaccccagactggtcttcacagtgcgagagttcagagagcttcccaacatagaagaaagaatcatgaactcgtttggaccctccgcagccactcctgcacctccaggggtggacacccctcctccttcacggccagagaagaagaaagcagacattgtgttcctgttggatggttccatcaacttcaggagggacagtttccaggaagtgcttcgttttgtgtctgaaatagtggacacagtttatgaagatggcgactccatccaagtggggcttgtccagtacaactctgaccccactgacgaattcttcctgaaggacttctctaccaagaggcagattattgacgccatcaacaaagtggtctacaaagggggaagacacgccaacactaaggtgggccttgagcacctgcgggtaaaccactttgtgcctgaggcaggcagccgcctggaccagcgggtccctcagattgcctttgtgatcacgggaggaaagtcggtggaagatgcacaggatgtgagcctggccctcacccagaggggggtcaaagtgtttgctgttggagtgaggaatatcgactcggaggaggttggaaagatagcgtccaacagcgccacagcgttccgcgtgggcaacgtccaggagctgtccgaactgagcgagcaagttttggaaactttgcatgatgcgatgcatgaaaccctttgccctggtgtaactgatgctgccaaagcttgtaatctggatgtgattctggggtttgatggttctagagaccagaatgtttttgtggcccagaagggcttcgagtccaaggtggacgccatcttgaacagaatcagccagatgcacagggtcagctgcagcggtggccgctcgcccaccgtgcgtgtgtcagtggtggccaacacgccctcgggcccggtggaggcctttgactttgacgagtaccagccagagatgctcgagaagttccggaacatgcgcagccagcacccctacgtcctcacggaggacaccctgaaggtctacctgaacaagttcagacagtcctcgccggacagcgtgaaggtggtcattcattttactgatggagcagacggagatctggctgatttacacagagcatctgagaacctccgccaagaaggagtccgtgccttgatcctggtgggccttgaacgagtggtcaacttggagcggctaatgcatctggagtttgggcgagggtttatgtatgacaggcccctgaggcttaacttgctggacttggattatgaactagcggagcagcttgacaacattgccgagaaagcttgctgtggggttccctgcaagtgctctgggcagaggggagaccgcgggcccatcggcagcatcgggccaaagggtattcctggagaagacggctaccgaggctatcctggtgatgagggtggacccggtgagcgtggtccgcctggtgtgaacggcactcaaggtttccagggctgcccgggccagagaggagtaaagggctctcggggattcccaggagagaagggcgaagtaggagaaattggactggatggtctggatggtgaagatggagacaaaggattgcctggttcttctggagagaaagggaatcctggaagaaggggtgataaaggacctcgaggagagaaaggagaaagaggagatgttgggattcgaggggacccgggtaacccaggacaagacagccaggagagaggacccaaaggagaaaccggtgacctcggccccatgggtgtcccagggagagatggagtacctggaggacctggagaaactgggaagaatggtggctttggccgaaggggaccccccggagctaagggcaacaagggcggtcctggccagccgggctttgagggagagcaggggaccagaggtgcacagggcccagctggtcctgctggtcctccagggctgataggagaacaaggcatttctggacctcggggaagcggaggtgccgctggtgctcctggagaacgaggcagaaccggtccactgggaagaaagggtgagcccggagagccaggaccaaaaggaggaatcgggaaccggggccctcgtggggagacgggagatgacgggagagacggagttggcagtgaaggacgcagaggcaaaaaaggagaaagaggattccctggatacccaggaccaaagggtaacccaggtgaacctgggctaaatggaacaacaggacccaaaggcatcagaggccgaaggggaaattcgggacctccagggatagttggacagaagggagaccctggctacccaggaccagctggtcccaagggcaacaggggcgactccatcgatcaatgtgccctcatccaaagcatcaaagataaatgcccttgctgttacgggcccctggagtgccccgtcttcccaacagaactagcctttgctttagacacctctgagggagtcaaccaagacactttcggccggatgcgagatgtggtcttgagtattgtgaatgacctgaccattgctgagagcaactgcccacggggggcccgggtggctgtggtcacctacaacaacgaggtgaccacggagatccggtttgctgactccaagaggaagtcggtcctcctggacaagattaagaaccttcaggtggctctgacatccaaacagcagagtctggagactgccatgtcgtttgtggccaggaacacatttaagcgtgtgaggaacggattcctaatgaggaaagtggctgttttcttcagcaacacacccacaagagcatccccacagctcagagaggctgtgctcaagctctcagatgcggggatcacccccttgttccttacaaggcaggaagaccggcagctcatcaacgctttgcagatcaataacacagcagtggggcatgcgcttgtcctgcctgcagggagagacctcacagacttcctggagaatgtcctcacgtgtcatgtttgcttggacatctgcaacatcgacccatcctgtggatttggcagttggaggccttccttcagggacaggagagcggcagggagcgatgtggacatcgacatggctttcatcttagacagcgctgagaccaccaccctgttccagttcaatgagatgaagaagtacatagcgtacctggtcagacaactggacatgagcccagatcccaaggcctcccagcacttcgccagagtggcagttgtgcagcacgcgccctctgagtccgtggacaatgccagcatgccacctgtgaaggtggaattctccctgactgactatggctccaaggagaagctggtggacttcctcagcaggggaatgacacagttgcagggaaccagggccttaggcagtgccattgaatacaccatagagaatgtctttgaaagtgccccaaacccacgggacctgaaaattgtggtcctgatgctgacgggcgaggtgccggagcagcagctggaggaggcccagagagtcatcctgcaggccaaatgcaagggctacttcttcgtggtcctgggcattggcaggaaggtgaacatcaaggaggtatacaccttcgccagtgagccaaacgacgtcttcttcaaattagtggacaagtccaccgagctcaacgaggagcctttgatgcgcttcgggaggctgttgccatccttcgtcagcagtgaaaatgctttttacttgtccccagatatcaggaaacagtgtgattggttccaaggggaccaacccacaaagaaccttgtgaagtttggtcacaaacaagtaaatgttccgaataacgttacttcaagtcctacatccaacccagtgacgacaacgaagccggtgactacgacgaagccggtgaccaccacaacaaagcctgtaaccaccacaacaaagcctgtgactattataaatcagccatctgtgaagccagccgctgcaaagccggcccctgcgaaacctgtggctgccaagcctgtggccacaaagatggccactgttagacccccagtggcggtgaagccagcaacggcagcgaagcctgtagcagcaaagccagcagctgtaagaccccccgctgctgctgctgcaaaaccagtggcgaccaagcctgaggtccctaggccacaggcagccaaaccagctgccaccaagccagccaccactaagcccatggttaagatgtcccgtgaagtccaggtgtttgagataacagagaacagcgccaaactccactgggagagggctgagccccccggtccttatttttatgacctcaccgtcacctcagcccatgatcagtccctggttctgaagcagaacctcacggtcacggaccgcgtcattggaggcctgctcgctgggcagacataccatgtggctgtggtctgctacctgaggtctcaggtcagagccacctaccacggaagtttcagtacaaagaaatctcagcccccacctccacagccagcaaggtcagcttctagttcaaccatcaatctaatggtgagcacagaaccattggctctcactgaaacagatatatgcaagttgccgaaagacgaaggaacttgcagggatttcatattaaaatggtactatgatccaaacaccaaaagctgtgcaagattctggtatggaggttgtggtggaaacgaaaacaaatttggatcacagaaagaatgtgaaaaggtttgcgctcctgtgctcgccaaacccggagtcatcagtgtgatgggaacctaagcgtgggtggccaacatcatatacctcttgaagaagaaggagtcagccatcgccaacttgtctctgtagaagctccgggtgtagattcccttgcactgtatcatttcatgctttgatttacactcgaactcgggagggaacatcctgctgcatgacctatcagtatggtgctaatgtgtctgtggaccctcgctctctgtctccaggcagttctctcgaatactttgaatgttgtgtaacagttagccactgctggtgtttatgtgaacattcctatcaatccaaattccctctggagtttcatgttatgcctgttgcaggcaaatgtaaagtctagaaaataatgcaaatgtcacggctactctatatacttttgcttggttcattttttttcccttttagttaagcatgactttagatgggaagcctgtgtatcgtggagaaacaagagaccaactttttcattccctgcccccaatttcccagactagatttcaagctaattttctttttctgaagcctctaacaaatgatctagttcagaaggaagcaaaatcccttaatctatgtgcaccgttgggaccaatgccttaattaaagaatttaaaaaagttgtaatagagaatatttttggcattcctctaatgttgtgtgttttttttttgtgtgtgctggagggaggggatttaattttaattttaaaatgtttaggaaatttatacaaagaaactttttaataaagtatattgaaagttaaaaaaaaaaaaaaaaaa

SEQ ID NO: 11531 - DNA, 10562 bp, Homo sapiens
cagtttggagctcagtcttccaccaaaggccgttcagttctcctgggctccagcctcctgcaaggactgcaagagttttcctccgcagctctgagtctccacttttttggtggagaaaggctgcaaaaagaaaaagagacgcagtgagtgggaaaagtatgcatcctattcaaacctaattgaatcgaggagcccagggacacacgccttcaggtttgctcaggggttcatatttggtgcttagacaaattcaaaatgaggaaacatcggcacttgcccttagtggccgtcttttgcctctttctctcaggctttcctacaactcatgcccagcagcagcaagcagatgtcaaaaatggtgcggctgctgatataatatttctagtggattcctcttggaccattggagaggaacatttccaacttgttcgagagtttctatatgatgttgtaaaatccttagctgtgggagaaaatgatttccattttgctctggtccagttcaacggaaacccacataccgagttcctgttaaatacgtatcgtactaaacaagaagtcctttctcatatttccaacatgtcttatattgggggaaccaatcagactggaaaaggattagaatacataatgcaaagccacctcaccaaggctgctggaagccgggccggtgacggagtccctcaggttatcgtagtgttaactgatggacactcgaaggatggccttgctctgccctcagcggaacttaagtctgctgatgttaacgtgtttgcaattggagttgaggatgcagatgaaggagcgttaaaagaaatagcaagtgaaccgctcaatatgcatatgttcaacctagagaattttacctcacttcatgacatagtaggaaacttagtgtcctgtgtgcattcatccgtgagtccagaaagggctggggacacggaaacccttaaagacatcacagcacaagactctgctgacattattttccttattgatggatcaaacaacaccggaagtgtcaatttcgcagtcattctcgacttccttgtaaatctccttgagaaactcccaattggaactcagcagatccgagtgggggtggtccagtttagcgatgagcccagaaccatgttctccttggacacctactccaccaaggcccaggttctgggtgcagtgaaagccctcgggtttgctggtggggagttggccaatatcggcctcgcccttgatttcgtggtggagaaccacttcacccgggcagggggcagccgcgtggaggaaggggttccccaggtgctggtcctcataagtgccgggccttctagtgacgagattcgctacggggtggtagcactgaagcaggctagcgtgttctcattcggccttggagcccaggccgcctccagggcagagcttcagcacatagctaccgatgacaacttggtgtttactgtcccggaattccgtagctttggggacctccaggagaaattactgccgtacattgttggcgtggcccaaaggcacattgtcttgaaaccgccaaccattgtcacacaagtcattgaagtcaacaagagagacatagtcttcctggtggatggctcatctgcactgggactggccaacttcaatgccatccgagacttcattgctaaagtcatccagaggctggaaatcggacaggatcttatccaggtggcagtggcccagtatgcagacactgtgaggcctgaattttatttcaatacccatccaacaaaaagggaagtcataaccgctgtgcggaaaatgaagcccctggacggctcggccctgtacacgggctctgctctagactttgttcgtaacaacctattcacgagttcagccggctaccgggctgccgaggggattcctaagcttttggtgctgatcacaggtggtaagtccctagatgaaatcagccagcctgcccaggagctgaagagaagcagcataatggcctttgccattgggaacaagggtgccgatcaggctgagctggaagagatcgctttcgactcctccctggtgttcatcccagctgagttccgagccgccccattgcaaggcatgctgcctggcttgctggcacctctcaggaccctctctggaacccctgaagttcactcaaacaaaagggatatcatctttcttttggatggatcagccaacgttggaaaaaccaatttcccttatgtgcgcgactttgtaatgaacctagttaacagccttgatattggaaatgacaatattcgtgttggtttagtgcaatttagtgacactcctgtaacggagttctctttaaacacataccagaccaagtcagatatccttggtcatctgaggcagctgcagctccagggaggttcgggcctgaacacaggctcagccctaagctatgtctatgccaaccacttcacggaagctggcggcagcaggatccgtgaacacgtgccgcagctcctgcttctgctcacagctgggcagtctgaggactcctatttgcaagctgccaacgccttgacacgcgcgggcatcctgactttttgtgtgggagctagccaggcgaataaggcagagcttgagcagattgcttttaacccaagcctggtgtatctcatggatgatttcagctccctgccagctttgcctcagcagctgattcagcccctaaccacatatgttagtggaggtgtggaggaagtaccactcgctcagccagagagcaagcgagacattctgttcctctttgacggctcagccaatcttgtgggccagttccctgttgtccgtgactttctctacaagattatcgatgagctcaatgtgaagccagaggggacccgaattgcggtggctcagtacagcgatgatgtcaaggtggagtcccgttttgatgagcaccagagtaagcctgagatcctgaatcttgtgaagagaatgaagatcaagacgggcaaagccctcaacctgggctacgcgctggactatgcacagaggtacatttttgtgaagtctgctggcagccggatcgaggatggagtgcttcagttcctggtgctgctggtcgcaggaaggtcatctgaccgtgtggatgggccagcaagtaacctgaagcagagtggggttgtgcctttcatcttccaagccaagaacgcagaccctgctgagttagagcagatcgtgctgtctccagcgtttatcctggctgcagagtcgcttcccaagattggagatcttcatccacagatagtgaatctcttaaaatcagtgcacaacggagcaccagcaccagtttcaggtgaaaaggacgtggtgtttctgcttgatggctctgagggcgtcaggagcggcttccctctgttgaaagagtttgtccagagagtggtggaaagcctggatgtgggccaggaccgggtccgcgtggccgtggtgcagtacagcgaccggaccaggcccgagttctacctgaattcatacatgaacaagcaggacgtcgtcaacgctgtccgccagctgaccctgctgggagggccgacccccaacaccggggccgccctggagtttgtcctgaggaacatcctggtcagctctgcgggaagcaggataacagaaggtgtgccccagctgctgatcgtcctcacggccgacaggtctggggatgatgtgcggaacccctccgtggtcgtgaagaggggtggggctgtgcccattggcattggcatcgggaacgctgacatcacagagatgcagaccatctccttcatcccggactttgccgtggccattcccacctttcgccagctggggaccgtccaacaggtcatctctgagagggtgacccagctcacccgcgaggagctgagcaggctgcagccggtgttgcagcctctaccgagcccaggtgttggtggcaagagggacgtggtctttctcatcgatgggtcccaaagtgccgggcctgagttccagtacgttcgcaccctcatagagaggctggttgactacctggacgtgggctttgacaccacccgggtggctgtcatccagttcagcgatgaccccaaggtggagttcctgctgaacgcccattccagcaaggatgaagtgcagaacgcggtgcagcggctgaggcccaagggagggcggcagatcaacgtgggcaatgccctggagtacgtgtccaggaacatcttcaagaggcccctggggagccgcattgaagagggcgtcccgcagttcctggtcctcatctcgtctggaaagtctgacgatgaggtggacgacccggcggtggagctcaagcagtttggcgtggcccctttcacgatcgccaggaacgcagaccaggaggagctggtgaagatctcgctgagccccgaatatgtgttctcggtgagcaccttccgggagctgcccagcctggagcagaaactgctgacgcccatcacgaccctgacctcagagcagatccagaagctcttagccagcactcgctatccacctccagcagttgagagtgatgctgcagacattgtctttctgatcgacagctctgagggagttaggccagatggctttgcacatattcgagattttgttagcaggattgttcgaagactcaacatcggccccagtaaagtgagagttggggtcgtgcagttcagcaatgatgtcttcccagaattctatctgaaaacctacagatcccaggccccggtgctggacgccatacggcgcctgaggctcagaggggggtccccactgaacactggcaaggctctcgaatttgtggcaagaaacctctttgttaagtctgcggggagtcgcatagaagacggggtgccccaacacctggtcctggtcctgggtggaaaatcccaggacgatgtgtccaggttcgcccaggtgatccgttcctcgggcattgtgagtttaggggtaggagaccggaacatcgacagaacagagctgcagaccatcaccaatgaccccagactggtcttcacagtgcgagagttcagagagcttcccaacatagaagaaagaatcatgaactcgtttggaccctccgcagccactcctgcacctccaggggtggacacccctcctccttcacggccagagaagaagaaagcagacattgtgttcctgttggatggttccatcaacttcaggagggacagtttccaggaagtgcttcgttttgtgtctgaaatagtggacacagtttatgaagatggcgactccatccaagtggggcttgtccagtacaactctgaccccactgacgaattcttcctgaaggacttctctaccaagaggcagattattgacgccatcaacaaagtggtctacaaagggggaagacacgccaacactaaggtgggccttgagcacctgcgggtaaaccactttgtgcctgaggcaggcagccgcctggaccagcgggtccctcagattgcctttgtgatcacgggaggaaagtcggtggaagatgcacaggatgtgagcctggccctcacccagaggggggtcaaagtgtttgctgttggagtgaggaatatcgactcggaggaggttggaaagatagcgtccaacagcgccacagcgttccgcgtgggcaacgtccaggagctgtccgaactgagcgagcaagttttggaaactttgcatgatgcgatgcatgaaaccctttgccctggtgtaactgatgctgccaaagcttgtaatctggatgtgattctggggtttgatggttctagagaccagaatgtttttgtggcccagaagggcttcgagtccaaggtggacgccatcttgaacagaatcagccagatgcacagggtcagctgcagcggtggccgctcgcccaccgtgcgtgtgtcagtggtggccaacacgccctcgggcccggtggaggcctttgactttgacgagtaccagccagagatgctcgagaagttccggaacatgcgcagccagcacccctacgtcctcacggaggacaccctgaaggtctacctgaacaagttcagacagtcctcgccggacagcgtgaaggtggtcattcattttactgatggagcagacggagatctggctgatttacacagagcatctgagaacctccgccaagaaggagtccgtgccttgatcctggtgggccttgaacgagtggtcaacttggagcggctaatgcatctggagtttgggcgagggtttatgtatgacaggcccctgaggcttaacttgctggacttggattatgaactagcggagcagcttgacaacattgccgagaaagcttgctgtggggttccctgcaagtgctctgggcagaggggagaccgcgggcccatcggcagcatcgggccaaagggtattcctggagaagacggctaccgaggctatcctggtgatgagggtggacccggtgagcgtggtccgcctggtgtgaacggcactcaaggtttccagggctgcccgggccagagaggagtaaagggctctcggggattcccaggagagaagggcgaagtaggagaaattggactggatggtctggatggtgaagatggagacaaaggattgcctggttcttctggagagaaagggaatcctggaagaaggggtgataaaggacctcgaggagagaaaggagaaagaggagatgttgggattcgaggggacccgggtaacccaggacaagacagccaggagagaggacccaaaggagaaaccggtgacctcggccccatgggtgtcccagggagagatggagtacctggaggacctggagaaactgggaagaatggtggctttggccgaaggggaccccccggagctaagggcaacaagggcggtcctggccagccgggctttgagggagagcaggggaccagaggtgcacagggcccagctggtcctgctggtcctccagggctgataggagaacaaggcatttctggacctcggggaagcggaggtgccgctggtgctcctggagaacgaggcagaaccggtccactgggaagaaagggtgagcccggagagccaggaccaaaaggaggaatcgggaaccggggccctcgtggggagacgggagatgacgggagagacggagttggcagtgaaggacgcagaggcaaaaaaggagaaagaggattccctggatacccaggaccaaagggtaacccaggtgaacctgggctaaatggaacaacaggacccaaaggcatcagaggccgaaggggaaattcgggacctccagggatagttggacagaagggagaccctggctacccaggaccagctggtcccaagggcaacaggggcgactccatcgatcaatgtgccctcatccaaagcatcaaagataaatgcccttgctgttacgggcccctggagtgccccgtcttcccaacagaactagcctttgctttagacacctctgagggagtcaaccaagacactttcggccggatgcgagatgtggtcttgagtattgtgaatgacctgaccattgctgagagcaactgcccacggggggcccgggtggctgtggtcacctacaacaacgaggtgaccacggagatccggtttgctgactccaagaggaagtcggtcctcctggacaagattaagaaccttcaggtggctctgacatccaaacagcagagtctggagactgccatgtcgtttgtggccaggaacacatttaagcgtgtgaggaacggattcctaatgaggaaagtggctgttttcttcagcaacacacccacaagagcatccccacagctcagagaggctgtgctcaagctctcagatgcggggatcacccccttgttccttacaaggcaggaagaccggcagctcatcaacgctttgcagatcaataacacagcagtggggcatgcgcttgtcctgcctgcagggagagacctcacagacttcctggagaatgtcctcacgtgtcatgtttgcttggacatctgcaacatcgacccatcctgtggatttggcagttggaggccttccttcagggacaggagagcggcagggagcgatgtggacatcgacatggctttcatcttagacagcgctgagaccaccaccctgttccagttcaatgagatgaagaagtacatagcgtacctggtcagacaactggacatgagcccagatcccaaggcctcccagcacttcgccagagtggcagttgtgcagcacgcgccctctgagtccgtggacaatgccagcatgccacctgtgaaggtggaattctccctgactgactatggctccaaggagaagctggtggacttcctcagcaggggaatgacacagttgcagggaaccagggccttaggcagtgccattgaatacaccatagagaatgtctttgaaagtgccccaaacccacgggacctgaaaattgtggtcctgatgctgacgggcgaggtgccggagcagcagctggaggaggcccagagagtcatcctgcaggccaaatgcaagggctacttcttcgtggtcctgggcattggcaggaaggtgaacatcaaggaggtatacaccttcgccagtgagccaaacgacgtcttcttcaaattagtggacaagtccaccgagctcaacgaggagcctttgatgcgcttcgggaggctgttgccatccttcgtcagcagtgaaaatgctttttacttgtccccagatatcaggaaacagtgtgattggttccaaggggaccaacccacaaagaaccttgtgaagtttggtcacaaacaagtaaatgttccgaataacgttacttcaagtcctacatccaacccagtgacgacaacgaagccggtgactacgacgaagccggtgaccaccacaacaaagcctgtaaccaccacaacaaagcctgtgactattataaatcagccatctgtgaagccagccgctgcaaagccggcccctgcgaaacctgtggctgccaagcctgtggccacaaagatggccactgttagacccccagtggcggtgaagccagcaacggcagcgaagcctgtagcagcaaagccagcagctgtaagaccccccgctgctgctgctgcaaaaccagtggcgaccaagcctgaggtccctaggccacaggcagccaaaccagctgccaccaagccagccaccactaagcccatggttaagatgtcccgtgaagtccaggtgtttgagataacagagaacagcgccaaactccactgggagagggctgagccccccggtccttatttttatgacctcaccgtcacctcagcccatgatcagtccctggttctgaagcagaacctcacggtcacggaccgcgtcattggaggcctgctcgctgggcagacataccatgtggctgtggtctgctacctgaggtctcaggtcagagccacctaccacggaagtttcagtacaaagaaatctcagcccccacctccacagccagcaaggtcagcttctagttcaaccatcaatctaatggtgagcacagaaccattggctctcactgaaacagatatatgcaagttgccgaaagacgaaggaacttgcagggatttcatattaaaatggtactatgatccaaacaccaaaagctgtgcaagattctggtatggaggttgtggtggaaacgaaaacaaatttggatcacagaaagaatgtgaaaaggtttgcgctcctgtgctcgccaaacccggagtcatcagtgtgatgggaacctaagcgtgggtggccaacatcatatacctcttgaagaagaaggagtcagccatcgccaacttgtctctgtagaagctccgggtgtagattcccttgcactgtatcatttcatgctttgatttacactcgaactcgggagggaacatcctgctgcatgacctatcagtatggtgctaatgtgtctgtggaccctcgctctctgtctccaggcagttctctcgaatactttgaatgttgtgtaacagttagccactgctggtgtttatgtgaacattcctatcaatccaaattccctctggagtttcatgttatgcctgttgcaggcaaatgtaaagtctagaaaataatgcaaatgtcacggctactctatatacttttgcttggttcattttttttcccttttagttaagcatgactttagatgggaagcctgtgtatcgtggagaaacaagagaccaactttttcattccctgcccccaatttcccagactagatttcaagctaattttctttttctgaagcctctaacaaatgatctagttcagaaggaagcaaaatcccttaatctatgtgcaccgttgggaccaatgccttaattaaagaatttaaaaaagttgtaatagagaatatttttggcattcctctaatgttgtgtgttttttttttgtgtgtgctggagggaggggatttaattttaattttaaaatgtttaggaaatttatacaaagaaactttttaataaagtatattgaaagttaaaaaaaaaaaaaaaaaa

SEQ ID NO: 11532 - DNA, 9944 bp, Homo sapiens
cagtttggagctcagtcttccaccaaaggccgttcagttctcctgggctccagcctcctgcaaggactgcaagagttttcctccgcagctctgagtctccacttttttggtggagaaaggctgcaaaaagaaaaagagacgcagtgagtgggaaaagtatgcatcctattcaaacctaattgaatcgaggagcccagggacacacgccttcaggtttgctcaggggttcatatttggtgcttagacaaattcaaaatgaggaaacatcggcacttgcccttagtggccgtcttttgcctctttctctcaggctttcctacaactcatgcccagcagcagcaagcagcacaagactctgctgacattattttccttattgatggatcaaacaacaccggaagtgtcaatttcgcagtcattctcgacttccttgtaaatctccttgagaaactcccaattggaactcagcagatccgagtgggggtggtccagtttagcgatgagcccagaaccatgttctccttggacacctactccaccaaggcccaggttctgggtgcagtgaaagccctcgggtttgctggtggggagttggccaatatcggcctcgcccttgatttcgtggtggagaaccacttcacccgggcagggggcagccgcgtggaggaaggggttccccaggtgctggtcctcataagtgccgggccttctagtgacgagattcgctacggggtggtagcactgaagcaggctagcgtgttctcattcggccttggagcccaggccgcctccagggcagagcttcagcacatagctaccgatgacaacttggtgtttactgtcccggaattccgtagctttggggacctccaggagaaattactgccgtacattgttggcgtggcccaaaggcacattgtcttgaaaccgccaaccattgtcacacaagtcattgaagtcaacaagagagacatagtcttcctggtggatggctcatctgcactgggactggccaacttcaatgccatccgagacttcattgctaaagtcatccagaggctggaaatcggacaggatcttatccaggtggcagtggcccagtatgcagacactgtgaggcctgaattttatttcaatacccatccaacaaaaagggaagtcataaccgctgtgcggaaaatgaagcccctggacggctcggccctgtacacgggctctgctctagactttgttcgtaacaacctattcacgagttcagccggctaccgggctgccgaggggattcctaagcttttggtgctgatcacaggtggtaagtccctagatgaaatcagccagcctgcccaggagctgaagagaagcagcataatggcctttgccattgggaacaagggtgccgatcaggctgagctggaagagatcgctttcgactcctccctggtgttcatcccagctgagttccgagccgccccattgcaaggcatgctgcctggcttgctggcacctctcaggaccctctctggaacccctgaagttcactcaaacaaaagggatatcatctttcttttggatggatcagccaacgttggaaaaaccaatttcccttatgtgcgcgactttgtaatgaacctagttaacagccttgatattggaaatgacaatattcgtgttggtttagtgcaatttagtgacactcctgtaacggagttctctttaaacacataccagaccaagtcagatatccttggtcatctgaggcagctgcagctccagggaggttcgggcctgaacacaggctcagccctaagctatgtctatgccaaccacttcacggaagctggcggcagcaggatccgtgaacacgtgccgcagctcctgcttctgctcacagctgggcagtctgaggactcctatttgcaagctgccaacgccttgacacgcgcgggcatcctgactttttgtgtgggagctagccaggcgaataaggcagagcttgagcagattgcttttaacccaagcctggtgtatctcatggatgatttcagctccctgccagctttgcctcagcagctgattcagcccctaaccacatatgttagtggaggtgtggaggaagtaccactcgctcagccagagagcaagcgagacattctgttcctctttgacggctcagccaatcttgtgggccagttccctgttgtccgtgactttctctacaagattatcgatgagctcaatgtgaagccagaggggacccgaattgcggtggctcagtacagcgatgatgtcaaggtggagtcccgttttgatgagcaccagagtaagcctgagatcctgaatcttgtgaagagaatgaagatcaagacgggcaaagccctcaacctgggctacgcgctggactatgcacagaggtacatttttgtgaagtctgctggcagccggatcgaggatggagtgcttcagttcctggtgctgctggtcgcaggaaggtcatctgaccgtgtggatgggccagcaagtaacctgaagcagagtggggttgtgcctttcatcttccaagccaagaacgcagaccctgctgagttagagcagatcgtgctgtctccagcgtttatcctggctgcagagtcgcttcccaagattggagatcttcatccacagatagtgaatctcttaaaatcagtgcacaacggagcaccagcaccagtttcaggtgaaaaggacgtggtgtttctgcttgatggctctgagggcgtcaggagcggcttccctctgttgaaagagtttgtccagagagtggtggaaagcctggatgtgggccaggaccgggtccgcgtggccgtggtgcagtacagcgaccggaccaggcccgagttctacctgaattcatacatgaacaagcaggacgtcgtcaacgctgtccgccagctgaccctgctgggagggccgacccccaacaccggggccgccctggagtttgtcctgaggaacatcctggtcagctctgcgggaagcaggataacagaaggtgtgccccagctgctgatcgtcctcacggccgacaggtctggggatgatgtgcggaacccctccgtggtcgtgaagaggggtggggctgtgcccattggcattggcatcgggaacgctgacatcacagagatgcagaccatctccttcatcccggactttgccgtggccattcccacctttcgccagctggggaccgtccaacaggtcatctctgagagggtgacccagctcacccgcgaggagctgagcaggctgcagccggtgttgcagcctctaccgagcccaggtgttggtggcaagagggacgtggtctttctcatcgatgggtcccaaagtgccgggcctgagttccagtacgttcgcaccctcatagagaggctggttgactacctggacgtgggctttgacaccacccgggtggctgtcatccagttcagcgatgaccccaaggtggagttcctgctgaacgcccattccagcaaggatgaagtgcagaacgcggtgcagcggctgaggcccaagggagggcggcagatcaacgtgggcaatgccctggagtacgtgtccaggaacatcttcaagaggcccctggggagccgcattgaagagggcgtcccgcagttcctggtcctcatctcgtctggaaagtctgacgatgaggtggacgacccggcggtggagctcaagcagtttggcgtggcccctttcacgatcgccaggaacgcagaccaggaggagctggtgaagatctcgctgagccccgaatatgtgttctcggtgagcaccttccgggagctgcccagcctggagcagaaactgctgacgcccatcacgaccctgacctcagagcagatccagaagctcttagccagcactcgctatccacctccagcagttgagagtgatgctgcagacattgtctttctgatcgacagctctgagggagttaggccagatggctttgcacatattcgagattttgttagcaggattgttcgaagactcaacatcggccccagtaaagtgagagttggggtcgtgcagttcagcaatgatgtcttcccagaattctatctgaaaacctacagatcccaggccccggtgctggacgccatacggcgcctgaggctcagaggggggtccccactgaacactggcaaggctctcgaatttgtggcaagaaacctctttgttaagtctgcggggagtcgcatagaagacggggtgccccaacacctggtcctggtcctgggtggaaaatcccaggacgatgtgtccaggttcgcccaggtgatccgttcctcgggcattgtgagtttaggggtaggagaccggaacatcgacagaacagagctgcagaccatcaccaatgaccccagactggtcttcacagtgcgagagttcagagagcttcccaacatagaagaaagaatcatgaactcgtttggaccctccgcagccactcctgcacctccaggggtggacacccctcctccttcacggccagagaagaagaaagcagacattgtgttcctgttggatggttccatcaacttcaggagggacagtttccaggaagtgcttcgttttgtgtctgaaatagtggacacagtttatgaagatggcgactccatccaagtggggcttgtccagtacaactctgaccccactgacgaattcttcctgaaggacttctctaccaagaggcagattattgacgccatcaacaaagtggtctacaaagggggaagacacgccaacactaaggtgggccttgagcacctgcgggtaaaccactttgtgcctgaggcaggcagccgcctggaccagcgggtccctcagattgcctttgtgatcacgggaggaaagtcggtggaagatgcacaggatgtgagcctggccctcacccagaggggggtcaaagtgtttgctgttggagtgaggaatatcgactcggaggaggttggaaagatagcgtccaacagcgccacagcgttccgcgtgggcaacgtccaggagctgtccgaactgagcgagcaagttttggaaactttgcatgatgcgatgcatgaaaccctttgccctggtgtaactgatgctgccaaagcttgtaatctggatgtgattctggggtttgatggttctagagaccagaatgtttttgtggcccagaagggcttcgagtccaaggtggacgccatcttgaacagaatcagccagatgcacagggtcagctgcagcggtggccgctcgcccaccgtgcgtgtgtcagtggtggccaacacgccctcgggcccggtggaggcctttgactttgacgagtaccagccagagatgctcgagaagttccggaacatgcgcagccagcacccctacgtcctcacggaggacaccctgaaggtctacctgaacaagttcagacagtcctcgccggacagcgtgaaggtggtcattcattttactgatggagcagacggagatctggctgatttacacagagcatctgagaacctccgccaagaaggagtccgtgccttgatcctggtgggccttgaacgagtggtcaacttggagcggctaatgcatctggagtttgggcgagggtttatgtatgacaggcccctgaggcttaacttgctggacttggattatgaactagcggagcagcttgacaacattgccgagaaagcttgctgtggggttccctgcaagtgctctgggcagaggggagaccgcgggcccatcggcagcatcgggccaaagggtattcctggagaagacggctaccgaggctatcctggtgatgagggtggacccggtgagcgtggtccgcctggtgtgaacggcactcaaggtttccagggctgcccgggccagagaggagtaaagggctctcggggattcccaggagagaagggcgaagtaggagaaattggactggatggtctggatggtgaagatggagacaaaggattgcctggttcttctggagagaaagggaatcctggaagaaggggtgataaaggacctcgaggagagaaaggagaaagaggagatgttgggattcgaggggacccgggtaacccaggacaagacagccaggagagaggacccaaaggagaaaccggtgacctcggccccatgggtgtcccagggagagatggagtacctggaggacctggagaaactgggaagaatggtggctttggccgaaggggaccccccggagctaagggcaacaagggcggtcctggccagccgggctttgagggagagcaggggaccagaggtgcacagggcccagctggtcctgctggtcctccagggctgataggagaacaaggcatttctggacctcggggaagcggaggtgccgctggtgctcctggagaacgaggcagaaccggtccactgggaagaaagggtgagcccggagagccaggaccaaaaggaggaatcgggaaccggggccctcgtggggagacgggagatgacgggagagacggagttggcagtgaaggacgcagaggcaaaaaaggagaaagaggattccctggatacccaggaccaaagggtaacccaggtgaacctgggctaaatggaacaacaggacccaaaggcatcagaggccgaaggggaaattcgggacctccagggatagttggacagaagggagaccctggctacccaggaccagctggtcccaagggcaacaggggcgactccatcgatcaatgtgccctcatccaaagcatcaaagataaatgcccttgctgttacgggcccctggagtgccccgtcttcccaacagaactagcctttgctttagacacctctgagggagtcaaccaagacactttcggccggatgcgagatgtggtcttgagtattgtgaatgacctgaccattgctgagagcaactgcccacggggggcccgggtggctgtggtcacctacaacaacgaggtgaccacggagatccggtttgctgactccaagaggaagtcggtcctcctggacaagattaagaaccttcaggtggctctgacatccaaacagcagagtctggagactgccatgtcgtttgtggccaggaacacatttaagcgtgtgaggaacggattcctaatgaggaaagtggctgttttcttcagcaacacacccacaagagcatccccacagctcagagaggctgtgctcaagctctcagatgcggggatcacccccttgttccttacaaggcaggaagaccggcagctcatcaacgctttgcagatcaataacacagcagtggggcatgcgcttgtcctgcctgcagggagagacctcacagacttcctggagaatgtcctcacgtgtcatgtttgcttggacatctgcaacatcgacccatcctgtggatttggcagttggaggccttccttcagggacaggagagcggcagggagcgatgtggacatcgacatggctttcatcttagacagcgctgagaccaccaccctgttccagttcaatgagatgaagaagtacatagcgtacctggtcagacaactggacatgagcccagatcccaaggcctcccagcacttcgccagagtggcagttgtgcagcacgcgccctctgagtccgtggacaatgccagcatgccacctgtgaaggtggaattctccctgactgactatggctccaaggagaagctggtggacttcctcagcaggggaatgacacagttgcagggaaccagggccttaggcagtgccattgaatacaccatagagaatgtctttgaaagtgccccaaacccacgggacctgaaaattgtggtcctgatgctgacgggcgaggtgccggagcagcagctggaggaggcccagagagtcatcctgcaggccaaatgcaagggctacttcttcgtggtcctgggcattggcaggaaggtgaacatcaaggaggtatacaccttcgccagtgagccaaacgacgtcttcttcaaattagtggacaagtccaccgagctcaacgaggagcctttgatgcgcttcgggaggctgttgccatccttcgtcagcagtgaaaatgctttttacttgtccccagatatcaggaaacagtgtgattggttccaaggggaccaacccacaaagaaccttgtgaagtttggtcacaaacaagtaaatgttccgaataacgttacttcaagtcctacatccaacccagtgacgacaacgaagccggtgactacgacgaagccggtgaccaccacaacaaagcctgtaaccaccacaacaaagcctgtgactattataaatcagccatctgtgaagccagccgctgcaaagccggcccctgcgaaacctgtggctgccaagcctgtggccacaaagatggccactgttagacccccagtggcggtgaagccagcaacggcagcgaagcctgtagcagcaaagccagcagctgtaagaccccccgctgctgctgctgcaaaaccagtggcgaccaagcctgaggtccctaggccacaggcagccaaaccagctgccaccaagccagccaccactaagcccatggttaagatgtcccgtgaagtccaggtgtttgagataacagagaacagcgccaaactccactgggagagggctgagccccccggtccttatttttatgacctcaccgtcacctcagcccatgatcagtccctggttctgaagcagaacctcacggtcacggaccgcgtcattggaggcctgctcgctgggcagacataccatgtggctgtggtctgctacctgaggtctcaggtcagagccacctaccacggaagtttcagtacaaagaaatctcagcccccacctccacagccagcaaggtcagcttctagttcaaccatcaatctaatggtgagcacagaaccattggctctcactgaaacagatatatgcaagttgccgaaagacgaaggaacttgcagggatttcatattaaaatggtactatgatccaaacaccaaaagctgtgcaagattctggtatggaggttgtggtggaaacgaaaacaaatttggatcacagaaagaatgtgaaaaggtttgcgctcctgtgctcgccaaacccggagtcatcagtgtgatgggaacctaagcgtgggtggccaacatcatatacctcttgaagaagaaggagtcagccatcgccaacttgtctctgtagaagctccgggtgtagattcccttgcactgtatcatttcatgctttgatttacactcgaactcgggagggaacatcctgctgcatgacctatcagtatggtgctaatgtgtctgtggaccctcgctctctgtctccaggcagttctctcgaatactttgaatgttgtgtaacagttagccactgctggtgtttatgtgaacattcctatcaatccaaattccctctggagtttcatgttatgcctgttgcaggcaaatgtaaagtctagaaaataatgcaaatgtcacggctactctatatacttttgcttggttcattttttttcccttttagttaagcatgactttagatgggaagcctgtgtatcgtggagaaacaagagaccaactttttcattccctgcccccaatttcccagactagatttcaagctaattttctttttctgaagcctctaacaaatgatctagttcagaaggaagcaaaatcccttaatctatgtgcaccgttgggaccaatgccttaattaaagaatttaaaaaagttgtaatagagaatatttttggcattcctctaatgttgtgtgttttttttttgtgtgtgctggagggaggggatttaattttaattttaaaatgtttaggaaatttatacaaagaaactttttaataaagtatattgaaagttaaaaaaaaaaaaaaaaaa

SEQ ID NO: 11533 - DNA, 9959 bp, Homo sapiens
cagtttggagctcagtcttccaccaaaggccgttcagttctcctgggctccagcctcctgcaaggactgcaagagttttcctccgcagctctgagtctccacttttttggtggagaaaggctgcaaaaagaaaaagagacgcagtgagtgggaaaagtatgcatcctattcaaacctaattgaatcgaggagcccagggacacacgccttcaggtttgctcaggggttcatatttggtgcttagacaaattcaaaatgaggaaacatcggcacttgcccttagtggccgtcttttgcctctttctctcaggctttcctacaactcatgcccagcagcagcaagcagatgtcaaaaatggtgcggctgctgatataatatttctagtggattcctcttggaccattggagaggaacatttccaacttgttcgagagtttctatatgatgttgtaaaatccttagctgtgggagaaaatgatttccattttgctctggtccagttcaacggaaacccacataccgagttcctgttaaatacgtatcgtactaaacaagaagtcctttctcatatttccaacatgtcttatattgggggaaccaatcagactggaaaaggattagaatacataatgcaaagccacctcaccaaggctgctggaagccgggccggtgacggagtccctcaggttatcgtagtgttaactgatggacactcgaaggatggccttgctctgccctcagcggaacttaagtctgctgatgttaacgtgtttgcaattggagttgaggatgcagatgaaggagcgttaaaagaaatagcaagtgaaccgctcaatatgcatatgttcaacctagagaattttacctcacttcatgacatagtaggaaacttagtgtcctgtgtgcattcatccgtgagtccagaaagggctggggacacggaaacccttaaagacatcacagtcattgaagtcaacaagagagacatagtcttcctggtggatggctcatctgcactgggactggccaacttcaatgccatccgagacttcattgctaaagtcatccagaggctggaaatcggacaggatcttatccaggtggcagtggcccagtatgcagacactgtgaggcctgaattttatttcaatacccatccaacaaaaagggaagtcataaccgctgtgcggaaaatgaagcccctggacggctcggccctgtacacgggctctgctctagactttgttcgtaacaacctattcacgagttcagccggctaccgggctgccgaggggattcctaagcttttggtgctgatcacaggtggtaagtccctagatgaaatcagccagcctgcccaggagctgaagagaagcagcataatggcctttgccattgggaacaagggtgccgatcaggctgagctggaagagatcgctttcgactcctccctggtgttcatcccagctgagttccgagccgccccattgcaaggcatgctgcctggcttgctggcacctctcaggaccctctctggaacccctgaagttcactcaaacaaaagggatatcatctttcttttggatggatcagccaacgttggaaaaaccaatttcccttatgtgcgcgactttgtaatgaacctagttaacagccttgatattggaaatgacaatattcgtgttggtttagtgcaatttagtgacactcctgtaacggagttctctttaaacacataccagaccaagtcagatatccttggtcatctgaggcagctgcagctccagggaggttcgggcctgaacacaggctcagccctaagctatgtctatgccaaccacttcacggaagctggcggcagcaggatccgtgaacacgtgccgcagctcctgcttctgctcacagctgggcagtctgaggactcctatttgcaagctgccaacgccttgacacgcgcgggcatcctgactttttgtgtgggagctagccaggcgaataaggcagagcttgagcagattgcttttaacccaagcctggtgtatctcatggatgatttcagctccctgccagctttgcctcagcagctgattcagcccctaaccacatatgttagtggaggtgtggaggaagtaccactcgctcagccagagagcaagcgagacattctgttcctctttgacggctcagccaatcttgtgggccagttccctgttgtccgtgactttctctacaagattatcgatgagctcaatgtgaagccagaggggacccgaattgcggtggctcagtacagcgatgatgtcaaggtggagtcccgttttgatgagcaccagagtaagcctgagatcctgaatcttgtgaagagaatgaagatcaagacgggcaaagccctcaacctgggctacgcgctggactatgcacagaggtacatttttgtgaagtctgctggcagccggatcgaggatggagtgcttcagttcctggtgctgctggtcgcaggaaggtcatctgaccgtgtggatgggccagcaagtaacctgaagcagagtggggttgtgcctttcatcttccaagccaagaacgcagaccctgctgagttagagcagatcgtgctgtctccagcgtttatcctggctgcagagtcgcttcccaagattggagatcttcatccacagatagtgaatctcttaaaatcagtgcacaacggagcaccagcaccagtttcaggtgaaaaggacgtggtgtttctgcttgatggctctgagggcgtcaggagcggcttccctctgttgaaagagtttgtccagagagtggtggaaagcctggatgtgggccaggaccgggtccgcgtggccgtggtgcagtacagcgaccggaccaggcccgagttctacctgaattcatacatgaacaagcaggacgtcgtcaacgctgtccgccagctgaccctgctgggagggccgacccccaacaccggggccgccctggagtttgtcctgaggaacatcctggtcagctctgcgggaagcaggataacagaaggtgtgccccagctgctgatcgtcctcacggccgacaggtctggggatgatgtgcggaacccctccgtggtcgtgaagaggggtggggctgtgcccattggcattggcatcgggaacgctgacatcacagagatgcagaccatctccttcatcccggactttgccgtggccattcccacctttcgccagctggggaccgtccaacaggtcatctctgagagggtgacccagctcacccgcgaggagctgagcaggctgcagccggtgttgcagcctctaccgagcccaggtgttggtggcaagagggacgtggtctttctcatcgatgggtcccaaagtgccgggcctgagttccagtacgttcgcaccctcatagagaggctggttgactacctggacgtgggctttgacaccacccgggtggctgtcatccagttcagcgatgaccccaaggtggagttcctgctgaacgcccattccagcaaggatgaagtgcagaacgcggtgcagcggctgaggcccaagggagggcggcagatcaacgtgggcaatgccctggagtacgtgtccaggaacatcttcaagaggcccctggggagccgcattgaagagggcgtcccgcagttcctggtcctcatctcgtctggaaagtctgacgatgaggtggacgacccggcggtggagctcaagcagtttggcgtggcccctttcacgatcgccaggaacgcagaccaggaggagctggtgaagatctcgctgagccccgaatatgtgttctcggtgagcaccttccgggagctgcccagcctggagcagaaactgctgacgcccatcacgaccctgacctcagagcagatccagaagctcttagccagcactcgctatccacctccagcagttgagagtgatgctgcagacattgtctttctgatcgacagctctgagggagttaggccagatggctttgcacatattcgagattttgttagcaggattgttcgaagactcaacatcggccccagtaaagtgagagttggggtcgtgcagttcagcaatgatgtcttcccagaattctatctgaaaacctacagatcccaggccccggtgctggacgccatacggcgcctgaggctcagaggggggtccccactgaacactggcaaggctctcgaatttgtggcaagaaacctctttgttaagtctgcggggagtcgcatagaagacggggtgccccaacacctggtcctggtcctgggtggaaaatcccaggacgatgtgtccaggttcgcccaggtgatccgttcctcgggcattgtgagtttaggggtaggagaccggaacatcgacagaacagagctgcagaccatcaccaatgaccccagactggtcttcacagtgcgagagttcagagagcttcccaacatagaagaaagaatcatgaactcgtttggaccctccgcagccactcctgcacctccaggggtggacacccctcctccttcacggccagagaagaagaaagcagacattgtgttcctgttggatggttccatcaacttcaggagggacagtttccaggaagtgcttcgttttgtgtctgaaatagtggacacagtttatgaagatggcgactccatccaagtggggcttgtccagtacaactctgaccccactgacgaattcttcctgaaggacttctctaccaagaggcagattattgacgccatcaacaaagtggtctacaaagggggaagacacgccaacactaaggtgggccttgagcacctgcgggtaaaccactttgtgcctgaggcaggcagccgcctggaccagcgggtccctcagattgcctttgtgatcacgggaggaaagtcggtggaagatgcacaggatgtgagcctggccctcacccagaggggggtcaaagtgtttgctgttggagtgaggaatatcgactcggaggaggttggaaagatagcgtccaacagcgccacagcgttccgcgtgggcaacgtccaggagctgtccgaactgagcgagcaagttttggaaactttgcatgatgcgatgcatgaaaccctttgccctggtgtaactgatgctgccaaagcttgtaatctggatgtgattctggggtttgatggttctagagaccagaatgtttttgtggcccagaagggcttcgagtccaaggtggacgccatcttgaacagaatcagccagatgcacagggtcagctgcagcggtggccgctcgcccaccgtgcgtgtgtcagtggtggccaacacgccctcgggcccggtggaggcctttgactttgacgagtaccagccagagatgctcgagaagttccggaacatgcgcagccagcacccctacgtcctcacggaggacaccctgaaggtctacctgaacaagttcagacagtcctcgccggacagcgtgaaggtggtcattcattttactgatggagcagacggagatctggctgatttacacagagcatctgagaacctccgccaagaaggagtccgtgccttgatcctggtgggccttgaacgagtggtcaacttggagcggctaatgcatctggagtttgggcgagggtttatgtatgacaggcccctgaggcttaacttgctggacttggattatgaactagcggagcagcttgacaacattgccgagaaagcttgctgtggggttccctgcaagtgctctgggcagaggggagaccgcgggcccatcggcagcatcgggccaaagggtattcctggagaagacggctaccgaggctatcctggtgatgagggtggacccggtgagcgtggtccgcctggtgtgaacggcactcaaggtttccagggctgcccgggccagagaggagtaaagggctctcggggattcccaggagagaagggcgaagtaggagaaattggactggatggtctggatggtgaagatggagacaaaggattgcctggttcttctggagagaaagggaatcctggaagaaggggtgataaaggacctcgaggagagaaaggagaaagaggagatgttgggattcgaggggacccgggtaacccaggacaagacagccaggagagaggacccaaaggagaaaccggtgacctcggccccatgggtgtcccagggagagatggagtacctggaggacctggagaaactgggaagaatggtggctttggccgaaggggaccccccggagctaagggcaacaagggcggtcctggccagccgggctttgagggagagcaggggaccagaggtgcacagggcccagctggtcctgctggtcctccagggctgataggagaacaaggcatttctggacctcggggaagcggaggtgccgctggtgctcctggagaacgaggcagaaccggtccactgggaagaaagggtgagcccggagagccaggaccaaaaggaggaatcgggaaccggggccctcgtggggagacgggagatgacgggagagacggagttggcagtgaaggacgcagaggcaaaaaaggagaaagaggattccctggatacccaggaccaaagggtaacccaggtgaacctgggctaaatggaacaacaggacccaaaggcatcagaggccgaaggggaaattcgggacctccagggatagttggacagaagggagaccctggctacccaggaccagctggtcccaagggcaacaggggcgactccatcgatcaatgtgccctcatccaaagcatcaaagataaatgcccttgctgttacgggcccctggagtgccccgtcttcccaacagaactagcctttgctttagacacctctgagggagtcaaccaagacactttcggccggatgcgagatgtggtcttgagtattgtgaatgacctgaccattgctgagagcaactgcccacggggggcccgggtggctgtggtcacctacaacaacgaggtgaccacggagatccggtttgctgactccaagaggaagtcggtcctcctggacaagattaagaaccttcaggtggctctgacatccaaacagcagagtctggagactgccatgtcgtttgtggccaggaacacatttaagcgtgtgaggaacggattcctaatgaggaaagtggctgttttcttcagcaacacacccacaagagcatccccacagctcagagaggctgtgctcaagctctcagatgcggggatcacccccttgttccttacaaggcaggaagaccggcagctcatcaacgctttgcagatcaataacacagcagtggggcatgcgcttgtcctgcctgcagggagagacctcacagacttcctggagaatgtcctcacgtgtcatgtttgcttggacatctgcaacatcgacccatcctgtggatttggcagttggaggccttccttcagggacaggagagcggcagggagcgatgtggacatcgacatggctttcatcttagacagcgctgagaccaccaccctgttccagttcaatgagatgaagaagtacatagcgtacctggtcagacaactggacatgagcccagatcccaaggcctcccagcacttcgccagagtggcagttgtgcagcacgcgccctctgagtccgtggacaatgccagcatgccacctgtgaaggtggaattctccctgactgactatggctccaaggagaagctggtggacttcctcagcaggggaatgacacagttgcagggaaccagggccttaggcagtgccattgaatacaccatagagaatgtctttgaaagtgccccaaacccacgggacctgaaaattgtggtcctgatgctgacgggcgaggtgccggagcagcagctggaggaggcccagagagtcatcctgcaggccaaatgcaagggctacttcttcgtggtcctgggcattggcaggaaggtgaacatcaaggaggtatacaccttcgccagtgagccaaacgacgtcttcttcaaattagtggacaagtccaccgagctcaacgaggagcctttgatgcgcttcgggaggctgttgccatccttcgtcagcagtgaaaatgctttttacttgtccccagatatcaggaaacagtgtgattggttccaaggggaccaacccacaaagaaccttgtgaagtttggtcacaaacaagtaaatgttccgaataacgttacttcaagtcctacatccaacccagtgacgacaacgaagccggtgactacgacgaagccggtgaccaccacaacaaagcctgtaaccaccacaacaaagcctgtgactattataaatcagccatctgtgaagccagccgctgcaaagccggcccctgcgaaacctgtggctgccaagcctgtggccacaaagatggccactgttagacccccagtggcggtgaagccagcaacggcagcgaagcctgtagcagcaaagccagcagctgtaagaccccccgctgctgctgctgcaaaaccagtggcgaccaagcctgaggtccctaggccacaggcagccaaaccagctgccaccaagccagccaccactaagcccatggttaagatgtcccgtgaagtccaggtgtttgagataacagagaacagcgccaaactccactgggagagggctgagccccccggtccttatttttatgacctcaccgtcacctcagcccatgatcagtccctggttctgaagcagaacctcacggtcacggaccgcgtcattggaggcctgctcgctgggcagacataccatgtggctgtggtctgctacctgaggtctcaggtcagagccacctaccacggaagtttcagtacaaagaaatctcagcccccacctccacagccagcaaggtcagcttctagttcaaccatcaatctaatggtgagcacagaaccattggctctcactgaaacagatatatgcaagttgccgaaagacgaaggaacttgcagggatttcatattaaaatggtactatgatccaaacaccaaaagctgtgcaagattctggtatggaggttgtggtggaaacgaaaacaaatttggatcacagaaagaatgtgaaaaggtttgcgctcctgtgctcgccaaacccggagtcatcagtgtgatgggaacctaagcgtgggtggccaacatcatatacctcttgaagaagaaggagtcagccatcgccaacttgtctctgtagaagctccgggtgtagattcccttgcactgtatcatttcatgctttgatttacactcgaactcgggagggaacatcctgctgcatgacctatcagtatggtgctaatgtgtctgtggaccctcgctctctgtctccaggcagttctctcgaatactttgaatgttgtgtaacagttagccactgctggtgtttatgtgaacattcctatcaatccaaattccctctggagtttcatgttatgcctgttgcaggcaaatgtaaagtctagaaaataatgcaaatgtcacggctactctatatacttttgcttggttcattttttttcccttttagttaagcatgactttagatgggaagcctgtgtatcgtggagaaacaagagaccaactttttcattccctgcccccaatttcccagactagatttcaagctaattttctttttctgaagcctctaacaaatgatctagttcagaaggaagcaaaatcccttaatctatgtgcaccgttgggaccaatgccttaattaaagaatttaaaaaagttgtaatagagaatatttttggcattcctctaatgttgtgtgttttttttttgtgtgtgctggagggaggggatttaattttaattttaaaatgtttaggaaatttatacaaagaaactttttaataaagtatattgaaagttaaaaaaaaaaaaaaaaaa

SEQ ID NO: 11534 - DNA, 10061 bp, Homo sapiens
cagtttggagctcagtcttccaccaaaggccgttcagttctcctgggctccagcctcctgcaaggactgcaagagttttcctccgcagctctgagtctccacttttttggtggagaaaggctgcaaaaagaaaaagagacgcagtgagtgggaaaagtatgcatcctattcaaacctaattgaatcgaggagcccagggacacacgccttcaggtttgctcaggggttcatatttggtgcttagacaaattcaaaatgaggaaacatcggcacttgcccttagtggccgtcttttgcctctttctctcaggctttcctacaactcatgcccagcagcagcaagcagatgtcaaaaatggtgcggctgctgatataatatttctagtggattcctcttggaccattggagaggaacatttccaacttgttcgagagtttctatatgatgttgtaaaatccttagctgtgggagaaaatgatttccattttgctctggtccagttcaacggaaacccacataccgagttcctgttaaatacgtatcgtactaaacaagaagtcctttctcatatttccaacatgtcttatattgggggaaccaatcagactggaaaaggattagaatacataatgcaaagccacctcaccaaggctgctggaagccgggccggtgacggagtccctcaggttatcgtagtgttaactgatggacactcgaaggatggccttgctctgccctcagcggaacttaagtctgctgatgttaacgtgtttgcaattggagttgaggatgcagatgaaggagcgttaaaagaaatagcaagtgaaccgctcaatatgcatatgttcaacctagagaattttacctcacttcatgacatagtaggaaacttagtgtcctgtgtgcattcatccgtgagtccagaaagggctggggacacggaaacccttaaagacatcacagcacaagactctgctgacattattttccttattgatggatcaaacaacaccggaagtgtcaatttcgcagtcattctcgacttccttgtaaatctccttgagaaactcccaattggaactcagcagatccgagtgggggtggtccagtttagcgatgagcccagaaccatgttctccttggacacctactccaccaaggcccaggttctgggtgcagtgaaagccctcgggtttgctggtggggagttggccaatatcggcctcgcccttgatttcgtggtggagaaccacttcacccgggcagggggcagccgcgtggaggaaggggttccccaggtgctggtcctcataagtgccgggccttctagtgacgagattcgctacggggtggtagcactgaagcaggctagcgtgttctcattcggccttggagcccaggccgcctccagggcagagcttcagcacatagctaccgatgacaacttggtgtttactgtcccggaattccgtagctttggggacctccaggagaaattactgccgtacattgttggcgtggcccaaaggcacattgtcttgaaaccgccaaccattgtcacacaagtcattgaagtcaacaagagagacatagtcttcctggtggatggctcatctgcactgggactggccaacttcaatgccatccgagacttcattgctaaagtcatccagaggctggaaatcggacaggatcttatccaggtggcagtggcccagtatgcagacactgtgaggcctgaattttatttcaatacccatccaacaaaaagggaagtcataaccgctgtgcggaaaatgaagcccctggacggctcggccctgtacacgggctctgctctagactttgttcgtaacaacctattcacgagttcagccggctaccgggctgccgaggggattcctaagcttttggtgctgatcacaggtggtaagtccctagatgaaatcagccagcctgcccaggagctgaagagaagcagcataatggcctttgccattgggaacaagggtgccgatcaggctgagctggaagagatcgctttcgactcctccctggtgttcatcccagctgagttccgagccgccccattgcaaggcatgctgcctggcttgctggcacctctcaggaccctctctggaacccctgaagttcactcaaacaaaagggatatcatctttcttttggatggatcagccaacgttggaaaaaccaatttcccttatgtgcgcgactttgtaatgaacctagttaacagccttgatattggaaatgacaatattcgtgttggtttagtgcaatttagtgacactcctgtaacggagttctctttaaacacataccagaccaagtcagatatccttggtcatctgaggcagctgcagctccagggaggttcgggcctgaacacaggctcagccctaagctatgtctatgccaaccacttcacggaagctggcggcagcaggatccgtgaacacgtgccgcagctcctgcttctgctcacagctgggcagtctgaggactcctatttgcaagctgccaacgccttgacacgcgcgggcatcctgactttttgtgtgggagctagccaggcgaataaggcagagcttgagcagattgcttttaacccaagcctggtgtatctcatggatgatttcagctccctgccagctttgcctcagcagctgattcagcccctaaccacatatgttagtggaggtgtggaggaagtaccactcgctcagccagagagcaagcgagacattctgttcctctttgacggctcagccaatcttgtgggccagttccctgttgtccgtgactttctctacaagattatcgatgagctcaatgtgaagccagaggggacccgaattgcggtggctcagtacagcgatgatgtcaaggtggagtcccgttttgatgagcaccagagtaagcctgagatcctgaatcttgtgaagagaatgaagatcaagacgggcaaagccctcaacctgggctacgcgctggactatgcacagaggtacatttttgtgaagtctgctggcagccggatcgaggatggagtgcttcagttcctggtgctgctggtcgcaggaaggtcatctgaccgtgtggatgggccagcaagtaacctgaagcagagtggggttgtgcctttcatcttccaagccaagaacgcagaccctgctgagttagagcagatcgtgctgtctccagcgtttatcctggctgcagagtcgcttcccaagattggagatcttcatccacagatagtgaatctcttaaaatcagtgcacaacggagcaccagcaccagtttcaggtgaaaaggacgtggtgtttctgcttgatggctctgagggcgtcaggagcggcttccctctgttgaaagagtttgtccagagagtggtggaaagcctggatgtgggccaggaccgggtccgcgtggccgtggtgcagtacagcgaccggaccaggcccgagttctacctgaattcatacatgaacaagcaggacgtcgtcaacgctgtccgccagctgaccctgctgggagggccgacccccaacaccggggccgccctggagtttgtcctgaggaacatcctggtcagctctgcgggaagcaggataacagaaggtgtgccccagctgctgatcgtcctcacggccgacaggtctggggatgatgtgcggaacccctccgtggtcgtgaagaggggtggggctgtgcccattggcattggcatcgggaacgctgacatcacagagatgcagaccatctccttcatcccggactttgccgtggccattcccacctttcgccagctggggaccgtccaacaggtcatctctgagagggtgacccagctcacccgcgaggagctgagcaggctgcagccggtgttgcagcctctaccgagcccaggtgttggtggcaagagggacgtggtctttctcatcgatgggtcccaaagtgccgggcctgagttccagtacgttcgcaccctcatagagaggctggttgactacctggacgtgggctttgacaccacccgggtggctgtcatccagttcagcgatgaccccaaggtggagttcctgctgaacgcccattccagcaaggatgaagtgcagaacgcggtgcagcggctgaggcccaagggagggcggcagatcaacgtgggcaatgccctggagtacgtgtccaggaacatcttcaagaggcccctggggagccgcattgaagagggcgtcccgcagttcctggtcctcatctcgtctggaaagtctgacgatgaggtggacgacccggcggtggagctcaagcagtttggcgtggcccctttcacgatcgccaggaacgcagaccaggaggagctggtgaagatctcgctgagccccgaatatgtgttctcggtgagcaccttccgggagctgcccagcctggagcagaaactgctgacgcccatcacgaccctgacctcagagcagatccagaagctcttagccagcactcgctatccacctccagtgcgagagttcagagagcttcccaacatagaagaaagaatcatgaactcgtttggaccctccgcagccactcctgcacctccaggggtggacacccctcctccttcacggccagagaagaagaaagcagacattgtgttcctgttggatggttccatcaacttcaggagggacagtttccaggaagtgcttcgttttgtgtctgaaatagtggacacagtttatgaagatggcgactccatccaagtggggcttgtccagtacaactctgaccccactgacgaattcttcctgaaggacttctctaccaagaggcagattattgacgccatcaacaaagtggtctacaaagggggaagacacgccaacactaaggtgggccttgagcacctgcgggtaaaccactttgtgcctgaggcaggcagccgcctggaccagcgggtccctcagattgcctttgtgatcacgggaggaaagtcggtggaagatgcacaggatgtgagcctggccctcacccagaggggggtcaaagtgtttgctgttggagtgaggaatatcgactcggaggaggttggaaagatagcgtccaacagcgccacagcgttccgcgtgggcaacgtccaggagctgtccgaactgagcgagcaagttttggaaactttgcatgatgcgatgcatgaaaccctttgccctggtgtaactgatgctgccaaagcttgtaatctggatgtgattctggggtttgatggttctagagaccagaatgtttttgtggcccagaagggcttcgagtccaaggtggacgccatcttgaacagaatcagccagatgcacagggtcagctgcagcggtggccgctcgcccaccgtgcgtgtgtcagtggtggccaacacgccctcgggcccggtggaggcctttgactttgacgagtaccagccagagatgctcgagaagttccggaacatgcgcagccagcacccctacgtcctcacggaggacaccctgaaggtctacctgaacaagttcagacagtcctcgccggacagcgtgaaggtggtcattcattttactgatggagcagacggagatctggctgatttacacagagcatctgagaacctccgccaagaaggagtccgtgccttgatcctggtgggccttgaacgagtggtcaacttggagcggctaatgcatctggagtttgggcgagggtttatgtatgacaggcccctgaggcttaacttgctggacttggattatgaactagcggagcagcttgacaacattgccgagaaagcttgctgtggggttccctgcaagtgctctgggcagaggggagaccgcgggcccatcggcagcatcgggccaaagggtattcctggagaagacggctaccgaggctatcctggtgatgagggtggacccggtgagcgtggtccgcctggtgtgaacggcactcaaggtttccagggctgcccgggccagagaggagtaaagggctctcggggattcccaggagagaagggcgaagtaggagaaattggactggatggtctggatggtgaagatggagacaaaggattgcctggttcttctggagagaaagggaatcctggaagaaggggtgataaaggacctcgaggagagaaaggagaaagaggagatgttgggattcgaggggacccgggtaacccaggacaagacagccaggagagaggacccaaaggagaaaccggtgacctcggccccatgggtgtcccagggagagatggagtacctggaggacctggagaaactgggaagaatggtggctttggccgaaggggaccccccggagctaagggcaacaagggcggtcctggccagccgggctttgagggagagcaggggaccagaggtgcacagggcccagctggtcctgctggtcctccagggctgataggagaacaaggcatttctggacctcggggaagcggaggtgccgctggtgctcctggagaacgaggcagaaccggtccactgggaagaaagggtgagcccggagagccaggaccaaaaggaggaatcgggaaccggggccctcgtggggagacgggagatgacgggagagacggagttggcagtgaaggacgcagaggcaaaaaaggagaaagaggattccctggatacccaggaccaaagggtaacccaggtgaacctgggctaaatggaacaacaggacccaaaggcatcagaggccgaaggggaaattcgggacctccagggatagttggacagaagggagaccctggctacccaggaccagctggtcccaagggcaacaggggcgactccatcgatcaatgtgccctcatccaaagcatcaaagataaatgcccttgctgttacgggcccctggagtgccccgtcttcccaacagaactagcctttgctttagacacctctgagggagtcaaccaagacactttcggccggatgcgagatgtggtcttgagtattgtgaatgacctgaccattgctgagagcaactgcccacggggggcccgggtggctgtggtcacctacaacaacgaggtgaccacggagatccggtttgctgactccaagaggaagtcggtcctcctggacaagattaagaaccttcaggtggctctgacatccaaacagcagagtctggagactgccatgtcgtttgtggccaggaacacatttaagcgtgtgaggaacggattcctaatgaggaaagtggctgttttcttcagcaacacacccacaagagcatccccacagctcagagaggctgtgctcaagctctcagatgcggggatcacccccttgttccttacaaggcaggaagaccggcagctcatcaacgctttgcagatcaataacacagcagtggggcatgcgcttgtcctgcctgcagggagagacctcacagacttcctggagaatgtcctcacgtgtcatgtttgcttggacatctgcaacatcgacccatcctgtggatttggcagttggaggccttccttcagggacaggagagcggcagggagcgatgtggacatcgacatggctttcatcttagacagcgctgagaccaccaccctgttccagttcaatgagatgaagaagtacatagcgtacctggtcagacaactggacatgagcccagatcccaaggcctcccagcacttcgccagagtggcagttgtgcagcacgcgccctctgagtccgtggacaatgccagcatgccacctgtgaaggtggaattctccctgactgactatggctccaaggagaagctggtggacttcctcagcaggggaatgacacagttgcagggaaccagggccttaggcagtgccattgaatacaccatagagaatgtctttgaaagtgccccaaacccacgggacctgaaaattgtggtcctgatgctgacgggcgaggtgccggagcagcagctggaggaggcccagagagtcatcctgcaggccaaatgcaagggctacttcttcgtggtcctgggcattggcaggaaggtgaacatcaaggaggtatacaccttcgccagtgagccaaacgacgtcttcttcaaattagtggacaagtccaccgagctcaacgaggagcctttgatgcgcttcgggaggctgttgccatccttcgtcagcagtgaaaatgctttttacttgtccccagatatcaggaaacagtgtgattggttccaaggggaccaacccacaaagaaccttgtgaagtttggtcacaaacaagtaaatgttccgaataacgttacttcaagtcctacatccaacccagtgacgacaacgaagccggtgactacgacgaagccggtgaccaccacaacaaagcctgtaaccaccacaacaaagcctgtgactattataaatcagccatctgtgaagccagccgctgcaaagccggcccctgcgaaacctgtggctgccaagcctgtggccacaaagatggccactgttagacccccagtggcggtgaagccagcaacggcagcgaagcctgtagcagcaaagccagcagctgtaagaccccccgctgctgctgctgcaaaaccagtggcgaccaagcctgaggtccctaggccacaggcagccaaaccagctgccaccaagccagccaccactaagcccatggttaagatgtcccgtgaagtccaggtgtttgagataacagagaacagcgccaaactccactgggagagggctgagccccccggtccttatttttatgacctcaccgtcacctcagcccatgatcagtccctggttctgaagcagaacctcacggtcacggaccgcgtcattggaggcctgctcgctgggcagacataccatgtggctgtggtctgctacctgaggtctcaggtcagagccacctaccacggaagtttcagtacaaagaaatctcagcccccacctccacagccagcaaggtcagcttctagttcaaccatcaatctaatggtgagcacagaaccattggctctcactgaaacagatatatgcaagttgccgaaagacgaaggaacttgcagggatttcatattaaaatggtactatgatccaaacaccaaaagctgtgcaagattctggtatggaggttgtggtggaaacgaaaacaaatttggatcacagaaagaatgtgaaaaggtttgcgctcctgtgctcgccaaacccggagtcatcagtgtgatgggaacctaagcgtgggtggccaacatcatatacctcttgaagaagaaggagtcagccatcgccaacttgtctctgtagaagctccgggtgtagattcccttgcactgtatcatttcatgctttgatttacactcgaactcgggagggaacatcctgctgcatgacctatcagtatggtgctaatgtgtctgtggaccctcgctctctgtctccaggcagttctctcgaatactttgaatgttgtgtaacagttagccactgctggtgtttatgtgaacattcctatcaatccaaattccctctggagtttcatgttatgcctgttgcaggcaaatgtaaagtctagaaaataatgcaaatgtcacggctactctatatacttttgcttggttcattttttttcccttttagttaagcatgactttagatgggaagcctgtgtatcgtggagaaacaagagaccaactttttcattccctgcccccaatttcccagactagatttcaagctaattttctttttctgaagcctctaacaaatgatctagttcagaaggaagcaaaatcccttaatctatgtgcaccgttgggaccaatgccttaattaaagaatttaaaaaagttgtaatagagaatatttttggcattcctctaatgttgtgtgttttttttttgtgtgtgctggagggaggggatttaattttaattttaaaatgtttaggaaatttatacaaagaaactttttaataaagtatattgaaagttaaaaaaaaaaaaaaaaaa

SEQ ID NO: 11535 - DNA, 2823 bp, Homo sapiens
ggcaggtgcttgttactgttaatgaaagcagatttaaagcaacaccaccatcactggagtatttttagttatatacgattgagactaccaagcatgttgctcttattcagtgtaatcctaatctcatgggtatccactgttgggggagaaggaacactttgtgattttccaaaaatacaccatggatttctgtatgatgaagaagattataaccctttttcccaagttcctacaggggaagttttctattactcctgtgaatataattttgtgtctccttcaaaatccttttggactcgcataacatgcacagaagaaggatggtcaccaacaccgaagtgtctcagaatgtgttcctttccttttgtgaaaaatggtcattctgaatcttcaggactaatacatctggaaggtgatactgtacaaattatttgcaacacaggatacagccttcaaaacaatgagaaaaacatttcgtgtgtagaacggggctggtccactcctcccatatgcagcttcactaaaggagaatgtcatgttccaattttagaagccaatgtagatgctcagccaaaaaaagaaagctacaaagttggagacgtgttgaaattctcctgcagaaaaaatcttataagagttggatcagactcagttcaatgttaccaatttgggtggtcacctaactttccaacatgcaaaggacaagtacgatcatgtggtccacctcctcaactctccaatggtgaagttaaggagataagaaaagaggaatatggacacaatgaagtagtggaatatgattgcaatcctaattttataataaacgggcctaagaaaatacaatgtgtggatggagaatggacaactttacccacttgtgttgaacaagtgaaaacatgtggatacatacctgaactcgagtacggttatgttcagccgtctgtccctccctatcaacatggagtttcagtcgaggtgaattgcagaaatgaatatgcaatgattggaaataacatgattacctgtattaatggaatatggacagagcttcctatgtgtgttgcaacacaccaacttaagaggtgcaaaatagcaggagttaatataaaaacattactcaagctatctgggaaagaatttaatcataattctagaatacgttacagatgttcagacatcttcagatacaggcactcagtctgtataaacgggaaatggaatcctgaagtagactgcacagaaaaaagggaacaattctgcccaccgccacctcagatacctaatgctcagaatatgacaaccacagtgaattatcaggatggagaaaaagtagctgttctctgtaaagaaaactatctacttccagaagcaaaagaaattgtatgtaaagatggacgatggcaatcattaccacgctgtgttgagtctactgcatattgtgggccccctccatctattaacaatggagataccacctcattcccattatcagtatatcctccagggtcaacagtgacgtaccgttgccagtccttctataaactccagggctctgtaactgtaacatgcagaaataaacagtggtcagaaccaccaagatgcctagatccatgtgtggtatctgaagaaaacatgaacaaaaataacatacagttaaaatggagaaacgatggaaaactctatgcaaaaacaggggatgctgttgaattccagtgtaaattcccacataaagcgatgatatcatcaccaccatttcgagcaatctgtcaggaagggaaatttgaatatcctatatgtgaatgaagcaagcataattttcctgaatatattcttcaaacatccatctacgctaaaagtagccattatgtagccaattctgtagttacttcttttattctttcaggtgttgtttaactcagttttatttagaactctggatttttagagctttagaaatttgtaagctgagagaacaatgtttcacttaataggagggtgtcttagtccatattacattgttataacagagtatcacagactggataacttctaaccaatagtttatttgtttcataaatctaaaagctgagaagtccaagatggtggggctgcctctggtgagggtcttctcgaagcatcataatatgctggaaggcatcacaacatggtggaagggatcacgtggcaaaagagcatgtacatgggagtgagagaaaaagagagagagagacagagtggcgggggccggggaggagcgcaaactcatcctttataaagacaccactcctgagataacaatccaatcccatgataatgacattaatccattcaagaagatagagctctcgtgacttaatcaccttctaaagatctcacctgacaacactgttgcattggcagttaagtttccacgtaaactttcggggacacattcaaaccacaggagaaactcaaattgttcctgggcaaatcacaacatggggaattttattcataaatgtccacagaaacagtaaatgttctcgcttcagaacttaattcatctaatccctcctgtttgtctcaaattataggataactttgaaactttctgaattaacgttatttaaaaggaaatgtagatgttattttagtctctatcttcaggttattatcacttaaaaacctgcgaaagctgtcaacttttgtggttgtagcaagtattaataaatatttataaatcctctaatgtaagtctagctacctatccaatactaaataccccttaaagtattaaatgcactatctgctgtaaacggaaaaaaaaaaaaaaaaaaaaaaaaa

SEQ ID NO: 11536 - DNA, 1964 bp, Homo sapiens
cccgcccacggtggcggggaaatacctaggcatggaagtggcatgacagggctcgtgtccctgtcatattttccactctccacgaggtcctgcgcgcttcaatcctgcaggcagcccggtttggggatgtggtccttgctgctctgcgggttgtccatcgcccttccactgtctgtcacagcagatggatgcaaggacatttttatgaaaaatgagatactttcagcaagccagccttttgcttttaattgtacattccctcccataacatctggggaagtcagtgtaacatggtataaaaattctagcaaaatcccagtgtccaaaatcatacagtctagaattcaccaggacgagacttggattttgtttctccccatggaatggggggactcaggagtctaccaatgtgttataaagggtagagacagctgtcatagaatacatgtaaacctaactgtttttgaaaaacattggtgtgacacttccataggtggtttaccaaatttatcagatgagtacaagcaaatattacatcttggaaaagatgatagtctcacatgtcatctgcacttcccgaagagttgtgttttgggtccaataaagtggtataaggactgtaacgagattaaaggggagcggttcactgttttggaaaccaggcttttggtgagcaatgtctcggcagaggacagagggaactacgcgtgtcaagccatactgacacactcagggaagcagtacgaggttttaaatggcatcactgtgagcattacagaaagagctggatatggaggaagtgtccctaaaatcatttatccaaaaaatcattcaattgaagtacagcttggtaccactctgattgtggactgcaatgtaacagacaccaaggataatacaaatctacgatgctggagagtcaataacactttggtggatgattactatgatgaatccaaacgaatcagagaaggggtggaaacccatgtctcttttcgggaacataatttgtacacagtaaacatcaccttcttggaagtgaaaatggaagattatggccttcctttcatgtgccacgctggagtgtccacagcatacattatattacagctcccagctccggattttcgagcttacttgataggagggcttatcgccttggtggctgtggctgtgtctgttgtgtacatatacaacatttttaagatcgacattgttctttggtatcgaagtgccttccattctacagagaccatagtagatgggaagctgtatgacgcctatgtcttataccccaagccccacaaggaaagccagaggcatgccgtggatgccctggtgttgaatatcctgcccgaggtgttggagagacaatgtggatataagttgtttatattcggcagagatgaattccctggacaagccgtggccaatgtcatcgatgaaaacgttaagctgtgcaggaggctgattgtcattgtggtccccgaatcgctgggctttggcctgttgaagaacctgtcagaagaacaaatcgcggtctacagtgccctgatccaggacgggatgaaggttattctcattgagctggagaaaatcgaggactacacagtcatgccagagtcaattcagtacatcaaacagaagcatggtgccatccggtggcatggggacttcacggagcagtcacagtgtatgaagaccaagttttggaagacagtgagataccacatgccgcccagaaggtgtcggccgtttcctccggtccagctgctgcagcacacaccttgctaccgcaccgcaggcccagaactaggctcaagaagaaagaagtgtactctcacgactggctaagacttgctggactgacacctatggctggaagatgacttgttttgctccatgtctcctcattcctacacctattttctgctgcaggatgaggctagggttagcattctaga

SEQ ID NO: 11537 - DNA, 4933 bp, Homo sapiens
aaccacgatgtctttggcacagcctctcatctgtcagatgggagcggggaccccggagagggagtcagccgaggtcctggcattccttgtgaacccccgtctgtgggtttctggtccagtgtcccttctccagattagatggcttaggcctcctctaagggggtgggcgtgcacatccggagagctgtctggtgtgcaggactgggctgcaggttaccctgaactgcaaccatcttagagcaaggcccagcttgcagcaggaggagctgcaggccgcccaccctagccacggcccctgccctggcaggaagcttccaagagtaaacactgcctaatcgtcccgcccagtagtgagcaggcctgtcccattccatactgaccagattcccagtcaccaaggccccctctcactccgctccactcctcgggctggctctcctgaggatgcaccagcgtcacccccgggcaagatgccctcccctctgtgtggccggaatccttgcctgtggctttctcctgggctgctggggaccctcccatttccagcagagttgtcttcaggctttggagccacaggccgtgtcttcttacttgagccctggtgctcccttaaaaggccgccctccttcccctggcttccagaggcagaggcagaggcagaggcgggctgcaggcggcatcctacacctggagctgctggtggccgtgggccccgatgtcttccaggctcaccaggaggacacagagcgctatgtgctcaccaacctcaacatcggggcagaactgcttcgggacccgtccctgggggctcagtttcgggtgcacctggtgaagatggtcattctgacagagcctgagggtgccccaaatatcacagccaacctcacctcgtccctgctgagcgtctgtgggtggagccagaccatcaaccctgaggacgacacggatcctggccatgctgacctggtcctctatatcactaggtttgacctggagttgcctgatggtaaccggcaggtgcggggcgtcacccagctgggcggtgcctgctccccaacctggagctgcctcattaccgaggacactggcttcgacctgggagtcaccattgcccatgagattgggcacagcttcggcctggagcacgacggcgcgcccggcagcggctgcggccccagcggacacgtgatggcttcggacggcgccgcgccccgcgccggcctcgcctggtccccctgcagccgccggcagctgctgagcctgctcagcgcaggacgggcgcgctgcgtgtgggacccgccgcggcctcaacccgggtccgcggggcacccgccggatgcgcagcctggcctctactacagcgccaacgagcagtgccgcgtggccttcggccccaaggctgtcgcctgcaccttcgccagggagcacctggatatgtgccaggccctctcctgccacacagacccgctggaccaaagcagctgcagccgcctcctcgttcctctcctggatgggacagaatgtggcgtggagaagtggtgctccaagggtcgctgccgctccctggtggagctgacccccatagcagcagtgcatgggcgctggtctagctggggtccccgaagtccttgctcccgctcctgcggaggaggtgtggtcaccaggaggcggcagtgcaacaaccccagacctgcctttggggggcgtgcatgtgttggtgctgacctccaggccgagatgtgcaacactcaggcctgcgagaagacccagctggagttcatgtcgcaacagtgcgccaggaccgacggccagccgctgcgctcctcccctggcggcgcctccttctaccactggggtgctgctgtaccacacagccaaggggatgctctgtgcagacacatgtgccgggccattggcgagagcttcatcatgaagcgtggagacagcttcctcgatgggacccggtgtatgccaagtggcccccgggaggacgggaccctgagcctgtgtgtgtcgggcagctgcaggacatttggctgtgatggtaggatggactcccagcaggtatgggacaggtgccaggtgtgtggtggggacaacagcacgtgcagcccacggaagggctctttcacagctggcagagcgagagaatatgtcacatttctgacagttacccccaacctgaccagtgtctacattgccaaccacaggcctctcttcacacacttggcggtgaggatcggagggcgctatgtcgtggctgggaagatgagcatctcccctaacaccacctacccctccctcctggaggatggtcgtgtcgagtacagagtggccctcaccgaggaccggctgccccgcctggaggagatccgcatctggggacccctccaggaagatgctgacatccaggtttacaggcggtatggcgaggagtatggcaacctcacccgcccagacatcaccttcacctacttccagcctaagccacggcaggcctgggtgtgggccgctgtgcgtgggccctgctcggtgagctgtggggcagggctgcgctgggtaaactacagctgcctggaccaggccaggaaggagttggtggagactgtccagtgccaagggagccagcagccaccagcgtggccagaggcctgcgtgctcgaaccctgccctccctactgggcggtgggagacttcggcccatgcagcgcctcctgtgggggcggcctgcgggagcggccagtgcgctgcgtggaggcccagggcagcctcctgaagacattgcccccagcccggtgcagagcaggggcccagcagccagctgtggcgctggaaacctgcaacccccagccctgccctgccaggtgggaggtgtcagagcccagctcatgcacatcagctggtggagcaggcctggccttggagaacgagacctgtgtgccaggggcagatggcctggaggctccagtgactgaggggcctggctccgtagatgagaagctgcctgcccctgagccctgtgtcgggatgtcatgtcctccaggctggggccatctggatgccacctctgcaggggagaaggctccctccccatggggcagcatcaggacgggggctcaagctgcacacgtgtggacccctgcggcagggtcgtgctccgtctcctgcgggcgaggtctgatggagctgcgtttcctgtgcatggactctgccctcagggtgcctgtccaggaagagctgtgtggcctggcaagcaagcctgggagccggcgggaggtctgccaggctgtcccgtgccctgctcggtggcagtacaagctggcggcctgcagcgtgagctgtgggagaggggtcgtgcggaggatcctgtattgtgcccgggcccatggggaggacgatggtgaggagatcctgttggacacccagtgccaggggctgcctcgcccggaaccccaggaggcctgcagcctggagccctgcccacctaggtggaaagtcatgtcccttggcccatgttcggccagctgtggccttggcactgctagacgctcggtggcctgtgtgcagctcgaccaaggccaggacgtggaggtggacgaggcggcctgtgcggcgctggtgcggcccgaggccagtgtcccctgtctcattgccgactgcacctaccgctggcatgttggcacctggatggagtgctctgtttcctgtggggatggcatccagcgccggcgtgacacctgcctcggaccccaggcccaggcgcctgtgccagctgatttctgccagcacttgcccaagccggtgactgtgcgtggctgctgggctgggccctgtgtgggacagggtacgcccagcctggtgccccacgaagaagccgctgctccaggacggaccacagccacccctgctggtgcctccctggagtggtcccaggcccggggcctgctcttctccccggctccccagcctcggcggctcctgcccgggccccaggaaaactcagtgcagtccagtgcctgtggcaggcagcaccttgagccaacaggaaccattgacatgcgaggcccagggcaggcagactgtgcagtggccattgggcggcccctcggggaggtggtgaccctccgcgtccttgagagttctctcaactgcagtgcgggggacatgttgctgctttggggccggctcacctggaggaagatgtgcaggaagctgttggacatgactttcagctccaagaccaacacgctggtggtgaggcagcgctgcgggcggccaggaggtggggtgctgctgcggtatgggagccagcttgctcctgaaaccttctacagagaatgtgacatgcagctctttgggccctggggtgaaatcgtgagcccctcgctgagtccagccacgagtaatgcagggggctgccggctcttcattaatgtggctccgcacgcacggattgccatccatgccctggccaccaacatgggcgctgggaccgagggagccaatgccagctacatcttgatccgggacacccacagcttgaggaccacagcgttccatgggcagcaggtgctctactgggagtcagagagcagccaggctgagatggagttcagcgagggcttcctgaaggctcaggccagcctgcggggccagtactggaccctccaatcatgggtaccggagatgcaggaccctcagtcctggaagggaaaggaaggaacctgagggtcattgaacatttgttccgtgtctggccagccctggagggttgacccctggtctcagtgctttccaattcgaactttttccaatcttaggtatctactttagagtcttctccaatgtccaaaaggctagggggttggaggtggggactctggaaaagcagcccccatttcctcgggtaccaataaataaaacatgcaggctg

SEQ ID NO: 11538 - DNA, 4765 bp, Homo sapiens
aaccacgatgtctttggcacagcctctcatctgtcagatgggagcggggaccccggagagggagtcagccgaggtcctggcattccttgtgaacccccgtctgtgggtttctggtccagtgtcccttctccagattagatggcttaggcctcctctaagggggtgggcgtgcacatccggagagctgtctggtgtgcaggactgggctgcaggttaccctgaactgcaaccatcttagagcaaggcccagcttgcagcaggaggagctgcaggccgcccaccctagccacggcccctgccctggcaggaagcttccaagagtaaacactgcctaatcgtcccgcccagtagtgagcaggcctgtcccattccatactgaccagattcccagtcaccaaggccccctctcactccgctccactcctcgggctggctctcctgaggatgcaccagcgtcacccccgggcaagatgccctcccctctgtgtggccggaatccttgcctgtggctttctcctgggctgctggggaccctcccatttccagcagagttgtcttcaggctttggagccacaggccgtgtcttcttacttgagccctggtgctcccttaaaaggccgccctccttcccctggcttccagaggcagaggcagaggcagaggcgggctgcaggcggcatcctacacctggagctgctggtggccgtgggccccgatgtcttccaggctcaccaggaggacacagagcgctatgtgctcaccaacctcaacatcggggcagaactgcttcgggacccgtccctgggggctcagtttcgggtgcacctggtgaagatggtcattctgacagagcctgagggtgccccaaatatcacagccaacctcacctcgtccctgctgagcgtctgtgggtggagccagaccatcaaccctgaggacgacacggatcctggccatgctgacctggtcctctatatcactaggtttgacctggagttgcctgatggtaaccggcaggtgcggggcgtcacccagctgggcggtgcctgctccccaacctggagctgcctcattaccgaggacactggcttcgacctgggagtcaccattgcccatgagattgggcacagcttcggcctggagcacgacggcgcgcccggcagcggctgcggccccagcggacacgtgatggcttcggacggcgccgcgccccgcgccggcctcgcctggtccccctgcagccgccggcagctgctgagcctgctcagcgcaggacgggcgcgctgcgtgtgggacccgccgcggcctcaacccgggtccgcggggcacccgccggatgcgcagcctggcctctactacagcgccaacgagcagtgccgcgtggccttcggccccaaggctgtcgcctgcaccttcgccagggagcacctggatatgtgccaggccctctcctgccacacagacccgctggaccaaagcagctgcagccgcctcctcgttcctctcctggatgggacagaatgtggcgtggagaagtggtgctccaagggtcgctgccgctccctggtggagctgacccccatagcagcagtgcatgggcgctggtctagctggggtccccgaagtccttgctcccgctcctgcggaggaggtgtggtcaccaggaggcggcagtgcaacaaccccagacctgcctttggggggcgtgcatgtgttggtgctgacctccaggccgagatgtgcaacactcaggcctgcgagaagacccagctggagttcatgtcgcaacagtgcgccaggaccgacggccagccgctgcgctcctcccctggcggcgcctccttctaccactggggtgctgctgtaccacacagccaaggggatgctctgtgcagacacatgtgccgggccattggcgagagcttcatcatgaagcgtggagacagcttcctcgatgggacccggtgtatgccaagtggcccccgggaggacgggaccctgagcctgtgtgtgtcgggcagctgcaggacatttggctgtgatggtaggatggactcccagcaggtatgggacaggtgccaggtgtgtggtggggacaacagcacgtgcagcccacggaagggctctttcacagctggcagagcgagagaatatgtcacatttctgacagttacccccaacctgaccagtgtctacattgccaaccacaggcctctcttcacacacttggcggtgaggatcggagggcgctatgtcgtggctgggaagatgagcatctcccctaacaccacctacccctccctcctggaggatggtcgtgtcgagtacagagtggccctcaccgaggaccggctgccccgcctggaggagatccgcatctggggacccctccaggaagatgctgacatccaggtttacaggcggtatggcgaggagtatggcaacctcacccgcccagacatcaccttcacctacttccagcctaagccacggcaggcctgggtgtgggccgctgtgcgtgggccctgctcggtgagctgtggggcagggctgcgctgggtaaactacagctgcctggaccaggccaggaaggagttggtggagactgtccagtgccaagggagccagcagccaccagcgtggccagaggcctgcgtgctcgaaccctgccctccctactgggcggtgggagacttcggcccatgcagcgcctcctgtgggggcggcctgcgggagcggccagtgcgctgcgtggaggcccagggcagcctcctgaagacattgcccccagcccggtgcagagcaggggcccagcagccagctgtggcgctggaaacctgcaacccccagccctgccctgccaggtgggaggtgtcagagcccagctcatgcacatcagctggtggagcaggcctggccttggagaacgagacctgtgtgccaggggcagatggcctggaggctccagtgactgaggggcctggctccgtagatgagaagctgcctgcccctgagccctgtgtcgggatgtcatgtcctccaggctggggccatctggatgccacctctgcaggggagaaggctccctccccatggggcagcatcaggacgggggctcaagctgcacacgtgtggacccctgcggcagggtcgtgctccgtctcctgcgggcgaggtctgatggagctgcgtttcctgtgcatggactctgccctcagggtgcctgtccaggaagagctgtgtggcctggcaagcaagcctgggagccggcgggaggtctgccaggctgtcccgtgccctgctcggtggcagtacaagctggcggcctgcagcgtgagctgtgggagaggggtcgtgcggaggatcctgtattgtgcccgggcccatggggaggacgatggtgaggagatcctgttggacacccagtgccaggggctgcctcgcccggaaccccaggaggcctgcagcctggagccctgcccacctaggtggaaagtcatgtcccttggcccatgttcggccagctgtggccttggcactgctagacgctcggtggcctgtgtgcagctcgaccaaggccaggacgtggaggtggacgaggcggcctgtgcggcgctggtgcggcccgaggccagtgtcccctgtctcattgccgactgcacctaccgctggcatgttggcacctggatggagtgctctgtttcctgtggggatggcatccagcgccggcgtgacacctgcctcggaccccaggcccaggcgcctgtgccagctgatttctgccagcacttgcccaagccggtgactgtgcgtggctgctgggctgggccctgtgtgggacagggtgcctgtggcaggcagcaccttgagccaacaggaaccattgacatgcgaggcccagggcaggcagactgtgcagtggccattgggcggcccctcggggaggtggtgaccctccgcgtccttgagagttctctcaactgcagtgcgggggacatgttgctgctttggggccggctcacctggaggaagatgtgcaggaagctgttggacatgactttcagctccaagaccaacacgctggtggtgaggcagcgctgcgggcggccaggaggtggggtgctgctgcggtatgggagccagcttgctcctgaaaccttctacagagaatgtgacatgcagctctttgggccctggggtgaaatcgtgagcccctcgctgagtccagccacgagtaatgcagggggctgccggctcttcattaatgtggctccgcacgcacggattgccatccatgccctggccaccaacatgggcgctgggaccgagggagccaatgccagctacatcttgatccgggacacccacagcttgaggaccacagcgttccatgggcagcaggtgctctactgggagtcagagagcagccaggctgagatggagttcagcgagggcttcctgaaggctcaggccagcctgcggggccagtactggaccctccaatcatgggtaccggagatgcaggaccctcagtcctggaagggaaaggaaggaacctgagggtcattgaacatttgttccgtgtctggccagccctggagggttgacccctggtctcagtgctttccaattcgaactttttccaatcttaggtatctactttagagtcttctccaatgtccaaaaggctagggggttggaggtggggactctggaaaagcagcccccatttcctcgggtaccaataaataaaacatgcaggctg

SEQ ID NO: 11539 - DNA, 4672 bp, Homo sapiens
aaccacgatgtctttggcacagcctctcatctgtcagatgggagcggggaccccggagagggagtcagccgaggtcctggcattccttgtgaacccccgtctgtgggtttctggtccagtgtcccttctccagattagatggcttaggcctcctctaagggggtgggcgtgcacatccggagagctgtctggtgtgcaggactgggctgcaggttaccctgaactgcaaccatcttagagcaaggcccagcttgcagcaggaggagctgcaggccgcccaccctagccacggcccctgccctggcaggaagcttccaagagtaaacactgcctaatcgtcccgcccagtagtgagcaggcctgtcccattccatactgaccagattcccagtcaccaaggccccctctcactccgctccactcctcgggctggctctcctgaggatgcaccagcgtcacccccgggcaagatgccctcccctctgtgtggccggaatccttgcctgtggctttctcctgggctgctggggaccctcccatttccagcagagttgtcttcaggctttggagccacaggccgtgtcttcttacttgagccctggtgctcccttaaaaggccgccctccttcccctggcttccagaggcagaggcagaggcagaggcgggctgcaggcggcatcctacacctggagctgctggtggccgtgggccccgatgtcttccaggctcaccaggaggacacagagcgctatgtgctcaccaacctcaacatcggggcagaactgcttcgggacccgtccctgggggctcagtttcgggtgcacctggtgaagatggtcattctgacagagcctgagggtgccccaaatatcacagccaacctcacctcgtccctgctgagcgtctgtgggtggagccagaccatcaaccctgaggacgacacggatcctggccatgctgacctggtcctctatatcactaggtttgacctggagttgcctgatggtaaccggcaggtgcggggcgtcacccagctgggcggtgcctgctccccaacctggagctgcctcattaccgaggacactggcttcgacctgggagtcaccattgcccatgagattgggcacagcttcggcctggagcacgacggcgcgcccggcagcggctgcggccccagcggacacgtgatggcttcggacggcgccgcgccccgcgccggcctcgcctggtccccctgcagccgccggcagctgctgagcctgctcagcgccaacgagcagtgccgcgtggccttcggccccaaggctgtcgcctgcaccttcgccagggagcacctggatatgtgccaggccctctcctgccacacagacccgctggaccaaagcagctgcagccgcctcctcgttcctctcctggatgggacagaatgtggcgtggagaagtggtgctccaagggtcgctgccgctccctggtggagctgacccccatagcagcagtgcatgggcgctggtctagctggggtccccgaagtccttgctcccgctcctgcggaggaggtgtggtcaccaggaggcggcagtgcaacaaccccagacctgcctttggggggcgtgcatgtgttggtgctgacctccaggccgagatgtgcaacactcaggcctgcgagaagacccagctggagttcatgtcgcaacagtgcgccaggaccgacggccagccgctgcgctcctcccctggcggcgcctccttctaccactggggtgctgctgtaccacacagccaaggggatgctctgtgcagacacatgtgccgggccattggcgagagcttcatcatgaagcgtggagacagcttcctcgatgggacccggtgtatgccaagtggcccccgggaggacgggaccctgagcctgtgtgtgtcgggcagctgcaggacatttggctgtgatggtaggatggactcccagcaggtatgggacaggtgccaggtgtgtggtggggacaacagcacgtgcagcccacggaagggctctttcacagctggcagagcgagagaatatgtcacatttctgacagttacccccaacctgaccagtgtctacattgccaaccacaggcctctcttcacacacttggcggtgaggatcggagggcgctatgtcgtggctgggaagatgagcatctcccctaacaccacctacccctccctcctggaggatggtcgtgtcgagtacagagtggccctcaccgaggaccggctgccccgcctggaggagatccgcatctggggacccctccaggaagatgctgacatccaggtttacaggcggtatggcgaggagtatggcaacctcacccgcccagacatcaccttcacctacttccagcctaagccacggcaggcctgggtgtgggccgctgtgcgtgggccctgctcggtgagctgtggggcagggctgcgctgggtaaactacagctgcctggaccaggccaggaaggagttggtggagactgtccagtgccaagggagccagcagccaccagcgtggccagaggcctgcgtgctcgaaccctgccctccctactgggcggtgggagacttcggcccatgcagcgcctcctgtgggggcggcctgcgggagcggccagtgcgctgcgtggaggcccagggcagcctcctgaagacattgcccccagcccggtgcagagcaggggcccagcagccagctgtggcgctggaaacctgcaacccccagccctgccctgccaggtgggaggtgtcagagcccagctcatgcacatcagctggtggagcaggcctggccttggagaacgagacctgtgtgccaggggcagatggcctggaggctccagtgactgaggggcctggctccgtagatgagaagctgcctgcccctgagccctgtgtcgggatgtcatgtcctccaggctggggccatctggatgccacctctgcaggggagaaggctccctccccatggggcagcatcaggacgggggctcaagctgcacacgtgtggacccctgcggcagggtcgtgctccgtctcctgcgggcgaggtctgatggagctgcgtttcctgtgcatggactctgccctcagggtgcctgtccaggaagagctgtgtggcctggcaagcaagcctgggagccggcgggaggtctgccaggctgtcccgtgccctgctcggtggcagtacaagctggcggcctgcagcgtgagctgtgggagaggggtcgtgcggaggatcctgtattgtgcccgggcccatggggaggacgatggtgaggagatcctgttggacacccagtgccaggggctgcctcgcccggaaccccaggaggcctgcagcctggagccctgcccacctaggtggaaagtcatgtcccttggcccatgttcggccagctgtggccttggcactgctagacgctcggtggcctgtgtgcagctcgaccaaggccaggacgtggaggtggacgaggcggcctgtgcggcgctggtgcggcccgaggccagtgtcccctgtctcattgccgactgcacctaccgctggcatgttggcacctggatggagtgctctgtttcctgtggggatggcatccagcgccggcgtgacacctgcctcggaccccaggcccaggcgcctgtgccagctgatttctgccagcacttgcccaagccggtgactgtgcgtggctgctgggctgggccctgtgtgggacagggtgcctgtggcaggcagcaccttgagccaacaggaaccattgacatgcgaggcccagggcaggcagactgtgcagtggccattgggcggcccctcggggaggtggtgaccctccgcgtccttgagagttctctcaactgcagtgcgggggacatgttgctgctttggggccggctcacctggaggaagatgtgcaggaagctgttggacatgactttcagctccaagaccaacacgctggtggtgaggcagcgctgcgggcggccaggaggtggggtgctgctgcggtatgggagccagcttgctcctgaaaccttctacagagaatgtgacatgcagctctttgggccctggggtgaaatcgtgagcccctcgctgagtccagccacgagtaatgcagggggctgccggctcttcattaatgtggctccgcacgcacggattgccatccatgccctggccaccaacatgggcgctgggaccgagggagccaatgccagctacatcttgatccgggacacccacagcttgaggaccacagcgttccatgggcagcaggtgctctactgggagtcagagagcagccaggctgagatggagttcagcgagggcttcctgaaggctcaggccagcctgcggggccagtactggaccctccaatcatgggtaccggagatgcaggaccctcagtcctggaagggaaaggaaggaacctgagggtcattgaacatttgttccgtgtctggccagccctggagggttgacccctggtctcagtgctttccaattcgaactttttccaatcttaggtatctactttagagtcttctccaatgtccaaaaggctagggggttggaggtggggactctggaaaagcagcccccatttcctcgggtaccaataaataaaacatgcaggctg

SEQ ID NO: 11540 - DNA, 4098 bp, Homo sapiens
gacggtcggctgacaggctccacagagctccactcacgctcaggccctggacggacaggcagtccaacggaacagaaacatccctcagccccacaggcacgatctgttcctcctgggaagatgcagaggctcatgatgctcctcgccacatcgggcgcctgcctgggcctgctggcagtggcagcagtggcagcagcaggtgctaaccctgcccaacgggacacccacagcctgctgcccacccaccggcgccaaaagagagattggatttggaaccagatgcacattgatgaagagaaaaacacctcacttccccatcatgtaggcaagatcaagtcaagcgtgagtcgcaagaatgccaagtacctgctcaaaggagaatatgtgggcaaggtcttccgggtcgatgcagagacaggagacgtgttcgccattgagaggctggaccgggagaatatctcagagtaccacctcactgctgtcattgtggacaaggacactggtgaaaacctggagactccttccagcttcaccatcaaagttcatgacgtgaacgacaactggcctgtgttcacgcatcggttgttcaatgcgtccgtgcctgagtcgtcggctgtggggacctcagtcatctctgtgacagcagtggatgcagacgaccccactgtgggagaccacgcctctgtcatgtaccaaatcctgaaggggaaagagtattttgccatcgataattctggacgtattatcacaataacgaaaagcttggaccgagagaagcaggccaggtatgagatcgtggtggaagcgcgagatgcccagggcctccggggggactcgggcacggccaccgtgctggtcactctgcaagacatcaatgacaacttccccttcttcacccagaccaagtacacatttgtcgtgcctgaagacacccgtgtgggcacctctgtgggctctctgtttgttgaggacccagatgagccccagaaccggatgaccaagtacagcatcttgcggggcgactaccaggacgctttcaccattgagacaaaccccgcccacaacgagggcatcatcaagcccatgaagcctctggattatgaatacatccagcaatacagcttcatcgtcgaggccacagaccccaccatcgacctccgatacatgagccctcccgcgggaaacagagcccaggtcattatcaacatcacagatgtggacgagccccccattttccagcagcctttctaccacttccagctgaaggaaaaccagaagaagcctctgattggcacagtgctggccatggaccctgatgcggctaggcatagcattggatactccatccgcaggaccagtgacaagggccagttcttccgagtcacaaaaaagggggacatttacaatgagaaagaactggacagagaagtctacccctggtataacctgactgtggaggccaaagaactggattccactggaacccccacaggaaaagaatccattgtgcaagtccacattgaagttttggatgagaatgacaatgccccggagtttgccaagccctaccagcccaaagtgtgtgagaacgctgtccatggccagctggtcctgcagatctccgcaatagacaaggacataacaccacgaaacgtgaagttcaaattcaccttgaatactgagaacaactttaccctcacggataatcacgataacacggccaacatcacagtcaagtatgggcagtttgaccgggagcataccaaggtccacttcctacccgtggtcatctcagacaatgggatgccaagtcgcacgggcaccagcacgctgaccgtggccgtgtgcaagtgcaacgagcagggcgagttcaccttctgcgaggatatggccgcccaggtgggcgtgagcatccaggcagtggtagccatcttactctgcatcctcaccatcacagtgatcaccctgctcatcttcctgcggcggcggctccggaagcaggcccgcgcgcacggcaagagcgtgccggagatccacgagcagctggtcacctacgacgaggagggcggcggcgagatggacaccaccagctacgatgtgtcggtgctcaactcggtgcgccgcggcggggccaagcccccgcggcccgcgctggacgcccggccttccctctatgcgcaggtgcagaagccaccgaggcacgcgcctggggcacacggagggcccggggagatggcagccatgatcgaggtgaagaaggacgaggcggaccacgacggcgacggccccccctacgacacgctgcacatctacggctacgagggctccgagtccatagccgagtccctcagctccctgggcaccgactcatccgactctgacgtggattacgacttccttaacgactggggacccaggtttaagatgctggctgagctgtacggctcggacccccgggaggagctgctgtattaggcggccgaggtcactctgggcctggggacccaaaccccctgcagcccaggccagtcagacgccaggcaccacagcctccaaaaatggcagtgactccccagcccagcaccccttcctcgtgggtcccagagacctcatcagccttgggatagcaaactccaggttcctgaaatatccaggaatatatgtcagtgatgactattctcaaatgctggcaaatccaggctggtgttctgtctgggctcagacatccacataaccctgtcacccacagaccgccgtctaactcaaagacttcctctggctccccaaggctgcaaagcaaaacagactgtgtttaactgctgcagggtctttttctagggtccctgaacgccctggtaaggctggtgaggtcctggtgcctatctgcctggaggcaaaggcctggacagcttgacttgtggggcaggattctctgcagcccattcccaagggagactgaccatcatgccctctctcgggagccctagccctgctccaactccatactccactccaagtgccccaccactccccaacccctctccaggcctgtcaagagggaggaaggggccccatggcagctcctgaccttgggtcctgaagtgacctcactggcctgccatgccagtaactgtgctgtactgagcactgaaccacattcagggaaatggcttattaaactttgaagcaactgtgaattcattctggaggggcagtggagatcaggagtgacagatcacagggtgagggccacctccacacccaccccctctggagaaggcctggaagagctgagaccttgctttgagactcctcagcacccctccagttttgcctgagaaggggcagatgttcccggagcagaagacgtctccccttctctgcctcacctggtcgccaatccatgctctctttcttttctctgtctactccttatcccttggtttagaggaacccaagatgtggcctttagcaaaactggacaatgtccaaacccactcatgactgcatgacggagccgagccatgtgtctttacacctcgctgttgtcacatctcagggaactgaccctcaggcacaccttgcagaaggcaaggccctgccctgcccaacctctgtggtcacccatgcatcttccactggaacgtttcactgcaaacacaccttggagaagtggcatcagtcaacagagaggggcagggaaggagacaccaagctcacccttcgtcatggaccgaggttcccactctgggcaaagcccctcacactgcaagggattgtagataacactgacttgtttgttttaaccaataactagcttcttataatgatttttttactaatgatacttacaagtttctagctctcacagacatatagaataagggtttttgcataataagcaggttgttatttaggttaacaatattaattcaggttttttagttggaaaaacaattcctgtaaccttctattttctataattgtagtaattgctctacagataatgtctatatattggccaaactggtgcatgacaagtactgtatttttttatacctaaataaagaaaaatctttagcctgggcaacaaaaaaa

SEQ ID NO: 11541 - DNA, 5820 bp, Homo sapiens
agccgctgcgcccgagctggcctgcgagttcagggctcctgtcgctctccaggagcaacctctactccggacgcacaggcattccccgcgcccctccagccctcgccgccctcgccaccgctcccggccgccgcgctccggtacacacaggatccctgctgggcaccaacagctccaccatggggctggcctggggactaggcgtcctgttcctgatgcatgtgtgtggcaccaaccgcattccagagtctggcggagacaacagcgtgtttgacatctttgaactcaccggggccgcccgcaaggggtctgggcgccgactggtgaagggccccgacccttccagcccagctttccgcatcgaggatgccaacctgatcccccctgtgcctgatgacaagttccaagacctggtggatgctgtgcgggcagaaaagggtttcctccttctggcatccctgaggcagatgaagaagacccggggcacgctgctggccctggagcggaaagaccactctggccaggtcttcagcgtggtgtccaatggcaaggcgggcaccctggacctcagcctgaccgtccaaggaaagcagcacgtggtgtctgtggaagaagctctcctggcaaccggccagtggaagagcatcaccctgtttgtgcaggaagacagggcccagctgtacatcgactgtgaaaagatggagaatgctgagttggacgtccccatccaaagcgtcttcaccagagacctggccagcatcgccagactccgcatcgcaaaggggggcgtcaatgacaatttccagggggtgctgcagaatgtgaggtttgtctttggaaccacaccagaagacatcctcaggaacaaaggctgctccagctctaccagtgtcctcctcacccttgacaacaacgtggtgaatggttccagccctgccatccgcactaactacattggccacaagacaaaggacttgcaagccatctgcggcatctcctgtgatgagctgtccagcatggtcctggaactcaggggcctgcgcaccattgtgaccacgctgcaggacagcatccgcaaagtgactgaagagaacaaagagttggccaatgagctgaggcggcctcccctatgctatcacaacggagttcagtacagaaataacgaggaatggactgttgatagctgcactgagtgtcactgtcagaactcagttaccatctgcaaaaaggtgtcctgccccatcatgccctgctccaatgccacagttcctgatggagaatgctgtcctcgctgttggcccagcgactctgcggacgatggctggtctccatggtccgagtggacctcctgttctacgagctgtggcaatggaattcagcagcgcggccgctcctgcgatagcctcaacaaccgatgtgagggctcctcggtccagacacggacctgccacattcaggagtgtgacaagagatttaaacaggatggtggctggagccactggtccccgtggtcatcttgttctgtgacatgtggtgatggtgtgatcacaaggatccggctctgcaactctcccagcccccagatgaacgggaaaccctgtgaaggcgaagcgcgggagaccaaagcctgcaagaaagacgcctgccccatcaatggaggctggggtccttggtcaccatgggacatctgttctgtcacctgtggaggaggggtacagaaacgtagtcgtctctgcaacaaccccacaccccagtttggaggcaaggactgcgttggtgatgtaacagaaaaccagatctgcaacaagcaggactgtccaattgatggatgcctgtccaatccctgctttgccggcgtgaagtgtactagctaccctgatggcagctggaaatgtggtgcttgtccccctggttacagtggaaatggcatccagtgcacagatgttgatgagtgcaaagaagtgcctgatgcctgcttcaaccacaatggagagcaccggtgtgagaacacggaccccggctacaactgcctgccctgccccccacgcttcaccggctcacagcccttcggccagggtgtcgaacatgccacggccaacaaacaggtgtgcaagccccgtaacccctgcacggatgggacccacgactgcaacaagaacgccaagtgcaactacctgggccactatagcgaccccatgtaccgctgcgagtgcaagcctggctacgctggcaatggcatcatctgcggggaggacacagacctggatggctggcccaatgagaacctggtgtgcgtggccaatgcgacttaccactgcaaaaaggataattgccccaaccttcccaactcagggcaggaagactatgacaaggatggaattggtgatgcctgtgatgatgacgatgacaatgataaaattccagatgacagggacaactgtccattccattacaacccagctcagtatgactatgacagagatgatgtgggagaccgctgtgacaactgtccctacaaccacaacccagatcaggcagacacagacaacaatggggaaggagacgcctgtgctgcagacattgatggagacggtatcctcaatgaacgggacaactgccagtacgtctacaatgtggaccagagagacactgatatggatggggttggagatcagtgtgacaattgccccttggaacacaatccggatcagctggactctgactcagaccgcattggagatacctgtgacaacaatcaggatattgatgaagatggccaccagaacaatctggacaactgtccctatgtgcccaatgccaaccaggctgaccatgacaaagatggcaagggagatgcctgtgaccacgatgatgacaacgatggcattcctgatgacaaggacaactgcagactcgtgcccaatcccgaccagaaggactctgacggcgatggtcgaggtgatgcctgcaaagatgattttgaccatgacagtgtgccagacatcgatgacatctgtcctgagaatgttgacatcagtgagaccgatttccgccgattccagatgattcctctggaccccaaagggacatcccaaaatgaccctaactgggttgtacgccatcagggtaaagaactcgtccagactgtcaactgtgatcctggactcgctgtaggttatgatgagtttaatgctgtggacttcagtggcaccttcttcatcaacaccgaaagggacgatgactatgctggatttgtctttggctaccagtccagcagccgcttttatgttgtgatgtggaagcaagtcacccagtcctactgggacaccaaccccacgagggctcagggatactcgggcctttctgtgaaagttgtaaactccaccacagggcctggcgagcacctgcggaacgccctgtggcacacaggaaacacccctggccaggtgcgcaccctgtggcatgaccctcgtcacataggctggaaagatttcaccgcctacagatggcgtctcagccacaggccaaagacgggtttcattagagtggtgatgtatgaagggaagaaaatcatggctgactcaggacccatctatgataaaacctatgctggtggtagactagggttgtttgtcttctctcaagaaatggtgttcttctctgacctgaaatacgaatgtagagatccctaatcatcaaattgttgattgaaagactgatcataaaccaatgctggtattgcaccttctggaactatgggcttgagaaaacccccaggatcacttctccttggcttccttcttttctgtgcttgcatcagtgtggactcctagaacgtgcgacctgcctcaagaaaatgcagttttcaaaaacagactcagcattcagcctccaatgaataagacatcttccaagcatataaacaattgctttggtttccttttgaaaaagcatctacttgcttcagttgggaaggtgcccattccactctgcctttgtcacagagcagggtgctattgtgaggccatctctgagcagtggactcaaaagcattttcaggcatgtcagagaagggaggactcactagaattagcaaacaaaaccaccctgacatcctccttcaggaacacggggagcagaggccaaagcactaaggggagggcgcatacccgagacgattgtatgaagaaaatatggaggaactgttacatgttcggtactaagtcattttcaggggattgaaagactattgctggatttcatgatgctgactggcgttagctgattaacccatgtaaataggcacttaaatagaagcaggaaagggagacaaagactggcttctggacttcctccctgatccccacccttactcatcacctgcagtggccagaattagggaatcagaatcaaaccagtgtaaggcagtgctggctgccattgcctggtcacattgaaattggtggcttcattctagatgtagcttgtgcagatgtagcaggaaaataggaaaacctaccatctcagtgagcaccagctgcctcccaaaggaggggcagccgtgcttatatttttatggttacaatggcacaaaattattatcaacctaactaaaacattccttttctcttttttcctgaattatcatggagttttctaattctctcttttggaatgtagattttttttaaatgctttacgatgtaaaatatttattttttacttattctggaagatctggctgaaggattattcatggaacaggaagaagcgtaaagactatccatgtcatctttgttgagagtcttcgtgactgtaagattgtaaatacagattatttattaactctgttctgcctggaaatttaggcttcatacggaaagtgtttgagagcaagtagttgacatttatcagcaaatctcttgcaagaacagcacaaggaaaatcagtctaataagctgctctgccccttgtgctcagagtggatgttatgggattctttttttctctgttttatcttttcaagtggaattagttggttatccatttgcaaatgttttaaattgcaaagaaagccatgaggtcttcaatactgttttaccccatcccttgtgcatatttccagggagaaggaaagcatatacacttttttctttcatttttccaaaagagaaaaaaatgacaaaaggtgaaacttacatacaaatattacctcatttgttgtgtgactgagtaaagaatttttggatcaagcggaaagagtttaagtgtctaacaaacttaaagctactgtagtacctaaaaagtcagtgttgtacatagcataaaaactctgcagagaagtattcccaataaggaaatagcattgaaatgttaaatacaatttctgaaagttatgttttttttctatcatctggtataccattgctttatttttataaattattttctcattgccattggaatagatatctcagattgtgtagatatgctatttaaataatttatcaggaaatactgcctgtagagttagtatttctatttttatataatgtttgcacactgaattgaagaattgttggttttttcttttttttgttttgtttttttttttttttttttttgcttttgacctcccatttttactatttgccaatacctttttctaggaatgtgcttttttttgtacacatttttatccattttacattctaaagcagtgtaagttgtatattactgtttcttatgtacaaggaacaacaataaatcatatggaaatttatatttataaaaaaaaaaaaaaaaaaaaaaaaaaaaaaa

SEQ ID NO: 11542 - DNA, 1035 bp, Homo sapiens
atctccctccaggcagcccttggctggtccctgcgagcccgtggagactgccagagatgtcctctttcggttacaggaccctgactgtggccctcttcaccctgatctgctgtccaggatcggatgagaaggtattcgaggtacacgtgaggccaaagaagctggcggttgagcccaaagggtccctcgaggtcaactgcagcaccacctgtaaccagcctgaagtgggtggtctggagacctctctaaataagattctgctggacgaacaggctcagtggaaacattacttggtctcaaacatctcccatgacacggtcctccaatgccacttcacctgctccgggaagcaggagtcaatgaattccaacgtcagcgtgtaccagcctccaaggcaggtcatcctgacactgcaacccactttggtggctgtgggcaagtccttcaccattgagtgcagggtgcccaccgtggagcccctggacagcctcaccctcttcctgttccgtggcaatgagactctgcactatgagaccttcgggaaggcagcccctgctccgcaggaggccacagccacattcaacagcacggctgacagagaggatggccaccgcaacttctcctgcctggctgtgctggacttgatgtctcgcggtggcaacatctttcacaaacactcagccccgaagatgttggagatctatgagcctgtgtcggacagccagatggtcatcatagtcacggtggtgtcggtgttgctgtccctgttcgtgacatctgtcctgctctgcttcatcttcggccagcacttgcgccagcagcggatgggcacctacggggtgcgagcggcttggaggaggctgccccaggccttccggccatagcaaccatgagtggcatggccaccaccacggtggtcactggaactcagtgtgactcctcagggttgaggtccagccctggctgaaggactgtgacaggcagcagagacttgggacattgccttttctagcccgaatacaaacacctggactt

SEQ ID NO: 11543 - DNA, 5119 bp, Homo sapiens
ccccagccgcatgacgcgcggaggaggcagcgggacgagcgcgggagccgggaccgggtagccgcgcgctgggggtgggcgccgctcgctccgccccgcgaagcccctgcgcgctcagggacgcggcccccccgcggcagccgcgctaggctccggcgtgtggccgcggccgccgccgccgctgccatgtctccggggaagcccggggcgggcggagcggggacgaggcggaccggctggcggaggaggaggcgaaggagacggcaggaggcggcgacgacggtgcccgggctcgggcgcacggcggggcccgattcgcgcgtccggggcacgttccagggcgcgcggggcatgaagccggcggcgcgggaggcgcggctgcctccgcgctcgcccgggctgcgctgggcgctgccgctgctgctgctgctgctgcgcctgggccagatcctgtgcgcaggtggcacccctagtccaattcctgacccttcagtagcaactgttgccacaggggaaaatggcataacgcagatcagcagtacagcagaatcctttcataaacagaatggaactggaacacctcaggtggaaacaaacaccagtgaggatggtgaaagctctggagccaacgatagtttaagaacacctgaacaaggatctaatgggactgatggggcatctcaaaaaactcccagtagcactgggcccagtcctgtgtttgacattaaagctgtttccatcagtccaaccaatgtgatcttaacttggaaaagtaatgacacagctgcttctgagtacaagtatgtagtaaagcataagatggaaaatgagaagacaattactgttgtgcatcaaccatggtgtaacatcacaggcttacgtccagcgacttcatatgtattctccatcactccaggaataggcaatgagacttggggagatcccagagtcataaaagtcatcacagagccgatcccagtttctgatctccgtgttgccctcacgggtgtgaggaaggctgctctctcctggagcaatggcaatggcactgcctcctgccgggttcttcttgaaagcattggaagccatgaggagttgactcaagactcaagacttcaggtcaatatctcgggcctgaagccaggggttcaatacaacatcaacccgtatcttctacaatcaaataagacaaagggagaccccttgggcacagaaggtggcttggatgccagcaatacagagagaagccgggcagggagccccaccgcccctgtgcatgatgagtccctcgtgggacctgtggacccatcctccggccagcagtcccgagacacggaagtcctgcttgtcgggttagagcctggcacccgatacaatgccaccgtttattcccaagcagcgaatggcacagaaggacagccccaggccatagagttcaggacaaatgctattcaggtttttgacgtcaccgctgtgaacatcagtgccacaagcctgaccctgatctggaaagtcagcgataacgagtcgtcatctaactatacctacaagatacatgtggcgggggagacagattcttccaatctcaacgtcagtgagcctcgcgctgtcatccccggactccgctccagcaccttctacaacatcacagtgtgtcctgtcctaggtgacatcgagggcacgccgggcttcctccaagtgcacaccccccctgttccagtttctgacttccgagtgacagtggtcagcacgacggagatcggcttagcatggagcagccatgatgcagaatcatttcagatgcatatcacacaggagggagctggcaattctcgggtagaaataaccaccaaccaaagtattatcattggtggcttgttccctggaaccaagtattgctttgaaatagttccaaaaggaccaaatgggactgaaggggcatctcggacagtttgcaatagaactgttcccagtgcagtgtttgacatccacgtggtctacgtcaccaccacggagatgtggctggactggaagagccctgacggtgcttccgagtatgtctaccatttagtcatagagtccaagcatggctctaaccacacaagcacgtatgacaaagcgattactctccagggcctgattccgggcaccttatataacatcaccatctctccagaagtggaccacgtctggggggaccccaactccactgcacagtacacacggcccagcaatgtgtccaacattgatgtaagtaccaacaccacagcagcaactttaagttggcagaactttgatgacgcctctcccacgtactcctactgccttcttattgagaaggctggaaattccagcaacgcaacacaagtagtcacggacattggaattactgacgctacagtcactgaattaatacctggctcatcatacacagtggagatctttgcacaagtaggggatgggatcaagtcactggaacctggccggaagtcattctgtacagatcctgcgtccatggcctccttcgactgcgaagtggtccccaaagagccagccctggttctcaaatggacctgccctcctggcgccaatgcaggctttgagctggaggtcagcagtggagcctggaacaatgcgacccacctggagagctgctcctctgagaatggcactgagtatagaacggaagtcacgtatttgaatttttctacctcgtacaacatcagcatcaccactgtgtcctgtggaaagatggcagcccccacccggaacacctgcactactggcatcacagatccccctcctccagatggatcccctaatattacatctgtcagtcacaattcagtaaaggtcaagttcagtggatttgaagccagccacggacccatcaaagcctatgctgtcattctcaccaccggggaagctggtcacccttctgcagatgtcctgaaatacacgtatgacgatttcaaaaagggagcctcagatacttatgtgacatacctcataagaacagaagaaaagggacgttctcagagcttgtctgaagttttgaaatatgaaattgacgttgggaatgagtcaaccacacttggttattacaatgggaagctggaacctctgggctcctaccgggcttgtgtggctggcttcaccaacattaccttccaccctcaaaacaaggggctcattgatggggctgagagctatgtgtccttcagtcgctactcagatgctgtttccttgccccaggatccaggtgtcatctgtggagcggtttttggctgtatctttggtgccctggttattgtgactgtgggaggcttcatcttctggagaaagaagaggaaagatgcaaagaataatgaagtgtccttttctcaaattaaacctaaaaaatctaagttaatcagagtggagaattttgaggcctacttcaagaagcagcaagctgactccaactgtgggttcgcagaggaatacgaagatctgaagcttgttggaattagtcaacctaaatatgcagcagaactggctgagaatagaggaaagaatcgctataataatgttctgccctatgatatttcccgtgtcaaactttcggtccagacccattcaacggatgactacatcaatgccaactacatgcctggctaccactccaagaaagattttattgccacacaaggacctttaccgaacactttgaaagatttttggcgtatggtttgggagaaaaatgtatatgccatcattatgttgactaaatgtgttgaacagggaagaaccaaatgtgaggagtattggccctccaagcaggctcaggactatggagacataactgtggcaatgacatcagaaattgttcttccggaatggaccatcagagatttcacagtgaaaaatatccagacaagtgagagtcaccctctgagacagttccatttcacctcctggccagaccacggtgttcccgacaccactgacctgctcatcaacttccggtacctcgttcgtgactacatgaagcagagtcctcccgaatcgccgattctggtgcattgcagtgctggggtcggaaggacgggcactttcattgccattgatcgtctcatctaccagatagagaatgagaacaccgtggatgtgtatgggattgtgtatgaccttcgaatgcataggcctttaatggtgcagacagaggaccagtatgttttcctcaatcagtgtgttttggatattgtcagatcccagaaagactcaaaagtagatcttatctaccagaacacaactgcaatgacaatctatgaaaaccttgcgcccgtgaccacatttggaaagaccaatggttacatcgcctaattccaaaggaataacctttctggagtgaaccagaccgtcgcacccacagcgaaggcacatgccccgatgtcgacatgtttttatatgtctaatatcttaattctttgttctgttttgtgagaactaattttgagggcatgaagctgcatatgatagatgacaaattggggctgtcgggggctgtggatgggtggggagcaaatcatctgcattcctgatgaccaatgggatgaggtcacttttttttttttcccccttgaggattgcggaaaaccaggaaaagggatctatgatttttttttccaaaacaatttcttttttaaaaagactattttatatgattcacatgctaaagccaggattgtgttgggttgaatatattttaagtatcagaggtctatttttacctactgtgtcttggaatctagccgatggaaaatacctaattgtggatgatgattgcgcagggaggggtacgtggcacctcttccgaatgggttttctatttgaacatgtgccttttctgaattatgcttccacaggcaaaactcagtagagatctatatttttgtactgaatctcataattggaatatacggaatatttaaacagtagcttagcatcagaggtttgcttcctcagtaacatttctgttctcatttgatcaggggaggcctctttgccccggccccgcttcccctgcccccgtgtgatttgtgctccattttttcttcccttttccctcccagttttc

SEQ ID NO: 11544 - DNA, 3685 bp, Homo sapiens
tcacctgccgtccaggtatcatcctagtcttccctccgtctctgggatgggaaactcttgtctagtgatgtgactcattacgtgatcccagactggaaagttgttcaagattatcttgagatccttgagtttcctgagttgaagggaattattttcatgcagacagcttgtcaagctgtgcagcatcaaagaggcaggagacagtataacaaactgcgaaacctgctgaaggatgcgcgtcatgattgcattctctttgctaatgaattccagcaatgctgctatctgccacgggaaagaggagagtccatggagaagtggcagaccaggagcatatacaacgcagctgtttggtactatcatcactgccaggacaggatgccaattgttatggtgacagaagatgaagaggcaattcagcagtatggaagtgaaacagaaggagtattcgtgattactttcaagaattacctggacaatttctggcctgatttaaaagctgcccacgagctttgtgattctatccttcagtctcgacgggagagagagaatgagagtcaggagagccatgggaaggagtacccagaacatcttcccctggaagtgttagaagctgggattaaatctggacgctatatccagggaattctgaatgtcaacaaacacagagcccaaatagaagcttttgttcgacttcaaggagccagcagtaaagattcagatttagtcagtgacatcctaatccacgggatgaaggctcgaaaccgctcaattcatggagatgtggtagttgtggagctgcttcctaaaaatgaatggaaaggaagaaccgtagccctgtgtgagaatgactgtgacgacaaggcttcgggcgagtccccaagtgagcccatgcctacaggtcgagtggtgggcatacttcagaagaactggcgggattatgtggtgacatttccgtccaaagaagaggtccaatctcagggcaaaaatgctcagaaaatcctggttacaccttgggattacagaattcccaaaattcgaattagcactcagcaagcagaaaccctccaggacttcagggtggtcgtgcgcatcgattcctgggagtcaacatctgtgtatccaaacggacattttgtgcgtgttttaggaagaatcggagatctggaaggggaaattgcaaccatcctggtggaaaacagtatttcagttattcctttctcagaagctcagatgtgtgagatgccagtaaacacaccagaaagtccctggaaggtgagtcctgaagaggaacaaaaacgtaaagacttgaggaaaagccatctcgtattcagcattgaccccaaaggttgtgaagatgtggatgacacactctcagtcagaaccttaaataatggcaacctggaacttggggtccacatcgcagatgtaacacactttgtggcaccaaattcttacattgatattgaagctagaacaagggccaccacttattatctagcagatcgtcgctatgacatgctgccttccgtcctcagtgcagatttgtgttcccttctgggaggcgttgataggtatgctgtaagcatcatgtgggaactggataaagcctcttatgaaattaagaaagtgtggtatggcagaaccattattcgatcagcatacaaactgttctatgaagcagcccaagaactactggatggaaacttaagcgttgttgatgatattccagaattcaaagacttggatgagaagagcagacaagccaagctggaggagttggtgtgggcaattggaaagctgaccgacatagctcgccatgtcagagctaaacgagacggatgtggtgccctggaactggaaggggtagaggtttgcgtacagctagatgacaaaaagaacattcacgacctcatccccaagcagcccctggaagtccacgagacagtggctgaatgcatgatcctggccaaccactgggtcgccaaaaagatctgggagagcttccctcatcaggccttgctgcgccagcaccctcctccacaccaggagttcttttcagaactccgggaatgtgctaaagccaaaggcttcttcatagatacacggtccaataaaacactggctgattctctggataatgcgaacgacccccacgatcccattgtgaacaggctactgcgctccatggccacgcaggccatgtcgaatgctctgtacttctccaccggatcctgtgcggaggaggagttccatcattacggtcttgcattagataaatatacccactttacttctccaataagaagatattcagatattgtagtacaccgcttgttaatggcagccatttcaaaagataagaaaatggaaattaagggaaatctgttcagcaacaaagatcttgaggaattatgcagacatatcaacaacagaaaccaagcagcacagcattctcagaagcagtctactgagctcttccagtgcatgtacttcaaagacaaagaccctgccaccgaggagcgttgcatatctgacggagttatttattcaattagaacaaatggtgtgcttctatttataccaaggtttgggattaaaggtgctgcttatctaaaaaataaagatggtttagtcatctcatgtggcccagatagctgttctgaatggaaaccaggatcccttcaacgatttcaaaacaaaattacctctactacaacagatggggaatctgttacgttccatttgtttgaccatgtaaccgtaagaatatccatacaggcctcacgttgccattctgatacaatcagacttgaaataattagtaacaaaccatacaagataccaaatacagaacttattcatcagagttcccccttgctgaagagtgagttagtgaaagaagtaactaaatctgtggaagaagctcagcttgcccaagaagtcaaagtaaacatcattcaggaggaatatcaagaatatcgccaaacaaagggaaggagcctatacacacttctagaggagatacgggacctagctctcctggatgtttcaaacaattatggaatatgagaggctcttacttcactaagagctgtcatatgtgaatgttttacagtcttttcaaacttaacatttaatgtgtgtcactcagtgctctagtcgatcaggactgggtagctatttcgcatatatgtaaaatgttctcagccgggcacggtggctcacgcctgtaaccccagcactttgggaggctgaggcgggcggatcacgaggtcaggagattgagaccatcctggctaacacggtgaaacccagtctctactaaaaatacaaaaattagcccggcgtggtggcatgcgcctgtagtcccagctacttgggaggctgaagcaggagaattgcctgaacccaggaagaggaggttgcagtgagccgagatcgcaccactgcattccagcctgggcaacagagcgagactccatctcaaaaaaaaaaaaaaaaaaaaaaaaagttctctcattcattaaagttgcattaaataaagtataattaggtcactatggaaacagttttcagtaatgagtggacagtaagtggtggctctgcagatggcccctttctaataagtttaataaacccgaaattactggttaaaaaaaaaaaaaaaaaaaaaaaaaaaaaa

SEQ ID NO: 11545 - DNA, 2862 bp, Homo sapiens
cggcggcggcggccggagcgggccatggacgcgctcaagtcggcggggcgggcgctgatccggagccccagcttggccaagcagagctgggggggcggtggccggcaccgcaagctgcctgagaactggacagacacgcgggagacgctgctggaggggatgctgttcagcctcaagtacctgggcatgacgctagtggagcagcccaagggtgaggagctgtcggccgccgccatcaagaggatcgtggctacagctaaggccagtgggaagaagctgcagaaggtgactctgaaggtgtcgccacggggaattatcctgacagacaacctcaccaaccagctcattgagaacgtgtccatatacaggatctcctattgcacagcagacaagatgcacgacaaggtgtttgcatacatcgcccagagccagcacaaccagagcctcgagtgccacgccttcctctgcaccaagcggaagatggcacaggctgttaccctcaccgtagcccaggccttcaaagtcgcctttgagttttggcaggtgtccaaggaagagaaagagaagagggacaaagccagccaagagggaggggacgtcctgggggcccgccaagactgcaccccccccttgaagagcttggtcgccactgggaacctgctggacttagaggagacggctaaggccccgctgtccacggtcagcgccaacaccaccaacatggacgaggtgccgcggccacaagccttgagtggcagcagtgttgtctgggagctggatgatggcctggatgaagcgttttcgaggcttgcccagtctcggacaaaccctcaggtcctggacactggcctgacagcccaggacatgcattacgcccagtgcctctcgcctgtcgactgggacaagcctgacagcagcggcacagagcaggatgacctcttcagcttctgagggcccggggccagccggacacaagcggccctgacacgtgatggaccaaagccacctgctgcgggggagccagttctggggcccgcctgccacctctcccagccctcagcattgtcagcctgaagatcagagctgcagccagtcaggcaggggagagatttttcttttaagccctgctctttctctgagaaccaaaagatgccttgaatatttattcagtgacttctggcttatgctcagaagccagtctgcgtcaggcacgtctcctgctgcgtgacatgtgcagtgctgtaatcggctcccgcttgctctcctggagcaagctctgccctggctgtgggtatcaggactgtgaccaaagcatttctagtcccttctctctttctaaggacccaaatttccctgggggcatcctgcttcctgaaagctgttggatttcagtgatttttccccccaccccccagcacaggagagcacccacagccgcagaaggggaatgtgtcctcctgctctgcttcctcagggcccagcaggcgggggtttgagccctggaccccaggctcttagagactaaggggcagctcctgaccaaagacgatacagcttggcactttaaagcattaacagcaggtgtgaccctgagggctcctccatggtgctgcattgagtccagctttccttctgcccttcctccaggagaaggggcccaaggtccccgtggatggtctccacctgtgcttggaaccagtgtaactggctgctccctgctcccagggactgacacggggatcatctctgtgaccgccctccgtcgggcccctgcctgccttctcccctccacgcaaggctgtgctcttcctctggtttctgtgtgtccgtttgagtgtctgcgccccgcctccccatacttcctgggatgatgtgtgaaacctgacacctagatttatttggaaatattctatgaccactttacagatgaggaaactgaggcctcaagcgtggaggggtagagtgaagagtagaacccaggtctgatgccaaagctgctttcttctctgcctcctcctcacgcaactcacacctccttttcttctagctttgttgtcctcccaggaaccaaaaaaccccagctattttctgaccaaaatgtgtttcataacaaaccatctggtgcctttccacacagaactggcaggagcctcgtgtcctgctagctgtctctcttgttgatttccgtgaaaatgcaagtgtttgaagtctgctcattccgagggtgaaacaaaatccaaccctgtcagaatcatgctgttctctttgctgacactgtgaccctgggtcgggacagaccagcagcaatctgtctttagaatcgctttccttcctccccttttgcccccgtggggctcccggcatcctgaaagccagcaaagcctccagcatcttttccatcctgaggtgcctcccagtggcctggcttgtcggagcaagtttcatcagccctagggaaaacacggccctcctgggaacctccttacctggagtaaccggacaccttagacggaggtgcctgagggtggggtgggatttgcagggtcattatcagaacatgaggataacttccttgcccctgctctgtagccacctccttggcaccggcctctatttgtcataaggcggcgtgggcgaggcctgacacaggccagccttggcacgaggggggccaggggttctgagaagcgctgccctgtgagagccacgctggccttcgtctccatctctggttgacgggctgtccgtgtgcctcctgtgtgtctgcagacaagtcttgctgtgctttatttgtgaaactttaatgaggaaaaaacaaataataaatgttctcgttttgaaactcaaaaaaaaaaaaaaaaa

SEQ ID NO: 11546 - DNA, 2986 bp, Homo sapiens
gcgccccagtcgacgctgagctcctctgctactcagagttgcaacctcagcctcgctatggctcccagcagcccccggcccgcgctgcccgcactcctggtcctgctcggggctctgttcccaggacctggcaatgcccagacatctgtgtccccctcaaaagtcatcctgccccggggaggctccgtgctggtgacatgcagcacctcctgtgaccagcccaagttgttgggcatagagaccccgttgcctaaaaaggagttgctcctgcctgggaacaaccggaaggtgtatgaactgagcaatgtgcaagaagatagccaaccaatgtgctattcaaactgccctgatgggcagtcaacagctaaaaccttcctcaccgtgtactggactccagaacgggtggaactggcacccctcccctcttggcagccagtgggcaagaaccttaccctacgctgccaggtggagggtggggcaccccgggccaacctcaccgtggtgctgctccgtggggagaaggagctgaaacgggagccagctgtgggggagcccgctgaggtcacgaccacggtgctggtgaggagagatcaccatggagccaatttctcgtgccgcactgaactggacctgcggccccaagggctggagctgtttgagaacacctcggccccctaccagctccagacctttgtcctgccagcgactcccccacaacttgtcagcccccgggtcctagaggtggacacgcaggggaccgtggtctgttccctggacgggctgttcccagtctcggaggcccaggtccacctggcactgggggaccagaggttgaaccccacagtcacctatggcaacgactccttctcggccaaggcctcagtcagtgtgaccgcagaggacgagggcacccagcggctgacgtgtgcagtaatactggggaaccagagccaggagacactgcagacagtgaccatctacagctttccggcgcccaacgtgattctgacgaagccagaggtctcagaagggaccgaggtgacagtgaagtgtgaggcccaccctagagccaaggtgacgctgaatggggttccagcccagccactgggcccgagggcccagctcctgctgaaggccaccccagaggacaacgggcgcagcttctcctgctctgcaaccctggaggtggccggccagcttatacacaagaaccagacccgggagcttcgtgtcctgtatggcccccgactggacgagagggattgtccgggaaactggacgtggccagaaaattcccagcagactccaatgtgccaggcttgggggaacccattgcccgagctcaagtgtctaaaggatggcactttcccactgcccatcggggaatcagtgactgtcactcgagatcttgagggcacctacctctgtcgggccaggagcactcaaggggaggtcacccgcgaggtgaccgtgaatgtgctctccccccggtatgagattgtcatcatcactgtggtagcagccgcagtcataatgggcactgcaggcctcagcacgtacctctataaccgccagcggaagatcaagaaatacagactacaacaggcccaaaaagggacccccatgaaaccgaacacacaagccacgcctccctgaacctatcccgggacagggcctcttcctcggccttcccatattggtggcagtggtgccacactgaacagagtggaagacatatgccatgcagctacacctaccggccctgggacgccggaggacagggcattgtcctcagtcagatacaacagcatttggggccatggtacctgcacacctaaaacactaggccacgcatctgatctgtagtcacatgactaagccaagaggaaggagcaagactcaagacatgattgatggatgttaaagtctagcctgatgagaggggaagtggtgggggagacatagccccaccatgaggacatacaactgggaaatactgaaacttgctgcctattgggtatgctgaggcccacagacttacagaagaagtggccctccatagacatgtgtagcatcaaaacacaaaggcccacacttcctgacggatgccagcttgggcactgctgtctactgaccccaacccttgatgatatgtatttattcatttgttattttaccagctatttattgagtgtcttttatgtaggctaaatgaacataggtctctggcctcacggagctcccagtccatgtcacattcaaggtcaccaggtacagttgtacaggttgtacactgcaggagagtgcctggcaaaaagatcaaatggggctgggacttctcattggccaacctgcctttccccagaaggagtgatttttctatcggcacaaaagcactatatggactggtaatggttcacaggttcagagattacccagtgaggccttattcctcccttccccccaaaactgacacctttgttagccacctccccacccacatacatttctgccagtgttcacaatgacactcagcggtcatgtctggacatgagtgcccagggaatatgcccaagctatgccttgtcctcttgtcctgtttgcatttcactgggagcttgcactattgcagctccagtttcctgcagtgatcagggtcctgcaagcagtggggaagggggccaaggtattggaggactccctcccagctttggaagggtcatccgcgtgtgtgtgtgtgtgtatgtgtagacaagctctcgctctgtcacccaggctggagtgcagtggtgcaatcatggttcactgcagtcttgaccttttgggctcaagtgatcctcccacctcagcctcctgagtagctgggaccataggctcacaacaccacacctggcaaatttgattttttttttttttttcagagacggggtctcgcaacattgcccagacttcctttgtgttagttaataaagctttctcaactgcc

SEQ ID NO: 11547 - DNA, 1719 bp, Homo sapiens
ggcgatgggaaggcgggcgcagtcgacccaagggtggagaagagggaaggcgaaggacgcgcgttcccgggctcgtgaccgccagcggcccggggaacccgctcccagacagactcggagagatggcaggcggaagacaccggcgcgtcgtgggcaccctccacctgctgctgctggtggccgccctgccctgggcatccaggggggtcagtccgagtgcctcagcctggccagaggagaagaattaccaccagccagccattttgaattcatcggctcttcggcaaattgcagaaggcaccagtatctctgaaatgtggcaaaatgacttacagccattgctgatagagcgatacccgggatcccctggaagctatgctgctcgtcagcacatcatgcagcgaattcagaggcttcaggctgactgggtcttggaaatagacaccttcttgagtcagacaccctatgggtaccggtctttctcaaatatcatcagcaccctcaatcccactgctaaacgacatttggtcctcgcctgccactatgactccaagtatttttcccactggaacaacagagtgtttgtaggagccactgattcagccgtgccatgtgcaatgatgttggaacttgctcgtgccttagacaagaaactcctttccttaaagactgtttcagactccaagccagatttgtcactccagctgatcttctttgatggtgaagaggcttttcttcactggtctcctcaagattctctctatgggtctcgacacttagctgcaaagatggcatcgaccccgcacccacctggagcgagaggcaccagccaactgcatggcatggatttattggtcttattggatttgattggagctccaaacccaacgtttcccaatttttttccaaactcagccaggtggttcgaaagacttcaagcaattgaacatgaacttcatgaattgggtttgctcaaggatcactctttggaggggcggtatttccagaattacagttatggaggtgtgattcaggatgaccatattccatttttaagaagaggtgttccagttctgcatctgataccgtctcctttccctgaagtctggcacaccatggatgacaatgaagaaaatttggatgaatcaaccattgacaatctaaacaaaatcctacaagtctttgtgttggaatatcttcatttgtaatactctgatttagtttaggataattggttctagaattgaattcaaaagtcaaggcatcatttaaaataatctgatttcagacaaatgctgtgtggaaacatctatcctatagatcatcctattcttatgtgtctttggttatcagatcaattacagaataattgtgttgtgatattgtgtcctaaattgctcattaatttttatttacagattgaaaaagagggaccgtgtaaagaaaatggaaaataaatatctttcaaagactcttttagataaacacgatgaggcaaaatcaggttcattcattcaacgatagtttctcaacagtacttaaatagcggttggaaaacgtagccttcattttatgattttttcatatgtggaaatctattacatgtaatacaaaacaaacatgtagtttgaaggcggtcagatttctttgagaaatctttgtagagttaattttatggaaattaaaatcagaattaaatgctaaaaaaaaaaaaaaaaa

SEQ ID NO: 11548 - DNA, 2542 bp, Homo sapiens
gaggagggacctacaaagactggaaactattcttagctccgtcactgactccaagttcatcccctctgtctttcagtttggttgagatataggctactcttcccaactcagtcttgaagagtatcaccaactgcctcatgtgtggtgaccttcactgtcgtatgccagtgactcatctggagtaatctcaacaacgagttaccaatacttgctcttgattgataaacagaatggggttttggatcttagcaattctcacaattctcatgtattccacagcagcaaagtttagtaaacaatcatggggcctggaaaatgaggctttaattgtaagatgtcctagacaaggaaaacctagttacaccgtggattggtattactcacaaacaaacaaaagtattcccactcaggaaagaaatcgtgtgtttgcctcaggccaacttctgaagtttctaccagctgcagttgctgattctggtatttatacctgtattgtcagaagtcccacattcaataggactggatatgcgaatgtcaccatatataaaaaacaatcagattgcaatgttccagattatttgatgtattcaacagtatctggatcagaaaaaaattccaaaatttattgtcctaccattgacctctacaactggacagcacctcttgagtggtttaagaattgtcaggctcttcaaggatcaaggtacagggcgcacaagtcatttttggtcattgataatgtgatgactgaggacgcaggtgattacacctgtaaatttatacacaatgaaaatggagccaattatagtgtgacggcgaccaggtccttcacggtcaaggatgagcaaggcttttctctgtttccagtaatcggagcccctgcacaaaatgaaataaaggaagtggaaattggaaaaaacgcaaacctaacttgctctgcttgttttggaaaaggcactcagttcttggctgccgtcctgtggcagcttaatggaacaaaaattacagactttggtgaaccaagaattcaacaagaggaagggcaaaatcaaagtttcagcaatgggctggcttgtctagacatggttttaagaatagctgacgtgaaggaagaggatttattgctgcagtacgactgtctggccctgaatttgcatggcttgagaaggcacaccgtaagactaagtaggaaaaatccaagtaaggagtgtttctgagactttgatcacctgaactttctctagcaagtgtaagcagaatggagtgtggttccaagagatccatcaagacaatgggaatggcctgtgccataaaatgtgcttctcttcttcgggatgttgtttgctgtctgatctttgtagactgttcctgtttgctgggagcttctctgctgcttaaattgttcgtcctcccccactccctcctatcgttggtttgtctagaacactcagctgcttctttggtcatccttgttttctaactttatgaactccctctgtgtcactgtatgtgaaaggaaatgcaccaacaaccgtaaactgaacgtgttcttttgtgctcttttataacttgcattacatgttgtaagcatggtccgttctatacctttttctggtcataatgaacactcattttgttagcgagggtggtaaagtgaacaaaaaggggaagtatcaaactactgccatttcagtgagaaaatcctaggtgctactttataataagacatttgttaggccattcttgcattgatataaagaaatacctgagactgggtgatttatatgaaaagaggtttaattggctcacagttctgcaggctgtatgggaagcatggcggcatctgcttctggggacacctcaggagctttactcatggcagaaggcaaagcaaaggcaggcacttcacacagtaaaagcaggagcgagagagaggtgccacactgaaacagccagatctcatgagaagtcactcactattgcaaggacagcatcaaagagatggtgctaaaccattcatgatgaactcacccccatgatccaatcacctcccaccaggctccacctcgaatactggggattaccattcagcatgagatttgggcaggaacacagacccaaaccataccacacacattatcattgttaaactttgtaaagtatttaaggtacatggaacacacgggaagtctggtagctcagcccatttctttattgcatctgttattcaccatgtaattcaggtaccacgtattccagggagcctttcttggccctcagtttgcagtatacacactttccaagtactcttgtagcatcctgtttgtatcatagcactggtcacattgccttacctaaatctgtttgacagtctgctcaacacgactgcaagctccatgagggcagggacatcatctcttccatctttgggtccttagtgcaatacctggcagctagccagtgctcagctaaatatttgttgactgaataaatgaatgcacaaccaaaaaaaaaaaaaaaaaaaaaaaaaaaaaaaaaaaaa

SEQ ID NO: 11549 - DNA, 2058 bp, Homo sapiens
aaagagaggctggctgttgtatttagtaaagctataaagctgtaagagaaattggctttctgagttgtgaaactgtgggcagaaagttgaggaagaaagaactcaagtacaacccaatgaggttgagatataggctactcttcccaactcagtcttgaagagtatcaccaactgcctcatgtgtggtgaccttcactgtcgtatgccagtgactcatctggagtaatctcaacaacgagttaccaatacttgctcttgattgataaacagaatggggttttggatcttagcaattctcacaattctcatgtattccacagcagcaaagtttagtaaacaatcatggggcctggaaaatgaggctttaattgtaagatgtcctagacaaggaaaacctagttacaccgtggattggtattactcacaaacaaacaaaagtattcccactcaggaaagaaatcgtgtgtttgcctcaggccaacttctgaagtttctaccagctgcagttgctgattctggtatttatacctgtattgtcagaagtcccacattcaataggactggatatgcgaatgtcaccatatataaaaaacaatcagattgcaatgttccagattatttgatgtattcaacagtatctggatcagaaaaaaattccaaaatttattgtcctaccattgacctctacaactggacagcacctcttgagtggtttaagaattgtcaggctcttcaaggatcaaggtacagggcgcacaagtcatttttggtcattgataatgtgatgactgaggacgcaggtgattacacctgtaaatttatacacaatgaaaatggagccaattatagtgtgacggcgaccaggtccttcacggtcaaggatgagcaaggcttttctctgtttccagtaatcggagcccctgcacaaaatgaaataaaggaagtggaaattggaaaaaacgcaaacctaacttgctctgcttgttttggaaaaggcactcagttcttggctgccgtcctgtggcagcttaatggaacaaaaattacagactttggtgaaccaagaattcaacaagaggaagggcaaaatcaaagtttcagcaatgggctggcttgtctagacatggttttaagaatagctgacgtgaaggaagaggatttattgctgcagtacgactgtctggccctgaatttgcatggcttgagaaggcacaccgtaagactaagtaggaaaaatccaattgatcatcatagcatctactgcataattgcagtatgtagtgtatttttaatgctaatcaatgtcctggttatcatcctaaaaatgttctggattgaggccactctgctctggagagacatagctaaaccttacaagactaggaatgatggaaagctctatgatgcttatgttgtctacccacggaactacaaatccagtacagatggggccagtcgtgtagagcactttgttcaccagattctgcctgatgttcttgaaaataaatgtggctataccttatgcatttatgggagagatatgctacctggagaagatgtagtcactgcagtggaaaccaacatacgaaagagcaggcggcacattttcatcctgacccctcagatcactcacaataaggagtttgcctacgagcaggaggttgccctgcactgtgccctcatccagaacgacgccaaggtgatacttattgagatggaggctctgagcgagctggacatgctgcaggctgaggcgcttcaggactccctccagcatcttatgaaagtacaggggaccatcaagtggagggaggaccacattgccaataaaaggtccctgaattctaaattctggaagcacgtgaggtaccaaatgcctgtgccaagcaaaattcccagaaaggcctctagtttgactcccttggctgcccagaagcaatagtgcctgctgtgatgtgcaaaggcatctgagtttgaagctttcctgacttctcctagctggcttatgcccctgcactgaagtgtgaggagcaggaatattaaagggattcaggcctc

SEQ ID NO: 11550 - DNA, 1532 bp, Homo sapiens
agcgcagcgggggcgggaaggttgtagtgccgcgagttgagctcctcttgcctaagtggtcgcgccccctttaagagcagcgattgtaaggagaggcggtcccggtgtcctcgggtcccaggtgattgtgaagtgctgaccaattgccactggacatacttgaaacaaaataggaaaatggcagcaaactcttcaggacaaggttttcaaaacaaaaatagagttgcaatcttggcagaactggacaaagagaaaagaaaactacttatgcagaaccagtcttcaacaaatcatcctggagctagcattgcactctcgagaccctctcttaataaggacttccgggatcacgctgagcagcagcatattgcagcccaacagaaggcagctttgcagcatgctcatgcacattcatctggatacttcatcactcaagactctgcatttgggaaccttattcttcctgttttacctcgccttgacccagaatgaagaaaacatttgcgatggaaaagtgactttgtaatatcaaatgccaaagctactatcattcagtgctacatgaactgtgactttaagaattttggtgaactttgatattttttgtttgtctgaaagaaaggaatgtgtaagtgaaagctgaaagaagaataaccaggatgatgagagctgtggaagctgtatcgtccaaggaattgattatgtaccgtgactgtaacttttttgtaatgctgtttaactctcaatcagactgtgaactggatggtcacgaagtcattccccaactcctagcaagtttgactgaatatatcatgtccacagtagattttcaagaatcatttatagtacttaactttaaagaaacaaggctgcttttaaaaaatgaactaataggcttaaatcaattgcatccatatttgctgtttataggattgctatcagtataccttttgcgtttatagtcaacatgtatcatcctgaaatattctttctggacttataactacttccccctttttcactttaaaacaaacctcaagaataaattactaaccagtcttaaccatcttttataaacatatgctcttataaatgttgtgactagatgcaattaaaaataatagggaatgtggtaggtttttaatttgtacatcctcttatttagtgttaccacataaatgatgagtttgtgtggttctgttttccatttttgttctaactgaaaactttttggctgggcacggtgcctcatgcctgtaatcccagcactttgggaggccaaggcgggcagatcacttgagatcaggagtttgagaccagcctggccaacatggtgaaaccctgtctctactaaaagtataaaaaattagccatgtgtggtggcacacgcctgtaatcccagctactcaggaggctgaggcaggagaatcgcttgaacctgggaggcaggggttgcagtgagctgagacggtgtcactgcactccagcctgggtgacagtgagtctttgtctcaaagaaaaaaaaaaaaaaa

SEQ ID NO: 11551 - DNA, 1801 bp, Homo sapiens
tttaataataattctgtgttgcttctgagattaataattgattaattcatagtcaggaatctttgtaaaaaggaaaccaattacttttggctaccacttttacatggtcacctacaggagagaggaggtgctgcaagactctctggtagaaaaatgaagagggtcctggtactactgcttgctgtggcatttggacatgctttagagagaggccgggattatgaaaagaataaagtctgcaaggaattctcccatctgggaaaggaggacttcacatctctgtcactagtcctgtacagtagaaaatttcccagtggcacgtttgaacaggtcagccaacttgtgaaggaagttgtctccttgaccgaagcctgctgtgcggaaggggctgaccctgactgctatgacaccaggacctcagcactgtctgccaagtcctgtgaaagtaattctccattccccgttcacccaggcactgctgagtgctgcaccaaagagggcctggaacgaaagctctgcatggctgctctgaaacaccagccacaggaattccctacctacgtggaacccacaaatgatgaaatctgtgaggcgttcaggaaagatccaaaggaatatgctaatcaatttatgtgggaatattccactaattacggacaagctcctctgtcacttttagtcagttacaccaagagttatctttctatggtagggtcctgctgtacctctgcaagcccaactgtatgctttttgaaagagagactccagcttaaacatttatcacttctcaccactctgtcaaatagagtctgctcacaatatgctgcttatggggagaagaaatcaaggctcagcaatctcataaagttagcccaaaaagtgcctactgctgatctggaggatgttttgccactagctgaagatattactaacatcctctccaaatgctgtgagtctgcctctgaagattgcatggccaaagagctgcctgaacacacagtaaaactctgtgacaatttatccacaaagaattctaagtttgaagactgttgtcaagaaaaaacagccatggacgtttttgtgtgcacttacttcatgccagctgcccaactccccgagcttccagatgtagagttgcccacaaacaaagatgtgtgtgatccaggaaacaccaaagtcatggataagtatacatttgaactaagcagaaggactcatcttccggaagtattcctcagtaaggtacttgagccaaccctaaaaagccttggtgaatgctgtgatgttgaagactcaactacctgttttaatgctaagggccctctactaaagaaggaactatcttctttcattgacaagggacaagaactatgtgcagattattcagaaaatacatttactgagtacaagaaaaaactggcagagcgactaaaagcaaaattgcctgatgccacacccacggaactggcaaagctggttaacaagcactcagactttgcctccaactgctgttccataaactcacctcctctttactgtgattcagagattgatgctgaattgaagaatatcctgtagtcctgaagcatgtttattaactttgaccagagttggagccacccaggggaatgatctctgatgacctaacctaagcaaaaccactgagcttctgggaagacaactaggatactttctactttttctagctacaatatcttcatacaatgacaagtatgatgatttgctatcaaaataaattgaaatataatgcaaaccataaaaaaaaaaaaaaaaaaaaaaa

SEQ ID NO: 11552 - DNA, 3822 bp, Homo sapiens
cggcggaggcaaggcggccgcggcgcggagcagccgacgcacgctagtgggtccgcccgccaccgccccttcctcggcgtccgctcccgcccttgccgtcccccgcgcggctccgcgcctcgggccccgggcgcagccagccctccagacgcccgcggtcccggcggcgtgtgctgctcttcctccgcccgcggtttccagcgccgctccttcccccgcttgggcagggagggggcattgatcttcgatcgcgaagatggctgctggctgcctgctggccttgactctgacacttttccaatctttgctcatcggcccctcgtcggaggagccgttcccttcggccgtcactatcaaatcatgggtggataagatgcaagaagaccttgtcacactggcaaaaacagcaagtggagtcaatcagcttgttgatatttatgagaaatatcaagatttgtatactgtggaaccaaataatgcacgccagctggtagaaattgcagccagggatattgagaaacttctgagcaacagatctaaagccctggtgcgcctggcattggaagcggagaaagttcaagcagctcaccagtggagagaagattttgcaagcaatgaagttgtctactacaatgcaaaggatgatctcgatcctgagaaaaatgacagtgagccaggcagccagaggataaaacctgttttcattgaagatgctaattttggacgacaaatatcttatcagcacgcagcagtccatattcctactgacatctatgagggctcaacaattgtgttaaatgaactcaactggacaagtgccttagatgaagttttcaaaaagaatcgcgaggaagacccttcattattgtggcaggtttttggcagtgccactggcctagctcgatattatccagcttcaccatgggttgataatagtagaactccaaataagattgacctttatgatgtacgcagaagaccatggtacatccaaggagctgcatctcctaaagacatgcttattctggtggatgtgagtggaagtgttagtggattgacacttaaactgatccgaacatctgtctccgaaatgttagaaaccctctcagatgatgatttcgtgaatgtagcttcatttaacagcaatgctcaggatgtaagctgttttcagcaccttgtccaagcaaatgtaagaaataaaaaagtgttgaaagacgcggtgaataatatcacagccaaaggaattacagattataagaagggctttagttttgcttttgaacagctgcttaattataatgtttccagagcaaactgcaataagattattatgctattcacggatggaggagaagagagagcccaggagatatttaacaaatacaataaagataaaaaagtacgtgtattcacgttttcagttggtcaacacaattatgacagaggacctattcagtggatggcctgtgaaaacaaaggttattattatgaaattccttccattggtgcaataagaatcaatactcaggaatatttggatgttttgggaagaccaatggttttagcaggagacaaagctaagcaagtccaatggacaaatgtgtacctggatgcattggaactgggacttgtcattactggaactcttccggtcttcaacataaccggccaatttgaaaataagacaaacttaaagaaccagctgattcttggtgtgatgggagtagatgtgtctttggaagatattaaaagactgacaccacgttttacactgtgccccaatgggtattactttgcaatcgatcctaatggttatgttttattacatccaaatcttcagccaaagaaccccaaatctcaggagccagtaacattggatttccttgatgcagagttagagaatgatattaaagtggagattcgaaataagatgattgatggggaaagtggagaaaaaacattcagaactctggttaaatctcaagatgagagatatattgacaaaggaaacaggacatacacatggacacctgtcaatggcacagattacagtttggccttggtattaccaacctacagtttttactatataaaagccaaactagaagagacaataactcaggccagatcaaaaaagggcaaaatgaaggattcggaaaccctgaagccagataattttgaagaatctggctatacattcatagcaccaagagattactgcaatgacctgaaaatatcggataataacactgaatttcttttaaatttcaacgagtttattgatagaaaaactccaaacaacccatcatgtaacgcggatttgattaatagagtcttgcttgatgcaggctttacaaatgaacttgtccaaaattactggagtaagcagaaaaatatcaagggagtgaaagcacgatttgttgtgactgatggtgggattaccagagtttatcccaaagaggctggagaaaattggcaagaaaacccagagacatatgaggacagcttctataaaaggagcctagataatgataactatgttttcactgctccctactttaacaaaagtggacctggtgcctatgaatcgggcattatggtaagcaaagctgtagaaatatatattcaagggaaacttcttaaacctgcagttgttggaattaaaattgatgtaaattcctggatagagaatttcaccaaaacctcaatcagagatccgtgtgctggtccagtttgtgactgcaaaagaaacagtgacgtaatggattgtgtgattctggatgatggtgggtttcttctgatggcaaatcatgatgattatactaatcagattggaagattttttggagagattgatcccagcttgatgagacacctggttaatatatcagtttatgcttttaacaaatcttatgattatcagtcagtatgtgagcccggtgctgcaccaaaacaaggagcaggacatcgctcagcatatgtgccatcagtagcagacatattacaaattggctggtgggccactgctgctgcctggtctattctacagcagtttctcttgagtttgacctttccacgactccttgaggcagttgagatggaggatgatgacttcacggcctccctgtccaagcagagctgcattactgaacaaacccagtatttcttcgataacgacagtaaatcattcagtggtgtattagactgtggaaactgttccagaatctttcatggagaaaagcttatgaacaccaacttaatattcataatggttgagagcaaagggacatgtccatgtgacacacgactgctcatacaagcggagcagacttctgacggtccaaatccttgtgacatggttaagcaacccagataccgaaaagggcctgatgtctgctttgataacaatgtcttggaggattatactgactgtggtggtgtttctggattaaatccctccctgtggtatatcattggaatccagtttctactactttggctggtatctggcagcacacaccgcctgttatgaccttctaaaaaccaaatctgcatagttaaactccagaccctgccaaaacatgagccctgccctcaattacagtaacgtagggtcagctataaaatcagacaaacattagctgggcctgttccatggcataacactaaggcgcagactcctaaggcacccactggctgcatgtcagggtgtcagatccttaaacgtgtgtgaatgctgcatcatctatgtgtaacatcaaagcaaaatcctatacgtgtcctctattggaaaatttgggagtttgttgttgcattgttggt

SEQ ID NO: 11553 - DNA, 3242 bp, Homo sapiens
gagcagccaaaaggcccgcggagtcgcgctgggccgccccggcgcagctgaaccgggggccgcgcctgccaggccgacgggtctggcccagcctggcgccaaggggttcgtgcgctgtggagacgcggagggtcgaggcggcgcggcctgagtgaaacccaatggaaaaagcatgacatttagaagtagaagacttagcttcaaatccctactccttcacttactaattttgtgatttggaaatatccgcgcaagatgttgacgttgcagacttggctagtgcaagccttgtttattttcctcaccactgaatctacaggtgaacttctagatccatgtggttatatcagtcctgaatctccagttgtacaacttcattctaatttcactgcagtttgtgtgctaaaggaaaaatgtatggattattttcatgtaaatgctaattacattgtctggaaaacaaaccattttactattcctaaggagcaatatactatcataaacagaacagcatccagtgtcacctttacagatatagcttcattaaatattcagctcacttgcaacattcttacattcggacagcttgaacagaatgtttatggaatcacaataatttcaggcttgcctccagaaaaacctaaaaatttgagttgcattgtgaacgaggggaagaaaatgaggtgtgagtgggatggtggaagggaaacacacttggagacaaacttcactttaaaatctgaatgggcaacacacaagtttgctgattgcaaagcaaaacgtgacacccccacctcatgcactgttgattattctactgtgtattttgtcaacattgaagtctgggtagaagcagagaatgcccttgggaaggttacatcagatcatatcaattttgatcctgtatataaagtgaagcccaatccgccacataatttatcagtgatcaactcagaggaactgtctagtatcttaaaattgacatggaccaacccaagtattaagagtgttataatactaaaatataacattcaatataggaccaaagatgcctcaacttggagccagattcctcctgaagacacagcatccacccgatcttcattcactgtccaagaccttaaaccttttacagaatatgtgtttaggattcgctgtatgaaggaagatggtaagggatactggagtgactggagtgaagaagcaagtgggatcacctatgaagatagaccatctaaagcaccaagtttctggtataaaatagatccatcccatactcaaggctacagaactgtacaactcgtgtggaagacattgcctccttttgaagccaatggaaaaatcttggattatgaagtgactctcacaagatggaaatcacatttacaaaattacacagttaatgccacaaaactgacagtaaatctcacaaatgatcgctatctagcaaccctaacagtaagaaatcttgttggcaaatcagatgcagctgttttaactatccctgcctgtgactttcaagctactcaccctgtaatggatcttaaagcattccccaaagataacatgctttgggtggaatggactactccaagggaatctgtaaagaaatatatacttgagtggtgtgtgttatcagataaagcaccctgtatcacagactggcaacaagaagatggtaccgtgcatcgcacctatttaagagggaacttagcagagagcaaatgctatttgataacagttactccagtatatgctgatggaccaggaagccctgaatccataaaggcataccttaaacaagctccaccttccaaaggacctactgttcggacaaaaaaagtagggaaaaacgaagctgtcttagagtgggaccaacttcctgttgatgttcagaatggatttatcagaaattatactatattttatagaaccatcattggaaatgaaactgctgtgaatgtggattcttcccacacagaatatacattgtcctctttgactagtgacacattgtacatggtacgaatggcagcatacacagatgaaggtgggaaggatggtccagaattcacttttactaccccaaagtttgctcaaggagaaattgaagccatagtcgtgcctgtttgcttagcattcctattgacaactcttctgggagtgctgttctgctttaataagcgagacctaattaaaaaacacatctggcctaatgttccagatccttcaaagagtcatattgcccagtggtcacctcacactcctccaaggcacaattttaattcaaaagatcaaatgtattcagatggcaatttcactgatgtaagtgttgtggaaatagaagcaaatgacaaaaagccttttccagaagatctgaaatcattggacctgttcaaaaaggaaaaaattaatactgaaggacacagcagtggtattggggggtcttcatgcatgtcatcttctaggccaagcatttctagcagtgatgaaaatgaatcttcacaaaacacttcgagcactgtccagtattctaccgtggtacacagtggctacagacaccaagttccgtcagtccaagtcttctcaagatccgagtctacccagcccttgttagattcagaggagcggccagaagatctacaattagtagatcatgtagatggcggtgatggtattttgcccaggcaacagtacttcaaacagaactgcagtcagcatgaatccagtccagatatttcacattttgaaaggtcaaagcaagtttcatcagtcaatgaggaagattttgttagacttaaacagcagatttcagatcatatttcacaatcctgtggatctgggcaaatgaaaatgtttcaggaagtttctgcagcagatgcttttggtccaggtactgagggacaagtagaaagatttgaaacagttggcatggaggctgcgactgatgaaggcatgcctaaaagttacttaccacagactgtacggcaaggcggctacatgcctcagtgaaggactagtagttcctgctacaacttcagcagtacctataaagtaaagctaaaatgattttatctgtgaattcagattttaaaaagtcttcactctctgaagatgatcatttgcccttaaggacaaaaatgaactgaagtttcacatgagctatttccattccagaatatctgggattctactttaagcactacataaactgactttatcctcagaaaaaaaaaaaaaaa

SEQ ID NO: 11554 - DNA, 3159 bp, Homo sapiens
gagcagccaaaaggcccgcggagtcgcgctgggccgccccggcgcagctgaaccgggggccgcgcctgccaggccgacgggtctggcccagcctggcgccaaggggttcgtgcgctgtggagacgcggagggtcgaggcggcgcggcctgagtgaaacccaatggaaaaagcatgacatttagaagtagaagacttagcttcaaatccctactccttcacttactaattttgtgatttggaaatatccgcgcaagatgttgacgttgcagacttggctagtgcaagccttgtttattttcctcaccactgaatctacaggtgaacttctagatccatgtggttatatcagtcctgaatctccagttgtacaacttcattctaatttcactgcagtttgtgtgctaaaggaaaaatgtatggattattttcatgtaaatgctaattacattgtctggaaaacaaaccattttactattcctaaggagcaatatactatcataaacagaacagcatccagtgtcacctttacagatatagcttcattaaatattcagctcacttgcaacattcttacattcggacagcttgaacagaatgtttatggaatcacaataatttcaggcttgcctccagaaaaacctaaaaatttgagttgcattgtgaacgaggggaagaaaatgaggtgtgagtgggatggtggaagggaaacacacttggagacaaacttcactttaaaatctgaatgggcaacacacaagtttgctgattgcaaagcaaaacgtgacacccccacctcatgcactgttgattattctactgtgtattttgtcaacattgaagtctgggtagaagcagagaatgcccttgggaaggttacatcagatcatatcaattttgatcctgtatataaagtgaagcccaatccgccacataatttatcagtgatcaactcagaggaactgtctagtatcttaaaattgacatggaccaacccaagtattaagagtgttataatactaaaatataacattcaatataggaccaaagatgcctcaacttggagccagattcctcctgaagacacagcatccacccgatcttcattcactgtccaagaccttaaaccttttacagaatatgtgtttaggattcgctgtatgaaggaagatggtaagggatactggagtgactggagtgaagaagcaagtgggatcacctatgaagataacattgcctccttttgaagccaatggaaaaatcttggattatgaagtgactctcacaagatggaaatcacatttacaaaattacacagttaatgccacaaaactgacagtaaatctcacaaatgatcgctatctagcaaccctaacagtaagaaatcttgttggcaaatcagatgcagctgttttaactatccctgcctgtgactttcaagctactcaccctgtaatggatcttaaagcattccccaaagataacatgctttgggtggaatggactactccaagggaatctgtaaagaaatatatacttgagtggtgtgtgttatcagataaagcaccctgtatcacagactggcaacaagaagatggtaccgtgcatcgcacctatttaagagggaacttagcagagagcaaatgctatttgataacagttactccagtatatgctgatggaccaggaagccctgaatccataaaggcataccttaaacaagctccaccttccaaaggacctactgttcggacaaaaaaagtagggaaaaacgaagctgtcttagagtgggaccaacttcctgttgatgttcagaatggatttatcagaaattatactatattttatagaaccatcattggaaatgaaactgctgtgaatgtggattcttcccacacagaatatacattgtcctctttgactagtgacacattgtacatggtacgaatggcagcatacacagatgaaggtgggaaggatggtccagaattcacttttactaccccaaagtttgctcaaggagaaattgaagccatagtcgtgcctgtttgcttagcattcctattgacaactcttctgggagtgctgttctgctttaataagcgagacctaattaaaaaacacatctggcctaatgttccagatccttcaaagagtcatattgcccagtggtcacctcacactcctccaaggcacaattttaattcaaaagatcaaatgtattcagatggcaatttcactgatgtaagtgttgtggaaatagaagcaaatgacaaaaagccttttccagaagatctgaaatcattggacctgttcaaaaaggaaaaaattaatactgaaggacacagcagtggtattggggggtcttcatgcatgtcatcttctaggccaagcatttctagcagtgatgaaaatgaatcttcacaaaacacttcgagcactgtccagtattctaccgtggtacacagtggctacagacaccaagttccgtcagtccaagtcttctcaagatccgagtctacccagcccttgttagattcagaggagcggccagaagatctacaattagtagatcatgtagatggcggtgatggtattttgcccaggcaacagtacttcaaacagaactgcagtcagcatgaatccagtccagatatttcacattttgaaaggtcaaagcaagtttcatcagtcaatgaggaagattttgttagacttaaacagcagatttcagatcatatttcacaatcctgtggatctgggcaaatgaaaatgtttcaggaagtttctgcagcagatgcttttggtccaggtactgagggacaagtagaaagatttgaaacagttggcatggaggctgcgactgatgaaggcatgcctaaaagttacttaccacagactgtacggcaaggcggctacatgcctcagtgaaggactagtagttcctgctacaacttcagcagtacctataaagtaaagctaaaatgattttatctgtgaattcagattttaaaaagtcttcactctctgaagatgatcatttgcccttaaggacaaaaatgaactgaagtttcacatgagctatttccattccagaatatctgggattctactttaagcactacataaactgactttatcctcagaaaaaaaaaaaaaaa

SEQ ID NO: 11555 - DNA, 1983 bp, Homo sapiens
gaattgaaccacccattttcctttcttagccaaatcaccaaaatgtccagttagaacaagaatttagcattctgcaaaagaagttaacagctgagataacgaggaaatattctgaaatggatcccaaatatttcatcttaattttgttttgtggacacctgaacaatacatttttttcaaagacagagacaattacaacagagaagcagtcacagcctaccttattcacatcatcaatgtcacaggtattggctaattctcaaaacacaacagggaatcctttgggtcaaccaacacaattcagcgacactttttctggacaatcaatatcacctgccaaagtcactgctggacaaccaacaccagctgtctatacctcttctgaaaaaccagaagcacatacttctgctggacaaccacttgcctacaacaccaaacaaccaacaccaatagccaacacctcctcccagcaagccgtgttcacctctgccagacaactaccatctgcccgtacttctaccacacaaccaccaaagtcatttgtctatacttttactcaacaatcatcatctgtccagatcccttctagaaaacaaataactgttcataatccatccacacaaccaacatcaactgtcaaaaattcacctaggagtacaccaggatttatcttagatactaccagtaacaaacaaaccccacaaaaaaacaattataattcaatagctgccatactaattggtgtacttctgacttctatgttggtagctataatcatcattgtactttggaaatgcttaaggaaaccagttttaaatgatcaaaattgggcaggtagatctccatttgctgatggagaaacccctgacatttgtatggataacatcagagaaaatgaaatatccacaaaacgtacatcaatcatttcacttacaccctggaaaccaagcaaaagcacacttttagcagatgacttagaaattaagttgtttgaatcaagtgaaaacattgaagactccaacaaccccaaaacagagaaaataaaagatcaagtaaatggtacatcagaagatagtgctgatggttcaacagttggaactgctgtttcttcttcagatgatgcaggtctgcctccaccacctccccttctggatttggaaggacaggaaagtaaccaatctgacaaacccacaatgacaattgtatctcctcttccaaatgattctactagtctccctccatctctggactgtctcaatcaagactgtggagatcataaatctgagataatacaatcatttccaccgcttgactcacttaacttgcccctgccaccagtagattttatgaaaaaccaagaagattccaaccttgagatccagtgtcaggagttctctattcctcccaactctgatcaagatcttaatgaatccctgccacctccacctgcagaactgttataaatattacaacttgctttttagctgatcttccatcctcaaatgactcttttttctttatatgttaacatatataaaatggcaactgatagtcaattttgatttttattcaggaactatctgaaatctgctcagagcctatgtgcatagatgaaacttttttttaaaaaaagttatttaacagtaatctatttactaattatagtacctatctttaaagtatagtacattttacatatgtaaatggtatgtttcaataatttaagaactctgaaacaatctacatatacttattacccagtacagttttttttcccctgaaaagctgtgtataaaattatggtgaataaacttttatgtttccatttcaaagaccagggtggagaggaataagagactaagtatatgcttcaagttttaaattaatacctcaagtattaaataaatattccaagtttgtgggaatgggagattaaaatgcatgtttgagagtaaaaaaaaaaaaaaaaaaaaaaaaaaaaaa

SEQ ID NO: 11556 - DNA, 2352 bp, Homo sapiens
gaaacttaaaggtgtttaccttgtcatcagcatgtaagctaattatctcgggcaagatgtaggcttctattgtcttgttgctttagcgcttacgccccgcctctggtggctgcctaaaacctggcgccgggctaaaacaaacgcgaggcagcccccgagcctccactcaagccaattaaggaggactcggtccactccgttacgtgtacatccaacaagatcggcgttaaggtaacaccagaatatttggcaaagggagaaaaaaaaagcagcgaggcttcgccttccccctctcccttttttttcctcctcttccttcctcctccagccgccgccgaatcatgtcgatgagtccaaagcacacgactccgttctcagtgtctgacatcttgagtcccctggaggaaagctacaagaaagtgggcatggagggcggcggcctcggggctccgctggcggcgtacaggcagggccaggcggcaccgccaacagcggccatgcagcagcacgccgtggggcaccacggcgccgtcaccgccgcctaccacatgacggcggcgggggtgccccagctctcgcactccgccgtggggggctactgcaacggcaacctgggcaacatgagcgagctgccgccgtaccaggacaccatgaggaacagcgcctctggccccggatggtacggcgccaacccagacccgcgcttccccgccatctcccgcttcatgggcccggcgagcggcatgaacatgagcggcatgggcggcctgggctcgctgggggacgtgagcaagaacatggccccgctgccaagcgcgccgcgcaggaagcgccgggtgctcttctcgcaggcgcaggtgtacgagctggagcgacgcttcaagcaacagaagtacctgtcggcgccggagcgcgagcacctggccagcatgatccacctgacgcccacgcaggtcaagatctggttccagaaccaccgctacaaaatgaagcgccaggccaaggacaaggcggcgcagcagcaactgcagcaggacagcggcggcggcgggggcggcgggggcaccgggtgcccgcagcagcaacaggctcagcagcagtcgccgcgacgcgtggcggtgccggtcctggtgaaagacggcaaaccgtgccaggcgggtgcccccgcgccgggcgccgccagcctacaaggccacgcgcagcagcaggcgcagcaccaggcgcaggccgcgcaggcggcggcagcggccatctccgtgggcagcggtggcgccggccttggcgcacacccgggccaccagccaggcagcgcaggccagtctccggacctggcgcaccacgccgccagccccgcggcgctgcagggccaggtatccagcctgtcccacctgaactcctcgggctcggactacggcaccatgtcctgctccaccttgctatacggtcggacctggtgagaggacgccgggccggccctagcccagcgctctgcctcaccgcttccctcctgcccgccacacagaccaccatccaccgctgctccacgcgcttcgacttttcttaacaacctggccgcgtttagaccaaggaacaaaaaaaccacaaaggccaaactgctggacgtctttctttttttccccccctaaaatttgtgggtttttttttttaaaaaaagaaaatgaaaaacaaccaagcgcatccaatctcaaggaatctttaagcagagaagggcataaaacagctttggggtgtctttttttggtgattcaaatgggttttccacgctagggcggggcacagattggagagggctctgtgctgacatggctctggactctaaagaccaaacttcactctgggcacactctgccagcaaagaggactcgcttgtaaataccaggatttttttttttttttgaagggaggacgggagctggggagaggaaagagtcttcaacataacccacttgtcactgacacaaaggaagtgccccctccccggcaccctctggccgcctaggctcagcggcgaccgccctccgcgaaaatagtttgtttaatgtgaacttgtagctgtaaaacgctgtcaaaagttggactaaatgcctagtttttagtaatctgtacattttgttgtaaaaagaaaaaccactcccagtccccagcccttcacattttttatgggcattgacaaatctgtgtatattatttggcagtttggtatttgcggcgtcagtctttttctgttgtaacttatgtagatatttggcttaaatatagttcctaagaagcttctaataaattatacaaattaaaaagattctttttctgattaaaaaaaaaaaaaaaaaa

SEQ ID NO: 11557 - DNA, 3316 bp, Homo sapiens
ggaggcaggcggtgccgcggcgccgggacccgactcatccggtgcttgcgtgtggtggtgagcgcagcgccgaggatgaggaggtgcaacagcggctccgggccgccgccgtcgctgctgctgctgctgctgtggctgctcgcggttcccggcgctaacgcggccccgcggtcggcgctctattcgccttccgacccgctgacgctgctgcaggcggacacggtgcgcggcgcggtgctgggctcccgcagcgcctgggccgtggagttcttcgcctcctggtgcggccactgcatcgccttcgccccgacgtggaaggcgctggccgaagacgtcaaagcctggaggccggccctgtatctcgccgccctggactgtgctgaggagaccaacagtgcagtctgcagagacttcaacatccctggcttcccgactgtgaggttcttcaaggcctttaccaagaacggctcgggagcagtatttccagtggctggtgctgacgtgcagacactgcgggagaggctcattgacgccctggagtcccatcatgacacgtggcccccagcctgtcccccactggagcctgccaagctggaggagattgatggattctttgcgagaaataacgaagagtacctggctctgatctttgaaaagggaggctcctacctgggtagagaggtggctctggacctgtcccagcacaaaggcgtggcggtgcgcagggtgctgaacacagaggccaatgtggtgagaaagtttggtgtcaccgacttcccctcttgctacctgctgttccggaatggctctgtctcccgagtccccgtgctcatggaatccaggtccttctataccgcttacctgcagagactctctgggctcaccagggaggctgcccagaccacagttgcaccaaccactgctaacaagatagctcccactgtttggaaattggcagatcgctccaagatctacatggctgacctggaatctgcactgcactacatcctgcggatagaagtgggcaggttcccggtcctggaagggcagcgcctggtggccctgaaaaagtttgtggcagtgctggccaagtatttccctggccggcccttagtccagaacttcctgcactccgtgaatgaatggctcaagaggcagaagagaaataaaattccctacagtttctttaaaactgccctggacgacaggaaagagggtgccgttcttgccaagaaggtgaactggattggctgccaggggagtgagccgcatttccggggctttccctgctccctgtgggtcctcttccacttcttgactgtgcaggcagctcggcaaaatgtagaccactcacaggaagcagccaaggccaaggaggtcctcccagccatccgaggctacgtgcactacttcttcggctgccgagactgcgctagccacttcgagcagatggctgctgcctccatgcaccgggtggggagtcccaacgccgctgtcctctggctctggtctagccacaacagggtcaatgctcgccttgcaggtgcccccagcgaggacccccagttccccaaggtgcagtggccaccccgtgaactttgttctgcctgccacaatgaacgcctggatgtgcccgtgtgggacgtggaagccaccctcaacttcctcaaggcccacttctccccaagcaacatcatcctggacttccctgcagctgggtcagctgcccggagggatgtgcagaatgtggcagccgccccagagctggcgatgggagccctggagctggaaagccggaattcaactctggaccctgggaagcctgagatgatgaagtcccccacaaacaccaccccacatgtgccggctgagggacctgaggcaagtcgacccccgaagctgcaccctggcctcagagctgcaccaggccaggagcctcctgagcacatggcagagcttcagaggaatgagcaggagcagccgcttgggcagtggcacttgagcaagcgagacacaggggctgcattgctggctgagtccagggctgagaagaaccgcctctggggccctttggaggtcaggcgcgtgggccgcagctccaagcagctggtcgacatccctgagggccagctggaggcccgagctggacggggccgaggccagtggctgcaggtgctgggagggggcttctcttacctggacatcagcctctgtgtggggctctattccctgtccttcatgggcctgctggccatgtacacctacttccaggccaagataagggccctgaagggccatgctggccaccctgcagcctgaaccacctggggaggaggcgggagagggagctgccatctctaggcacctcaagccccctgaccccattccctcccctcccaccccttgctccttgtctggcctagaagtgtgggaaattcaggaaaacgagttgctccagtgaagcttcttggggttgctaggacagagagctcctttgacacaaaagacaggagcagggtccaggttcccctgctgtgcagggagggcagccccgggcagtgggcatagggcagctcagtccctggcctcttagcaccacattcctgtttttcagcttatttgaagtcctgcctcattctcactggagcctcagtctctcctgcttggtcttggccctcaactggggcaagtgaagccagaggagggtcccccagctgggtgggctggaatggaactcctcactagctgctggggctccgcccaccctgctcccttccggacaatgaagaagcctttgcaccctgggaggaaggaccaccccgggccctctatgcctggccagcctccagctcctcagacctcctgggtggggtttggcttcagggtggggtttggaagcttctggaagtcgtgctggtctcccaggtgaggcaagccatggttgctgggctgtagggtgagtggcttgcttggtgggacctgacgagttggtggcatgggaaggatgtgggtctctagtgccttgccctggcttagctgcaggagaagatggctgctttcacttccccccattgagctctgctccctctgagcctggtcttttgtccttttttattttggtctccaagatgaatgctcatctttggagggtgccaggtagaagctagggaggggagtgtcttctctctccaggtttcaccttccagtgtgcagaagttagaagggtctggcgggggcagtgccttacacatgcttgattcccacgctaccccctgccttgggaggtgtgtggaataaattatttttgttaaggcaa

SEQ ID NO: 11558 - DNA, 7024 bp, Homo sapiens
gtggactgcattttgcaagaagttgagaagtttacagacctagagaaactctacctctaccttcagctgccttctggtctcagcaatggagagaaaagtgatcagaatgccatgtcatctagtcgggcacaacaaatgcatgccttttcctggattcggaataccctagaggaacatccggagacttcactgcccaaacaggaagtctatgatgagtacaagagctattgtgacaatcttggttaccatccattaagtgctgctgattttggaaagatcatgaaaaacgtctttccaaacatgaaggcacgtcgtttgggcacaagaggcaaatctaaatattgctacagtggactaagaaaaaaagcttttgttcatatgccaacactgcccaaccttgactttcacaaaactggagatgggttggaaggagctgaaccttctgggcagcttcaaaatattgatgaagaagttatctcttctgcttgccgtcttgtgtgtgagtgggcccagaaagtgttaagccaaccatttgacaccgtcttggaattagcccgcttccttgtaaaaagtcactatataggcaccaagtcaatggcagctctaactgtaatggcagcagcaccagcaggaatgaaaggaattacccagccttctgcttttatacctacagctgaaagtaattcctttcagcctcaggtgaagactttgccatctccaattgatgctaaacagcagttgcaacggaaaatccagaagaagcagcaagaacagaaactacaatcccctttgccaggagaatctgcagcaaaaaagtcagaaagtgctacaagcaatggagtgactaatcttcctaatggaaatccttcaatcctttctcctcaacctattggtatcgttgtggcagctgtccctagtcccattccggtccagcggactaggcaattggtaacttcaccgagtccaatgagttcttctgacggcaaagttcttcccctcaatgtacaggtggtcactcagcacatgcagtctgtgaaacaggcaccaaagactccccagaacgttccagccagtcctggtggggatcgttctgcccggcaccgttaccctcagatcttacccaaaccagcgaacaccagtgcactcaccattcgctctccaactactgtcctctttactagtagtcccatcaaaactgctgttgtacccgcttcacacatgagttctctaaatgtggtgaaaatgacaacaatatccctcacacccagcaacagtaacacccctcttaaacattctgcctcagtcagcagtgctacaggaacaacagaagaatcaaggagtgttccacagatcaagaatggttctgtcgtgtcgcttcagtctcctgggtccaggagcagcagtgcggggggaacatctgctgtggaagtcaaagtggaacccgaaacatcatcagatgagcatcctgtacagtgccaagagaactctgatgaggctaaagctccccagacacctagtgcccttttggggcagaaaagtaatacagacggagcactgcagaaaccttcaaatgaaggtgtcattgaaataaaagcaactaaggtctgtgaccagaggaccaaatgtaaaagtcgctgtaatgaaatgctgccaggcacgtcaacaggcaataatcaaagcactatcactctatcagttgcttctcagaacttgactttcaccagcagcagctcaccacctaatggtgactcaatcaataaagaccctaaattatgcactaaaagcccaagaaaacgactgtcttctacattgcaagagacccaggtgcctcctgtaaagaaaccaattgtggaacagctttcagcagctaccatagaagggcagaaacaaggcagtgttaagaaggaccaaaaggttccacattcagggaaaacagaaggttcaacagcaggtgctcagattcctagcaaggtatcagtaaatgtcagttcacacataggagcaaatcaacccttgaattcctctgcccttgttatcagtgattcagctttggaacagcaaacaaccccatcatcatctccagatataaaagtaaaacttgaaggaagtgtctttctcttggacagtgattcaaagtcagttggcagctttaatccaaatggatggcaacaaatcactaaagattctgagtttatatctgccagttgtgaacaacagcaagatatcagtgttatgacaattcctgagcactctgatatcaatgacttagagaaatctgtttgggaattagaaggaatgccacaggacacatatagccagcagctacatagccagatacaggaatcttctttaaatcaaatacaagcacattcttcagatcagttacctctgcaatctgaactgaaggagtttgagccttctgtttcccagacaaatgaaagctactttccttttgatgatgaacttacacaagatagtattgtggaagagctggtgcttatggagcagcaaatgtcaatgaacaattctcattcttacggcaactgtttgggaatgacccttcagagtcagtcagtaactccaggagctccaatgtcatctcacacttccagcacccacttctatcatccaatccacagcaatggcactccaatccacacacccacacccacacccacacccactcctactccaaccccaaccccaaccccgacatctgaaatgattgctggatctcagagtctgtcacgggagagcccttgctccaggctagcccagactacacctgtggatagtgctttaggaagtagccgacatacacccattggtactccacattctaactgcagcagtagtgtcccccccagccctgttgaatgcaggaatccgtttgcattcactccaataagctccagtatggcatatcatgacgccagcattgtctcaagtagtcctgtgaaaccgatgcaaagacccatggccacacaccctgacaaaaccaagcttgaatggatgaataatgggtatagtggggttggtaattcatcagtttctggccatggtattctcccaagctatcaggaactagtggaagaccgtttcaggaaacctcatgcttttgctgtgcctggacagtcttatcagtctcaatccagacatcatgacactcattttggtcgtttgactcctgtctctcctgtgcagcatcaaggtgccactgtaaataacaccaacaaacaggagggttttgcagtccctgcccctcttgataataaaggaactaattcatctgccagcagcaacttcagatgccggagtgtgagccctgctgttcatcgccaacgtaatcttagtggaagcaccctctatccagtatctaatatcccacgatctaatgtgaccccctttggaagtccagttaccccagaagttcatgttttcacaaatgttcacacagacgcatgtgccaacaacatagctcaaagaagccaatcagttccattgacagtcatgatgcagacagccttcccaaacgctcttcagaagcaagcaaacagtaaaaaaataaccaatgttttgttgagtaaacttgattccgacaatgatgatgcagtgagaggtttgggaatgaacaacctgccctctaattatacagcccggatgaatctcactcagattttggaaccttccactgtttttcctagtgccaacccacaaaatatgatcgattccagcacttctgtttatgagttccaaacaccatcttacctcaccaaaagtaatagcaccggtcagatcaatttttctcctggagataatcaagcacaatcagaaattggagagcaacaattagatttcaatagcactgttaaagacctgttgagtggagacagcttgcaaaccaaccagcagctggtaggtcagggagcatctgatctcactaatactgcatctgatttctctagcgatatcaggttgtcttctgagctctcaggcagcatcaatgatttgaacactttagacccaaatctactgtttgatccaggtcgtcagcagggacaagatgatgaagctacactggaagaattaaagaatgacccattatttcaacaaatttgcagtgaatccatgaattctatgacttcatcaggttttgaatggatagaaagcaaggaccatcctactgttgaaatgttgggttaaattgtgttttataacatgtagcacactgtatctaaagacatatgtattgtatttgtcttaatggaagtgcctcccgcagcagaaatactattaattgtgacattttaaaagcgtttgctgcagaagtggtttcttcagtaggaaatggttagacttgcctcagttcttaacaagtgtctaaagacagtaggctgtagaagaacaagtattaggttttaaattttataatgtgccccatttattcacattgattgactatccagctgttacaagagcagtcgatctttattttgtgtaagttagtttcatttcatcagatgatctgcacagaactcagaataaaccatcaattttaggtataggctgttttgttgttggcattatcttttagatataaaatcatagctagggtgaactgtagacaagaaagtcttccttgaaacagggataatattcaggttattataaatatttaggcttgaagcatagagctactgtagggtgaaaaatctctgtaggactttctggggcttcagtaccatttacacccacgatgaagggcttaaatagaaaataatggaaaattaaatattactttaaggaaagcaaagctgcactaaaatttttaagggaaaaaaaacaagtagccatttatatttgtgaccttgcattaatatttaaatgttgattttaatatggagctagcacacatagatgcgcaggcacgcacacacaaaacaagcaaatgtaactccaggcatttgtaatttaatataataaatacaagcatgttagaaaaatgctttatgtcttattatttgttaagttaggggaatgagaaggaaaacaaaagcattctcttagtttcatcacaatggctgcatgtacatattgagattctaattgagatttactttgaaatttttcattaaaatattccacaataatcagtttttttcctcttcaattgagtgactgactccctcactcctcctgaatatagtaatgtagtttgatcataggatccctttgaaaaacaggaaggaggataacataaaaaacaacaaaaaacatttcaccacctaaggtctgaagccacaaatctttatatctctgatgaaacaaaggggatatcaatagtacttgaagaagaagagcattttattacttgcttaatttatttattgtgataaccacaattgcaaaagaagaactcaggatttgttttaaaatgtttctctctatggctcccattttgttttgtgaataattatttatgagttgcatgttgacacaaacctactcactggttgaaagctccatttaagtgagtttcaagatcactttcaaagagatttttaaattgccattgtttttaaagctaacataaaaccatttgctatgctaccttgaacctagctaagctttcctttaccttagtaagccaatcagaagactacaatcaatgaatatttagcaaatgtgctgaagggtttaataaggttttgttgttcaataaatttgcaaggtagggtattaacatattttgataaataaatggtgctagagttggcgcagaggtttatatattgatatgtcttagttattggcatttgtgtgtgtttgctgttatcttgatttcatgatttgttaggtatttttttcttgatgctagttatttcttcactgtacattgagacacagcactactgcacaccaaagtatgcaatacccaaaggaaactctgtgatttctcctgacaaatgatgggagcctttctttatgagatactctgaaaaggagattttgaggccattctaatcccttgtttacattattagcttcctactaatataaaaataatggaaatcttttttgataaaaatattaagactggaggatttttaaccccttgtacagtattgcagcaaactctttaaatttggttgaattcgtccagcaaactttctggggttcatatattgcactaaatttgttgaacctgtggtaggcacatctcttaggataaatgcaaccaatacagtccacagattaaactttttaaatgtgtttcattatgaaaagacaaaatgtcatcaaagtgacagataaaattgtcttatgtagcaatgtgcattgatctcaatgagatatttctattattctcttacatgagaatattacagcaggaagaattaagtttagtttgcttcaccatgttaatacatgatcacaaaatgtgcatgagtgttattgacttatcttgtacagtactaggattcctgtaaccactcttttttttcttcgctgtattgaaactggttcagtgttaaccaggcaagcatagttattcacaggttatttactttatgtttactaattctgcttagttattgttgaatatgttctgttccagattatttttattgttttgatgtttaaaacattttgcatactgtttatcataaaacttcatgaagtaaataattttgcatataattgcaataagcactgacttttgaactgaaaagaaggaaagtgtttttttgtgcagtgcttctgaggttcatataatagtcttgtactataatgtgctttactacacgataaatgacaaaaacaagccctgtttcatgtttcatttagtgcaaaaagtcagatttccccagtgttttgttgtctgttgtacctgctgaaactacagtagttgaatattgcggtagcatttcagttctctttttttattaaagtgctcaaaaattgttttttaaatgttttcaaaaacaattaaaaacattttatattaaaaaaaaaaaaaaaa

SEQ ID NO: 11559 - DNA, 3985 bp, Homo sapiens
gaagggcagacagagtgtccaaaagcgtgagagcacgaagtgaggagaaggtggagaagagagaagaggaagaggaagaggaagagaggaagcggagggaactgcggccaggctaaaaggggaagaagaggatcagcccaaggaggaggaagaggaaaacaagacaaacagccagtgcagaggagaggaacgtgtgtccagtgtcccgatccctgcggagctagtagctgagagctctgtgccctgggcaccttgcagccctgcacctgcctgccacttccccaccgaggccatgggcccaggagttctgctgctcctgctggtggccacagcttggcatggtcagggaatcccagtgatagagcccagtgtccctgagctggtcgtgaagccaggagcaacggtgaccttgcgatgtgtgggcaatggcagcgtggaatgggatggccccccatcacctcactggaccctgtactctgatggctccagcagcatcctcagcaccaacaacgctaccttccaaaacacggggacctatcgctgcactgagcctggagaccccctgggaggcagcgccgccatccacctctatgtcaaagaccctgcccggccctggaacgtgctagcacaggaggtggtcgtgttcgaggaccaggacgcactactgccctgtctgctcacagacccggtgctggaagcaggcgtctcgctggtgcgtgtgcgtggccggcccctcatgcgccacaccaactactccttctcgccctggcatggcttcaccatccacagggccaagttcattcagagccaggactatcaatgcagtgccctgatgggtggcaggaaggtgatgtccatcagcatccggctgaaagtgcagaaagtcatcccagggcccccagccttgacactggtgcctgcagagctggtgcggattcgaggggaggctgcccagatcgtgtgctcagccagcagcgttgatgttaactttgatgtcttcctccaacacaacaacaccaagctcgcaatccctcaacaatctgactttcataataaccgttaccaaaaagtcctgaccctcaacctcgatcaagtagatttccaacatgccggcaactactcctgcgtggccagcaacgtgcagggcaagcactccacctccatgttcttccgggtggtagagagtgcctacttgaacttgagctctgagcagaacctcatccaggaggtgaccgtgggggaggggctcaacctcaaagtcatggtggaggcctacccaggcctgcaaggttttaactggacctacctgggacccttttctgaccaccagcctgagcccaagcttgctaatgctaccaccaaggacacatacaggcacaccttcaccctctctctgccccgcctgaagccctctgaggctggccgctactccttcctggccagaaacccaggaggctggagagctctgacgtttgagctcacccttcgataccccccagaggtaagcgtcatatggacattcatcaacggctctggcacccttttgtgtgctgcctctgggtacccccagcccaacgtgacatggctgcagtgcagtggccacactgataggtgtgatgaggcccaagtgctgcaggtctgggatgacccataccctgaggtcctgagccaggagcccttccacaaggtgacggtgcagagcctgctgactgttgagaccttagagcacaaccaaacctacgagtgcagggcccacaacagcgtggggagtggctcctgggccttcatacccatctctgcaggagcccacacgcatcccccggatgagttcctcttcacaccagtggtggtcgcctgcatgtccatcatggccttgctgctgctgctgctcctgctgctattgtacaagtataagcagaagcccaagtaccaggtccgctggaagatcatcgagagctatgagggcaacagttatactttcatcgaccccacgcagctgccttacaacgagaagtgggagttcccccggaacaacctgcagtttggtaagaccctcggagctggagcctttgggaaggtggtggaggccacggcctttggtctgggcaaggaggatgctgtcctgaaggtggctgtgaagatgctgaagtccacggcccatgctgatgagaaggaggccctcatgtccgagctgaagatcatgagccacctgggccagcacgagaacatcgtcaaccttctgggagcctgtacccatggaggccctgtactggtcatcacggagtactgttgctatggcgacctgctcaactttctgcgaaggaaggctgaggccatgctgggacccagcctgagccccggccaggaccccgagggaggcgtcgactataagaacatccacctcgagaagaaatatgtccgcagggacagtggcttctccagccagggtgtggacacctatgtggagatgaggcctgtctccacttcttcaaatgactccttctctgagcaagacctggacaaggaggatggacggcccctggagctccgggacctgcttcacttctccagccaagtagcccagggcatggccttcctcgcttccaagaattgcatccaccgggacgtggcagcgcgtaacgtgctgttgaccaatggtcatgtggccaagattggggacttcgggctggctagggacatcatgaatgactccaactacattgtcaagggcaatgcccgcctgcctgtgaagtggatggccccagagagcatctttgactgtgtctacacggttcagagcgacgtctggtcctatggcatcctcctctgggagatcttctcacttgggctgaatccctaccctggcatcctggtgaacagcaagttctataaactggtgaaggatggataccaaatggcccagcctgcatttgccccaaagaatatatacagcatcatgcaggcctgctgggccttggagcccacccacagacccaccttccagcagatctgctccttccttcaggagcaggcccaagaggacaggagagagcgggactataccaatctgccgagcagcagcagaagcggtggcagcggcagcagcagcagtgagctggaggaggagagctctagtgagcacctgacctgctgcgagcaaggggatatcgcccagcccttgctgcagcccaacaactatcagttctgctgaggagttgacgacagggagtaccactctcccctcctccaaacttcaactcctccatggatggggcgacacggggagaacatacaaactctgccttcggtcatttcactcaacagctcggcccagctctgaaacttgggaaggtgagggattcaggggaggtcagaggatcccacttcctgagcatgggccatcactgccagtcaggggctgggggctgagccctcacccccccctcccctactgttctcatggtgttggcctcgtgtttgctatgccaactagtagaaccttctttcctaatccccttatcttcatggaaatggactgactttatgcctatgaagtccccaggagctacactgatactgagaaaaccaggctctttggggctagacagactggcagagagtgagatctccctctctgagaggagcagcagatgctcacagaccacactcagctcaggccccttggagcaggatggctcctctaagaatctcacaggacctcttagtctctgccctatacgccgccttcactccacagcctcacccctcccacccccatactggtactgctgtaatgagccaagtggcagctaaaagttgggggtgttctgcccagtcccgtcattctgggctagaaggcaggggaccttggcatgtggctggccacaccaagcaggaagcacaaactcccccaagctgactcatcctaactaacagtcacgccgtgggatgtctctgtccacattaaactaacagcattaatgca

SEQ ID NO: 11560 - DNA, 4040 bp, Homo sapiens
gtccttcccacccttagtcccaggcatctgactaccgggaacctcagccagagtccgggagccccccaccccgtccaggagccaacagagcccccgtcttgctggcgtgagaatacattgctctcctttggttgaatcagctgtccctcttcgtgggaaaatgaaccagaagacaatcctcgtgctcctcattctggccgtcatcaccatctttgccttggtttgtgtcctgctggtgggcaggggtggagatgggggtgaacccagccagcttccccattgcccctctgtatctcccagtgcccagccttggacacaccctggccagagccagctgtttgcagacctgagccgagaggagctgacggctgtgatgcgctttctgacccagcggctggggccagggctggtggatgcagcccaggcccggccctcggacaactgtgtcttctcagtggagttgcagctgcctcccaaggctgcagccctggctcacttggacagggggagccccccacctgcccgggaggcactggccatcgtcttctttggcaggcaaccccagcccaacgtgagtgagctggtggtggggccactgcctcacccctcctacatgcgggacgtgactgtggagcgtcatggaggccccctgccctatcaccgacgccccgtgctgttccaagagtacctggacatagaccagatgatcttcaacagagagctgccccaggcttctgggcttctccaccactgttgcttctacaagcaccggggacggaacctggtgacaatgaccacggctccccgtggtctgcaatcaggggaccgggccacctggtttggcctctactacaacatctcgggcgctgggttcttcctgcaccacgtgggcttggagctgctagtgaaccacaaggcccttgaccctgcccgctggactatccagaaggtgttctatcaaggccgctactacgacagcctggcccagctggaggcccagtttgaggccggcctggtgaatgtggtgctgatcccagacaatggcacaggtgggtcctggtccctgaagtcccctgtgcccccgggtccagctccccctctacagttctatccccaaggcccccgcttcagtgtccagggaagtcgagtggcctcctcactgtggactttctcctttggcctcggagcattcagtggcccaaggatctttgacgttcgcttccaaggagaaagactagtttatgagataagcctccaagaggccttggccatctatggtggaaattccccagcagcaatgacgacccgctatgtggatggaggctttggcatgggcaagtacaccacgcccctgacccgtggggtggactgcccctacttggccacctacgtggactggcacttccttttggagtcccaggcccccaagacaatacgtgatgccttttgtgtgtttgaacagaaccagggcctccccctgcggcgacaccactcagatctctactcgcactactttgggggtcttgcggaaacggtgctggtcgtcagatctatgtccaccttgctcaactatgactatgtgtgggatacggtcttccaccccagtggggccatagaaatacgattctatgccacgggctacatcagctcggcattcctctttggtgctactgggaagtacgggaaccaagtgtcagagcacaccctgggcacggtccacacccacagcgcccacttcaaggtggatctggatgtagcaggactggagaactgggtctgggccgaggatatggtctttgtccccatggctgtgccctggagccctgagcaccagctgcagaggctgcaggtgacccggaagctgctggagatggaggagcaggccgccttcctcgtgggaagcgccacccctcgctacctgtacctggccagcaaccacagcaacaagtggggtcacccccggggctaccgcatccagatgctcagctttgctggagagccgctgccccaaaacagctccatggcgagaggcttcagctgggagaggtaccagctggctgtgacccagcggaaggaggaggagcccagtagcagcagcgttttcaatcagaatgacccttgggcccccactgtggatttcagtgacttcatcaacaatgagaccattgctggaaaggatttggtggcctgggtgacagctggttttctgcatatcccacatgcagaggacattcctaacacagtgactgtggggaacggcgtgggcttcttcctccgaccctataacttctttgacgaagacccctccttctactctgccgactccatctacttccgaggggaccaggatgctggggcctgcgaggtcaaccccctagcttgcctgccccaggctgctgcctgtgcccccgacctccctgccttctcccacgggggcttctctcacaactaggcggtcctgggatggggcatgtggccaagggctccagggccagggtgtgagggatggggagcagctgggcactgggccggcagcctggttccctctttcctgtgccaggactctctttcttccactaccctccctcgcatccgcctctgagccaggagcctcctgaccctgtgatgcctgacacaggggacactgaaccttgttgatgccagctgtactgagttctcatccacagaggccaggcatggcccagcctggagccgtggccgagggcttccctagatggttccctttgttgctgtctggctttcccgaatctttttaggccacctccaaggactctaaaagggggctattccctggagaccccagagtagggttgccagtcctgcaagtccatagctgagctggaaaggatgcttctgctcacattccctctcatccaggtcctttccttctcgtcttcctctctctcacctacttcctcctcctcctcctgttcctgccttctcttctatcctgcaatttctcccgaatcctgaggggatatccctatgtcccagcccctggtactcccccagccctcagttttcagtcaagttccgtctcctctccagccctatggaagtctcaaggtcacgggacccctaatcagagtggccaatccctgtgtgtcgttcccttgtgtctgttgcttattgggagtaggagttgctcctacccctgtcctggggctgggtgtgtttcaggacagctgcttctgtgcatttgtgtctgcctgcctcatgctctctatagaggaggatggtcatcgtgacagcagcagctcaagttagcatttcaagtgatttgggggtgcaatgataatgaagaatggccattttgtaccagggctctgtattctgcaacagcctgtttgggaggctggagtggaaacaaagggtgggcatcaaagatgagaagccaaagcccctacaactccagccacccagccaggaggggctgtccaatcacattcaggcatgcgaatgagctgggccctgggtgaggtgggggtctggcctagtggggaggggcctggcctgggtggggcagggcctggcctggtccaggcttgggctccattcccatcactgctgtccctcctgaggtctggattggggatggggacaaagaaatagcaagagatgagaaacaacagaaacttttttctctaaaggactggttaaatcaattctgatacagccttacaatacaatagtatgcagctaaaaaataattgtatgtctttatatactaatatgtaataatcttcaggtgaaaaaggcaagccacagaaatgtgtatagcgcacttcccatttgtgtttcagaaaggagtagaatataaacacataattgcttatgtatgcctattcagaataaatgggtaacactgattacttttgggaggggaaccagtaggttgaggacaggagagggaagggtcttaacacttacacccttttgtacattttgaattttgaaccatgtgactgtattacctattcaaaataaacaataaatgggcccaaaaaaaaaaaaaaaaa

SEQ ID NO: 11561 - DNA, 5787 bp, Homo sapiens
atgttacttcctgtatggaggcatggccagtttccagcgccgcgctcttcgttccttcccagcctgcgccggagccacaactttcaggagcatggactgaaggcgccctcgccccagcgcccctctgagatcctttgtgttttcctccgtttcctccggccgtttctattttggggggctctccgctccccctgcctctcccctccccttcccctctcgcaaacatgcctccttccttcccggggccctggaaggagctgcctgcctgaagcccggagacgccgcgccgcgctcagccccgccgccgcccgccggctctcgggctgtgctgcgctgccgactcaagttggggatcctcggctgctcgccgccgccgcccgcggtccctgtctgccccaggcccggggcatcgccgccggccgccgactccgcgccctgcccgatcggctctctcctttttaaacggaaagcagcctttctccgccgagaggatcgtccccagcgtggctctgcgttcccggtcactttttgagattttccggggggcgctcggcggcttcccggattccaaggggactcgggccgccgagcgcggggggcccgtggagcgggcgagccggggaagcgccccggcttagcggaggctcgcacggaggcaagaacttattcaacaagtttacctccctgctttcctcttttcgatgtgcgttttcggacatgcggaggttactggaaccgtgttggtggattttgttcctgaaaatcaccagttccgtgctccattatgtcgtgtgcttccccgcgttgacagaaggctacgttggggccctgcacgagaatagacacggcagcgcagtgcagatccgcaggcgcaaggcttcaggcgacccgtactgggcctactctggtgcctatggtcctgagcactgggtcacgtctagtgtcagctgtgggagccgtcaccagtctcctattgacattttagaccagtatgcgcgtgttggggaagaataccaggaactgcaactcgatggcttcgacaatgagtcttctaacaaaacctggatgaaaaacacagggaaaacagtcgccatccttctgaaagacgactattttgtcagtggagctggtctacctggcagattcaaagctgagaaggtggaatttcactggggccacagcaatggctcagcgggctctgaacacagcatcaatggcaggaggtttcctgttgagatgcagattttcttttacaatccagatgactttgacagctttcaaaccgcaatttctgagaacagaataatcggagccatggccatattttttcaagtcagtccgagggacaattctgcactggatcctattatccacgggttgaagggtgtcgtacatcatgagaaggagacctttctggatcctttcgtcctccgggacctcctgcctgcatccctgggcagctattatcggtacacaggttccttgaccacaccaccgtgtagcgaaatagtggagtggatagtcttccggagacccgtccccatctcttaccatcagcttgaggctttttattccatcttcaccacggagcagcaagaccatgtcaagtcggtggagtatctgagaaataactttcgaccacagcagcgtctgcatgacagggtggtgtccaagtccgccgtccgtgactcctggaaccacgacatgacagacttcttagaaaacccactggggacagaagcctctaaagtttgcagctctccacccatccacatgaaggtgcagcctctgaaccagacggcactgcaggtgtcctggagccagccggagactatctaccacccacccatcatgaactacatgatctcctacagctggaccaagaatgaggacgagaaggagaagacgtttacaaaggacagcgacaaagacttgaaagccaccattagccatgtctcacccgatagcctttacctgttccgagtccaggccgtgtgtcggaacgacatgcgcagcgactttagccagacgatgctgtttcaagctaataccactcgaatattccaagggaccagaatagtgaaaacaggagtgcccacagcgtctcctgcctcttcagccgacatggcccccatcagctcggggtcttctacctggacgtcctctggcatcccattctcatttgtttccatggcaactgggatgggcccctcctccagtggcagccaggccacagtggcctcggtggtcaccagcacgctgctcgccggcctggggttcggcggtggtggcatctcctctttccccagcactgtgtggcccacgcgcctcccgacggccgcctcagccagcaagcaggcggctaggccagtcctagccaccacagaggccttggcttctccagggcccgatggtgattcgtcaccaaccaaggacggcgagggcaccgaggaaggagagaaggatgagaaaagcgagagtgaggatggggagcgggagcacgaggaggatggagagaaggactccgaaaagaaggagaagagtggggtgacccacgctgccgaggagcggaatcagacggagcccagccccacaccctcgtctcctaacaggactgccgagggagggcatcagactatacctgggcatgagcaggatcacactgccgtccccacagaccagacgggcggaaggagggatgccggcccaggcctggaccccgacatggtcacctccacccaagtgccccccaccgccacagaggagcagtatgcagggagtgatcccaagaggcccgaaatgccatctaaaaagcctatgtcccgcggggaccgattttctgaagacagcagatttatcactgttaatccagcggaaaaaaacacctctggaatgataagccgccctgctccagggaggatggagtggatcatccctctgattgtggtatcagccttgaccttcgtgtgcctcatccttctcattgctgtgctcgtttactggagagggtgtaacaaaataaagtccaagggctttcccagacgtttccgtgaagtgccttcttctggggagagaggagagaaggggagcagaaaatgttttcagactgctcatttctatgtggaagacagcagttcacctcgagtggtccctaatgaaagtattcctattattcctattccggatgacatggaagccattcctgtcaaacagtttgtcaaacacatcggtgagctctattctaataaccagcatgggttctctgaggattttgaggaagtccagcgctgtactgctgatatgaacatcactgcagagcattccaatcatccagaaaacaagcacaaaaacagatacatcaacattttagcatatgatcacagtagggtgaagttaagacctttaccaggaaaagactctaagcacagcgactacattaatgcaaactatgttgatggttacaacaaagcaaaagcctacattgccacccaaggacctttgaagtctacatttgaagatttctggaggatgatttgggaacaaaacactggaatcattgtgatgattacgaaccttgtggaaaaaggaagacgaaaatgtgatcagtattggccaacagagaacagtgaggaatatggaaacattattgtcacgctgaagagcacaaaaatacatgcctgctacactgttcgtcgtttttcaatcagaaatacaaaagtgaaaaagggtcagaagggaaatcccaagggtcgtcagaatgaaagggtagtgatccagtatcactatacacagtggcctgacatgggagttcccgagtatgcccttccagtactgactttcgtgaggagatcctcagcagctcggatgccagaaacgggccctgtgttggtgcactgcagtgctggtgtgggcagaacaggcacctatattgtaatagacagcatgctgcaacagataaaagacaaaagcacagttaacgtcctgggattcctgaagcatatcaggacacagcgtaactacctcgtccagactgaggagcagtacattttcatccatgatgccttgttggaagccattcttggaaaggagactgaagtatcttcaaatcagctgcacagctatgttaacagcatccttataccaggagtaggaggaaagacacgactggaaaagcaattcaagctggtcacacagtgtaatgcaaaatatgtggaatgtttcagtgctcagaaagagtgtaacaaagaaaagaacagaaactcttcagttgtgccatctgagcgtgctcgagtgggtcttgcaccattgcctggaatgaaaggaacagattacattaatgcttcttatatcatgggctattataggagcaatgaatttattataactcagcatcctctgccacatactacgaaagatttctggcgaatgatttgggatcataacgcacagatcattgtcatgctgccagacaaccagagcttggcagaagatgagtttgtgtactggccaagtcgagaagaatccatgaactgtgaggcctttaccgtcacccttatcagcaaagacagactgtgcctctctaatgaagaacaaattatcatccatgactttatccttgaagctacacaggatgactatgtcttagaagttcggcactttcagtgtcccaaatggcctaacccagatgcccccataagtagtacctttgaacttatcaacgtcatcaaggaagaggccttaacaagggatggtcccaccattgttcatgatgagtatggagcagtttcagcaggaatgttatgtgcccttaccaccctgtcccagcaactggagaatgaaaatgctgtggatgttttccaggttgcaaaaatgatcaatcttatgaggcctggagtattcacagacattgaacaataccagttcatctataaagcaaggcttagcttggtcagcactaaagaaaatggaaatggtcccatgacagtagacaaaaatggtgctgttcttattgcagatgaatcagaccctgctgagagcatggagtccctagtgtgactggaatcctgaaagggcacttaatttgtaaacttctgaagactgagaacttttttgaggccttttttgccagactctaggttatacaataacccagttacttttttacactgataaaagttttgatatttattttttgccattttatgtcttaatggtatcctactgagcatttgcacctctgttcatttcacacagtgaaacgcaattttacctagtttgcactatatgatcagtgttactgcctataatcttatacaacagcaaaccctgatgtgacattccatgacgacatacatgctacttttttttagttcaatacagtgaaggtctttgttatgacagtgaatattgcttttattattattattgctgaagtggttgcattctactagcaggcaatgctgtacttttcttcagtcctcctctcctttttattttaggcactgttcaatactgtatgccttctgtattttaatggagtggatagcattgttttcttttacagactagcaggctactgggacctaaaaaggtctgttaatgtcatggccttgaaacagttccatttatgctggttaagagatcccttaagaagttagaaggcttaagaactgcttcatgtgaacatcccttattagttacaaagttatattcacagttttttaaaaatgtgtcaaaataaaggataactctgtattacagctttcccagtaaaaaaaaaaaaaaaaa

SEQ ID NO: 11562 - DNA, 2292 bp, Homo sapiens
ggagaaaggcaggcagccggcgggcgctgcgtgtgtgtttgagtgtgcgagtgtgagtgagtgtgagtgccgggtcctgcctctcctggtgcccccagcagaggggcccggtggcctggggagggcgggcgggctgctcggaggcagaggcagcaagaggcggcggcggggagagccgagaaggaggaggaggagagaggaaagagcggagcagccattgttgagggaaaccttgcaaacaaagaaggctccggactccccgcggccccccgccccccaggccggccccctggcccccggcccccggcccagtggccattgtaactttcccccgggacagcggccgccgcggggcgggccgaggctgtgcgtgcgagtctttgtgcggccggcggactggagctcccagtcgggcctgcccgtcccactcgggacatgagctgctgaagttgtccccccgtcagccctcacccctgccaggactcctctgggcttgcagtcgctcccccgtacctctcctggccccctcagttctcccaggttgttcctcaaagtcattcaagctgtactcgccgaaggagcccccgaacggcaacgcctttccccccttccatcccggcaccatgctggatagggatgtgggcccaactcccatgtatccgcctacatacctggagccagggattgggaggcacacaccatatggcaaccaaactgactacagaatatttgagcttaacaaacggcttcagaactggacagaggagtgtgacaatctctggtgggatgcattcacgactgagttctttgaggatgatgccatgttgaccatcactttctgcctggaggatggaccaaagagatataccattggccggaccctgatcccacgctacttccgcagcatctttgaggggggtgctacggagctgtactatgttcttaagcaccccaaggaggcattccacagcaactttgtgtccctcgactgtgaccagggcagcatggtgacccagcatggcaagcccatgttcacccaggtgtgtgtggagggccggttgtacctggagttcatgtttgacgacatgatgcggataaagacgtggcacttcagcatccggcagcaccgagagctcatcccccgcagcatccttgccatgcatgcccaagacccccagatgttggatcagctctccaaaaacatcactcggtgtgggctgtccaattccactctcaactacctccgactctgtgtgatactcgagcccatgcaagagctcatgtcacgccacaagacctacagcctcagcccccgcgactgcctcaagacctgccttttccagaagtggcagcgcatggtagcaccccctgcggagcccacacgtcagcagcccagcaaacggcggaaacggaagatgtcagggggcagcaccatgagctctggtggtggcaacaccaacaacagcaacagcaagaagaagagcccagctagcaccttcgccctctccagccaggtacctgatgtgatggtggtgggggagcccaccctgatgggcggggagttcggggacgaggacgagaggctcatcacccggctggagaacacccagtttgacgcagccaacggcattgacgacgaggacagctttaacaactcccctgcactgggcgccaacagcccctggaacagcaagcctccgtccagccaagaaagcaaatcggagaaccccacgtcacaggcctcccagtaaaaggccctgctgtggccacccagtgctctgcctacctgccccacccctcacagccccagggagcagaagacagaatgaagagactgagcatctaaaatgggcagcctccatccacccgcttcagggaggaactggactctctgggggcaggtgccaagatttgcccccccagtggccctgggctgggcctggcctctacagagccttttagggggagggggtactcatgtggatgcctacttggaacctgggcctctgagacatgtcctgaccaccccccagggcatttgcctccatcttcaccccagattgtgggtttcccatccccctgactttacccctttcaagcctggggttgtctatacccacagcccttagggacttaaagttacggggcttcgttgaatgctccttcccctaggcagctggtaatagaggggtaaagctctgggcccctcctccctgctgccacttatcccagctccaagtttttttaaaaataatattattaaaaatgtaagttaaaaaaaaaaaaaaaaaa

SEQ ID NO: 11563 - DNA, 5925 bp, Homo sapiens
atgagttctgactctgagatggccatttttggggaggctgctcctttcctccgaaagtctgaaagggagcgaattgaagcccagaacaagccttttgatgccaagacatcagtctttgtggtggaccctaaggagtcctttgtgaaagcaacagtgcagagcagggaaggggggaaggtgacagctaagaccgaagctggagctactgtaacagtgaaagatgaccaagtcttccccatgaaccctcccaaatatgacaagatcgaggacatggccatgatgactcatctacacgagcctgctgtgctgtacaacctcaaagagcgctacgcagcctggatgatctacacctactcaggcttgttctgtgtcactgtcaacccctacaagtggttgccagtgtataatgcagaagtggtgacagcctaccgaggcaaaaagcgccaggaagccccaccccacatcttctccatctctgacaatgcctatcagttcatgctgactgatcgggagaatcagtctatcttgatcaccggagaatctggcgcagggaagactgtgaacaccaagcgtgtcatccagtactttgcaacaattgcagttactggggagaagaagaaggaagaagttacttctggcaaaatgcaggggactctggaagatcaaatcatcagtgccaaccccctactggaggcctttggcaacgccaagaccgtgaggaatgacaactcctctcgctttggtaaattcatcaggatccacttcggtaccacagggaaactggcttctgctgatattgaaacatatcttctggagaagtctagagttactttccagctaaaggctgaaagaagctatcatattttttatcagatcatgtctaacaagaagccagatctaattgaaatgctcctgatcaccaccaacccatacgattatgccttcgtcagtcaaggggagatcacagtgcccagcattgatgaccaagaagagttgatggctacagatagtgccattgaaattctgggctttacttcagatgaaagagtgtccatctataagctcacaggggctgtgatgcattatgggaacatgaaattcaagcaaaagcagcgtgaggagcaagctgagccagatggcactgaagttgctgacaaggcagcctatctccaaaatctgaactctgcagatctgctcaaagccctctgctaccctagggtcaaggtcggcaatgagtatgtcaccaaaggtcaaactgtgcagcaggtgtacaatgcagtgggtgctctggccaaagctgtctacgataagatgttcttgtggatggtcacccgcatcaaccagcagctggacaccaagcagcccaggcagtacttcattggggtcttggacattgctggctttgagatctttgatttcaacagcctggagcagctgtgcatcaacttcaccaatgagaaactgcaacagtttttcaaccaccacatgttcgtgctggagcaggaggagtacaagaaggaaggcattgagtggacgttcattgactttgggatggacctggctgcctgcatcgagctcatcgagaagcctatgggcatcttctccatcctggaagaggagtgcatgttccccaaggcgacagacacctccttcaagaacaagctgtatgaacaacatcttggaaaatccaataacttccagaagcccaagcctgccaaaggcaagcctgaggcccacttctctttgattcactatgctggcaccgtggactacaacattgccggctggcttgacaagaacaaggaccccctgaatgagactgtggtggggctgtaccagaagtctgcaatgaagactctggctctcctctttgttggggcaacgggagcggaagcagaggctggcggtggaaagaaaggtggtaagaagaagggttcttctttccagactgtgtcggctctcttcagggagaatttgaataagctgatgaccaacttgaggagcactcacccccactttgtgcggtgcatcatccccaatgaaactaaaactcctggtgccatggagcatgagcttgtcctgcatcagctgaggtgtaacggtgtgctggaaggcatccgcatctgcaggaaaggcttcccaagcagaatcctttatgcagacttcaaacagagatacaaggtgttaaatgcaagtgctatccctgaaggacaattcatcgatagcaagaaggcttcagagaagctcctggggtccattgacattgaccacacccagtataaatttggtcacaccaaggtctttttcaaagctggtcttctggggctcctagaggagatgcgagatgagaagctggcccagctgattacccgaacccaggccatgtgcagagggttcttggcaagagtggagtaccagaaaatggtggaaagaagagagtccatcttctgcatccagtacaatgtccgtgccttcatgaatgtcaagcactggccctggatgaagctgtatttcaagatcaaacccctcctcaaaagtgcagagacagagaaggagatggccaacatgaaggaagaatttgagaaaaccaaagaagagctggctaagaccgaggcaaaaaggaaagagctggaagaaaaaatggtgactctgatgcaagaaaaaaatgacttgcaactccaggttcaagctgaagctgacagcttggctgatgcagaggaaaggtgtgaccagctaatcaaaaccaaaatccagctagaagccaaaatcaaagaggtgactgagagagctgaggatgaggaagagatcaatgctgagctgacagccaagaagaggaaactggaggatgaatgttcagaactcaagaaagacattgatgaccttgagctgacactggccaaggttgagaaggagaaacatgccacagaaaacaaggtgaaaaacctcacagaagagatggcgggtctggatgaaaccattgctaagctgaccaaggagaagaaggctctccaggaggcccaccagcagaccctggatgacctgcaggcagaggaggacaaagtcaacaccctgaccaaagctaaaatcaaacttgaacaacaagtggatgatcttgaaggatctttggaacaagaaaagaaaatccggatggatctagaaagagcaaagagaaaactagagggagacctaaaattggctcaagaatccgcaatggatatagaaaatgacaaacaacaacttgatgaaaagcttaaaaagaaagagtttgaaatgagcggtctgcaaagcaagattgaagatgaacaagcccttggtatgcagctgcagaagaaaatcaaggagttacaagcccgcattgaggagctggaggaggaaatcgaggcagagcgggcctcccgggccaaagcagagaagcagcgctctgatctctcccgggagctggaggagatcagtgagaggctggaagaagccggtggggccacctcggcccagattgagatgaacaagaagcgggaagctgagttccagaaaatgcgcagggacctggaggaggccaccctacagcatgaggccacggcggccaccctgaggaagaagcatgcagatagtgtggccgagcttggggagcagattgacaacctgcagcgagtgaagcagaagctggagaaggagaagagtgagatgaagatggagatcgatgaccttgctagtaacatggagactgtctccaaagccaagggaaaccttgaaaagatgtgccgcgctctagaagatcaactgagtgaaattaagaccaaggaagaggagcagcagcggctgatcaatgacctcacagcacagagagcgcgcctgcaaacagaatcaggtgaatattcacgccagctagatgaaaaggacacactagtttcacagctctcgaggggcaaacaagcctttactcaacagattgaggaactgaaaaggcaacttgaagaggagataaaggccaagagtgccctggcacatgccctgcagtcctcccgccatgactgtgacctgctgcgggaacagtatgaggaggagcaggaagccaaggccgagctacagagagcaatgtccaaggccaacagtgaggttgcccagtggaggaccaaatatgagacagatgccatccagcgcacagaggagctggaggaggccaagaagaagctggctcagcgtctgcaggatgctgaggaacatgtagaagctgtgaatgccaaatgtgcttcccttgagaagacgaagcagaggctccagaatgaagttgaggacctcatgattgatgttgagaggacaaatgctgcctgtgccgccctggacaaaaagcaaaggaactttgataagatcctggcagaatggaaacagaagtgtgaagaaactcatgctgaacttgaagcttctcaaaaggaatcccgctcactcagcacagaactatttaagattaagaatgcttatgaggaatctttagaccaacttgaaaccttgaaacgggaaaataagaatctgcagcaggagatttctgatctcactgaacagattgcagaaggaggaaagcgcatccatgaactggaaaaaataaagaagcaagttgagcaagaaaagtctgaacttcaggctgccttagaggaggcagaggcatctcttgaacatgaagagggaaagatcctgcgcatccagcttgagttgaaccaagtcaagtctgaggttgataggaaaattgctgaaaaagatgaggaaattgaccagatgaagagaaaccacattagaatcgtggagtccatgcagagcacactggatgctgagatcaggagcaggaatgatgccattaggctcaagaagaagatggagggagacctcaatgaaatggaaatccagctgaaccatgccaaccgcatggctgctgaggccctgaggaactataggaacacccaagccatcctcaaggatacccagctccacctagatgatgctctccggagccaagaggacctgaaggaacagctggctatggtggagcgcagagccaacctgctgcaggctgagatcgaggaactacgagccactctggaacagacggagaggagcaggaaaatcgcagaacaggagctcctggatgccagtgaacgtgttcagctcctgcacacccagaacaccagcctgatcaacaccaagaagaagctggagacagacatttcccaaatccagggagagatggaagacatcatccaggaagcccgcaatgcagaagagaaggccaagaaggccatcactgatgctgccatgatggctgaggagctgaagaaggaacaggacaccagcgcccatctggagcggatgaagaagaacttggaacagacggtgaaggacctgcagcatcgtctggatgaggctgagcagctggccctgaagggtgggaagaagcagatccagaaactggaggccagggttcgtgaacttgaaggtgaagttgaaagtgaacagaagcgcaatgttgaagctgtcaagggtctacgcaaacatgagagaaaagtgaaggaactcacttaccaaactgaggaagaccgcaagaatattctcaggctgcaggacctggtggacaagctgcaagcaaaggtgaaatcctacaagagacaagctgaagaagcggaggaacaatccaacgtcaacctctccaaattccggaggatccagcacgagctggaggaggccgaggaaagggctgacattgctgagtcccaggtcaacaagctgagggtgaagagcagggaggttcacacaaaaatcataagtgaagagtaatttatctaactgctgaaaggtgaccaaagaaatgcacaaaatgtgaaaatctttgtcactccattttgtacttatgacttttggagataaaaaatttatctgcca

SEQ ID NO: 11564 - DNA, 2176 bp, Homo sapiens
gatgggaatgtggagcagaccctcgtccactccggaggccgagggtcctccgggcttccgaaggaagccgacctcaacgctggacgcttcttggagaatgattgcgttgagtggagatgtggtctgtctataaaaggccgggagggaacaatatctgttaccactcagtccgtctctaaagagacactctttaccgctgaaaacctcaagagtgagcactcccacgcccccgtctctggtcctacctgggtccaaggccgatgtgaagtggacaagtccagtaaggcaggcatcatgccacagcagctcctgatcaccctgcctaccgaggccagcacctgggtgaagctgcaacatccaaagaaggccgtggagggggcgcccctgtgggaggatgtgactaaaatgtttgaaggagaagctctgctgtctcaggatgctgaggacgtaaagacccagagagaaagtttagaggatgaagtgacccctggactcccgacagcagaatcccaggaattgttgactttcaaggacatatctattgacttcacccaggaagagtgggggcagctggctcctgctcaccagaatctataccgagaggtgatgctggagaactacagcaacttggtgtcagtgggatatcaactttccaaacctagtgtgatatcccagttagagaaaggagaagagccatggatggcagagaaagaaggcccaggagatcccagttcagacttgaagagtaaaatagaaaccattgagtcaactgcaaagagtaccatttcacaggagcgcttatatcatggcattatgatggaaagtttcatgagggatgatataatttattccacgttgagaaaagtctccacatatgatgatgtcttagaaaggcaccaggaaacttgtatgagagatgtgagacaagccatcttgacccataagaagagagtccaagaaactaacaaatttggggaaaatatcattgtgcattcaaatgttattattgaacagaggcaccataaatatgatacacctacaaagcggaacacatacaaattagatttgattaatcatccaacaagttacataagaacaaaaacctatgaatgtaatatatgtgaaaaaatcttcaaacaacctattcaccttactgaacatatgagaattcatactggtgagaaacctttcagatgtaaggaatgtggaagggcctttagtcaaagtgcatccctcagtacacaccagagaatccatactggtgagaaaccctttgaatgtgaggaatgtgggaaagccttcagacatcgctcatcacttaatcagcatcatagaactcacactggggagaaaccctatgtatgtgataaatgtcagaaagctttcagccagaacattagcttggttcaacatttgaggactcattctggagagaaaccttttacttgcaatgaatgtgggaaaacctttagacagattagacaccttagtgaacatataagaattcataccggggagaagccctatgcatgcactgcatgttgtaaaacctttagtcatagagcgtatctaacacatcaccagagaatccatactggggagagaccctacaaatgtaaagaatgtggaaaagcctttaggcagaggatacaccttagcaaccataaaactgttcatacaggagtgaaagcatatgaatgcaaccgctgtggaaaagcctataggcatgattcatcctttaaaaaacatcagagacatcacactggagaaaaaccttacgaatgtaacgaatgtggaaaagccttcagctataactcttcacttagtcgacatcatgaaatacacaggaggaacgccttccgaaataaggtgtaaaaacagatatttgacttgagaacaaaagccaagtgtaaattggtgatttagagtgctttaaaatttcaggactcagatatgaggaattgatgtaatgatgccaacttttaatttttcccattgtaaataaacattacattgacaggtattgactactaacacctctaaaaagtacttaagattaaaatctggtccttaaaattaaatgaattcagcattatgaaaaattcataacagtttttttctgatttcatggtggattaataaattattcttcatgggtaaaaaaaaaaaaaaaaaa

SEQ ID NO: 11565 - DNA, 1976 bp, Homo sapiens
ggccgcgcagtgccggaacccggctgcagcggtgggaaggcgggggcgtgccggcccagcggggagagggggctgctgagagtaaatacttggcgcctccagctgctggccaaggagacagatggagctcaagttgggagatacgccctgagagccgatgatagacacaagtccagatctcggattttgatactgtatgttccctgggttcctgagagaggacattgaggagtaggagtcggcgattaaggagatcggtacaattgggaagcctcctgtcagagcttccagcaatttcctcatcagaggtggacaagccctatgggctaagacagagggtcctcagaaaggagtgcggacgccgtcatgctgcagcagctcctgatcaccctgcccaccgaggccagcacctgggtgaagttgcgtcatccaaaggcggccacggagcgggtggccctgtgggaggatgtgactaagatgtttaaagcagaaggaactgttaaccttcaaggacgtatctgtggacttcactcaggaggagtgggggcagctggcccctgctcaccggaatctgtaccgggaggtgatgctggagaactatgggaacctggtctcagtgggatgtcagctttccaaacctggcgtgatttcccagttggagaaaggagaagaaccatggctgatggagagagatatttcaggagttccaagttcagacttgaagagcaaaacaaaaaccaaagagtcagccttacagaatgatatttcgtgggaagaactacattgtggcctaatgatggaaagatttacaaaaggaagcagcatgtattccaccttgggaagaatctccaaatgtaataagctagaaagccaacaagagaaccaaagaatgggtaaggggcaaatccccctgatgtgcaagaaaacattcactcaggagagaggccaagagtctaatagatttgagaaaagaattaatgtgaagtcagaagttatgccaggaccaataggtcttccaagaaaaagagatcgtaaatatgacacacctggaaagagaagcagatacaacatagatttagttaatcattcaaggagttatacaaaaatgaaaacctttgagtgtaatatttgtgaaaaaatcttcaaacagcttattcaccttactgaacacatgagaattcataccggggagaaacctttcagatgtaaggaatgtggaaaagcctttagccaaagttcatctcttattccgcatcagagaattcatactggtgagaaaccctatgaatgtaaggagtgtgggaaaaccttcagacatccttcatcgcttactcaacatgttagaattcataccggggaaaagccctatgaatgtagggtatgtgagaaagccttcagccagagcattggactgatccagcatttgagaactcatgttagagagaaaccttttacatgcaaagactgtggaaaagcgtttttccagattagacaccttaggcaacatgagattattcatactggtgtgaaaccctatatttgtaatgtatgtagtaaaaccttcagccatagtacatacctaactcaacaccagagaactcatactggagaaagaccatataaatgtaaggaatgtgggaaagcctttagccagagaatacatctttctatccatcagagagtccatactggagtaaaaccttatgaatgcagtcattgtgggaaagcctttaggcatgattcatcctttgctaaacatcagagaattcatactggagaaaaaccttatgattgtaatgagtgtggaaaagccttcagctgtagttcatcccttattagacactgcaaaacacatttaagaaataccttcagcaatgttgtgtgaaatatactaaacatcaaagaatctatgttggagcacaagattctaaatcagtggttccctgatccctcaaaaatccatttgtttttggatt

SEQ ID NO: 11566 - DNA, 3215 bp, Homo sapiens
cttgaagaagtgggtattccccttcccaccccaggcactggaggagcggccccccggggattccaggacctgagctccgggagctggactcgcagcgaccgcggcagagcgagctggcgccgggaagcgaggagacgcccgcgggaggcccagctgctcggagcaactggcatggcccgagccatggccgccgcgtggccgctgctgctggtggcgctactggtgctgtcctggccacccccaggaaccggggacgtcgtcgtgcaggcgcccacccaggtgcccggcttcttgggcgactccgtgacgctgccctgctacctacaggtgcccaacatggaggtgacgcatgtgtcacagctgacttgggcgcggcatggtgaatctggcagcatggccgtcttccaccaaacgcagggccccagctattcggagtccaaacggctggaattcgtggcagccagactgggcgcggagctgcggaatgcctcgctgaggatgttcgggttgcgcgtagaggatgaaggcaactacacctgcctgttcgtcacgttcccgcagggcagcaggagcgtggatatctggctccgagtgcttgccaagccccagaacacagctgaggttcagaaggtccagctcactggagagccagtgcccatggcccgctgcgtctccacagggggtcgcccgccagcccaaatcacctggcactcagacctgggcgggatgcccaatacgagccaggtgccagggttcctgtctggcacagtcactgtcaccagcctctggatattggtgccctcaagccaggtggacggcaagaatgtgacctgcaaggtggagcacgagagctttgagaagcctcagctgctgactgtgaacctcaccgtgtactaccccccagaggtatccatctctggctatgataacaactggtaccttggccagaatgaggccaccctgacctgcgatgctcgcagcaacccagagcccacaggctataattggagcacgaccatgggtcccctgccaccctttgctgtggcccagggcgcccagctcctgatccgtcctgtggacaaaccaatcaacacaactttaatctgcaacgtcaccaatgccctaggagctcgccaggcagaactgaccgtccaggtcaaagagggacctcccagtgagcactcaggcatgtcccgtaacgccatcatcttcctggttctgggaatcctggtttttctgatcctgctggggatcgggatttatttctattggtccaaatgttcccgtgaggtcctttggcactgtcatctgtgtccctcgagtacagagcatgccagcgcctcagctaatgggcatgtctcctattcagctgtgagcagagagaacagctcttcccaggatccacagacagagggcacaaggtgacagcgtcgggactgagaggggagagagactggagctggcaaggacgtgggcctccagagttggacccgaccccaatggatgaagaccccctccaaagagaccagcctccctccctgtgccagacctcaaaacgacgggggcaggtgcaagttcataggtctccaagaccaccctcctttcatttgctagaaggactcactagactcaggaaagctgttaggctcacagttacagtttattacagtaaaaggacagagattaagatcagcaaagggaggaggtgcacagcacacgttccacgacagatgaggcgacggcttccatctgccctctcccagtggagccatataggcagcacctgattctcacagcaacatgtgacaacatgcaagaagtactgccaatactgccaaccagagcagctcactcgagatctttgtgtccagagttttttgtttgtcttgagacagggtctggctctgttggcagactagagtacagtggtgagatcacagttcattgcagccttgacttctcaacgccaagtcatcctcccacctcagcctcctgagtagctatgactacaggtatgtgccaccacgtctggctaatctttttattatttgtaaagtcgaggtttccctgtgttgcccaggctggtcttgaactcttggctccaagtgatacttctgccttggcctcccaaagtgctgaattaagcagctcaccatccacacggctgacctcatacatcaagccaataccgtgtggcccaagacccccaccataaatcacatcattagcatgaaccacccagagtggcccaagactcccagatcagctaccaggcaggatattccaagggcttagagatgaatgcccaggagctgaggataaagggcccgatctttctttgggcaaggttaagcctttactgcatagcagaccacacagaagggtgtgggccaccagagaattttggtaaaaatttggcctctggccttgagcttctaaatctctgtatccgtcagatctctgtggttacaagaaacagccactgaccctggtcaccagaggctgcaattcaggccgcaagcagctgcctagggggtgtccaaggagcagagaaaactactagatgtgaacttgaagaaggttgtcagctgcagccactttctgccagcatctgcagccactttctgccagcatctgcagccagcaagctgggactggcaggaaataacccacaaaagaagcaaatgcaatttccaacacaagggggaagggatgcagggggaggcagcgctgcagttgctcaggacacgctcctataggaccaagatggatgcgacccaagacccaggaggcccagctgctcagtgcaactgacaagttaaaaaggtctatgatcttgagggcagacagcagaattcctcttataaagaaaactgtttgggaaaatacgttgagggagagaagaccttgggccaagatgctaaatgggaatgcaaagcttgagctgctctgcaagagaaaataagcaggacagaggatttgctctggacagagatggaagagccgggaacagagaagtgtggggaagagataggaaccagcaggatggcaggggcaaagggctcaagggtgaggaggccagtgggaccccacagagttggggagataaaggaacattggttgctttggtggcacgtaagctccttgtctgtctccagcacccagaatctcattaaagcttatttattgtacctccaaaaaaaaaaaaaaaaaaa

SEQ ID NO: 11567 - DNA, 15351 bp, Homo sapiens
ccggctgagccagcggctcttgggaggctgcgtccgcgcgccggcgaggcgaggcggccgggccctgcgcgtcaggcctgagacctgggaggaagctggagaaaagatgccctctgaatctttctgtttggctgcccaggctcgcctcgactccaaatggttgaaaacagatatacagcttgcattcacaagagatgggctctgtggtctgtggaatgaaatggttaaagatggagaaattgtatacactggaacagaatcaacccagaacggagagctccctcctagaaaagatgatagtgtcgaaccaagtggaacaaagaaagaagatctgaatgacaaagagaaaaaagatgaagaagaaactcctgcacctatatatagggccaagtcaattctggacagctgggtatggggcaagcaaccagatgtgaatgaactgaaggagtgtctttctgtgctggttaaagagcagcaggccctggccgtccagtcagccaccaccaccctctcagccctgcgactcaagcagaggctggtgatcttggagcgctatttcattgccttgaatagaaccgtttttcaggagaatgtcaaagttaagtggaaaagcagcggtatttctctgcctcctgtggacaaaaaaagttcccggcctgcgggcaaaggtgtggaggggctcgccagagtgggatcccgagcggcgctgtcttttgcctttgccttcctgcgcagggcctggcgatcaggcgaggatgcggacctctgcagtgagctgttgcaggagtccctggacgccctgcgagcacttcccgaggcctcgctctttgacgagagcaccgtgtcctctgtgtggctggaggtggtggagagagcgaccaggttcctcaggtccgtcgtgacgggggatgttcacggaacgccagccaccaaagggccaggaagcatccccctgcaggaccagcacttggccctggccatcctgctggagctggctgtgcagagaggcacgctgagccaaatgttgtctgccatcctgttgttgcttcagctgtgggacagcggggcacaggagactgacaatgagcgttccgcccagggcaccagcgccccacttttgcccttgctgcaaaggttccagagcatcatttgcaggaaggatgcaccccactccgagggcgacatgcaccttttgtctggccctctgagccccaatgagagtttcctgaggtacctcacccttccacaagacaacgagcttgccattgatctgcgacaaacggcggttgttgtcatggcccatttagaccgtctggctacgccctgtatgcctccgctgtgtagctctccgacatctcataagggatcattgcaagaggtcataggttgggggttaataggatggaaatactatgccaatgtgattggtccaatccagtgcgaaggcctggccaacctgggagtcacacagattgcctgtgcagagaagcgtttcctgattctgtcacgcaatggccgcgtgtacacacaggcctataatagtgacacgctggccccacagctggtccaaggccttgcctccagaaacattgtaaaaattgctgcccattctgatggtcaccactacctagccttggctgctactggagaggtgtactcctggggctgtggggacggcggacggctgggccatggggacactgtgcctttggaggagcctaaggtgatctccgccttctctggaaagcaggccgggaagcacgtggtgcacatcgcttgcgggagcacttacagtgcggccatcactgccgagggggagctgtacacctggggccgcgggaactacggccggctgggccatggctccagtgaggacgaggccattccgatgctggtagccgggcttaaaggactgaaggtcatcgatgtggcgtgtgggagtggggatgctcaaaccctggctgtcactgagaacgggcaagtgtggtcttggggagatggtgactatgggaaattgggcagaggtggtagtgatggctgcaaaaccccaaagctgattgaaaagcttcaagacttggatgtggtcaaagtccgctgtggaagtcagttttccattgctttgacgaaagatggccaagtttattcatggggaaaaggtgacaaccagagacttggacatggaacagaggaacatgttcgttatccaaaactcttagaaggcttgcaagggaagaaggtgattgatgtggctgcaggctccacccactgcctggctctgactgaggacagcgaggtccacagctgggggagcaacgaccagtgccagcactttgacaccttgcgcgtgaccaagccagaacctgcagcattgccaggactggacaccaaacacatagtgggaattgcctgtgggcctgcccagagctttgcttggtcatcatgttctgagtggtccattggcctccgtgtcccttttgtggtggacatctgctcaatgacttttgagcagctggatctcctgcttcggcaggtgagtgaggggatggatggctccgcggactggcccccgccccaggagaaagagtgtgtggccgtggcaacgctgaatcttctacgacttcagttgcatgctgccattagtcaccaggttgacccggaattccttggtttaggtctgggcagcatcctcctgaacagcctgaagcagacggtggtgaccctggccagcagtgcgggcgtgctgagcaccgtgcagtcggccgcccaggccgtgctgcagagtggctggtccgtgctgctgcccaccgcggaggagcgggcccgggcactctctgctctcctgccctgcgcagtttcaggcaatgaagtgaacataagtccaggtcgtcgattcatgattgatcttctggtgggcagcttgatggctgatggagggttggagtcagccttacacgcagccattactgcagagatccaggatattgaagccaaaaaagaagcacagaaggaaaaagaaattgatgaacaggaagcgaatgcctcaacatttcatagaagcaggactccactggataaagaccttattaatacggggatctgtgagtcttctggcaaacagtgtttgcctctggttcagctcatacaacagcttcttagaaacattgcttctcagactgtagccagattgaaagatgttgcccgtcggatttcatcatgtctggactttgagcaacacagtcgtgaaagatctgcttcattggatttgttactgcgttttcaacgtttgcttattagtaaactttatccaggagaaagtattggtcagacctcagatatttctagtccagagctaatgggtgttggttccttgctgaagaagtacacagccctcctgtgcacgcacattggagatatactgcctgtggccgccagcattgcttctaccagctggcggcacttcgcggaggtggcttacattgtggaaggggactttactggtgttctccttccagaactagtagtttctatagtgcttctgctcagtaaaaatgctgatctcatgcaagaggctggagctgtacctctgctgggtggcctgttggaacatctggatcggttcaaccatctggcaccaggaaaggaacgggatgatcatgaagagttagcctggcctggcataatggagtcattttttacaggtcagaactgtagaaataatgaggaagtgacacttatacgcaaagctgatttggagaaccataataaagatggaggcttctggactgtgattgacgggaaggtgtatgatataaaggacttccagacacagtcgttaacaggaaatagtattcttgctcagtttgcaggggaagacccagtggtagctttggaagctgctttgcagtttgaagacacccgggaatccatgcacgcgttttgtgttggccagtatttggagcctgaccaagaaatcgtcaccataccagatctggggagtctctcttcacctctgatagacacagagaggaatctgggcctgcttctcggattacacgcttcgtatttggcaatgagcacaccgctgtctcctgtcgagattgaatgtgccaaatggcttcagtcatccatcttctctggaggcctgcagaccagccagatccactacaggtacaacgaggagaaagacgaggaccactgcagctccccagggggcacacctgccagcaaatctcgactctgctcccacagacgggccctgggggaccattcccaggcatttctgcaagccattgcagacaacaacattcaggatcacaacgtgaaggactttttgtgtcaaatagaaaggtactgtaggcagtgccatttgaccacaccgatcatgtttccccccgagcatcccgtggaagaggtcggtcgcttgttgttatgttgcctcttaaaacatgaagatttaggtcatgtggcattatctttagttcatgcaggtgcacttggtattgagcaagtaaagcacagaacgttgcctaagtcagtggtggatgtttgtagagttgtctaccaagcaaaatgttcgctcattaagactcatcaagaacagggccgttcttacaaggaggtctgcgctcctgtcatcgaacgtttgagattcctctttaatgaattgagacctgctgtttgtaatgacctctctataatgtctaagtttaaattgttaagttctttgccccgttggaggaggatagctcaaaagataattcgagaacgaaggaaaaagagagttcctaagaagccagaatctatggatgatgaagaaaaaattggaaacgaagagagtgatttagaagaagcttgcattttgcctcatagtccaataaatgtggacaagagacccattgcaattaaatcacccaaggacaaatggcagccgctgttgagtactgttacaggtgttcacaaatacaagtggttgaagcagaatgtgcagggtctttatccgcagtctccactcctcagtacaattgctgaatttgcccttaaagaagagccagtggatgtggaaaaaatgagaaagtgcctactaaaacagttggagagagcagaggttcgcctggaagggatagatacaattttaaaactggcgagcaagaatttcttacttccatctgtgcagtatgcgatgttttgtggatggcaaagacttattcctgagggaatcgatataggggaacctcttactgattgtttaaaggatgttgatttgatcccgccttttaatcggatgctgctggaagtcacctttggcaagctgtacgcttgggctgtacagaacattcgaaatgttttgatggatgccagtgccaaatttaaagagcttggtatccagccggttcccctgcaaaccatcaccaatgagaacccgtcaggaccgagcctggggaccatcccgcaagcccgcttcctcctggtgatgctcagcatgctcaccctgcagcacggcgcaaacaacctcgaccttctgctcaattccggcatgctggccctcacgcagacggcactgcgcctgattggccccagttgtgacaacgttgaggaagatatgaatgcttctgctcaaggtgcttctgccacagttttggaagaaacaaggaaggaaacggctcctgtgcagctccctgtttcaggaccagaactggctgccatgatgaagattggaacaagggtcatgagaggtgtggactggaaatggggcgatcaggatgggcctcctccaggcctaggccgcgtgattggtgagctgggagaggacggatggataagagtccagtgggacacaggcagcaccaactcctacaggatggggaaagaaggaaaatacgacctcaagctggcagagctgccggctgctgcacagccctcagcagaggattcggacacagaggatgactctgaagccgaacaaactgaaaggaacattcaccccactgcaatgatgtttaccagcactattaacttactgcagactctttgtctgtctgctggagttcatgctgagatcatgcagagcgaagccaccaagactttatgcggactgctgcgaatgttagtggaaagcggaacgacggacaagacatcttctccaaacaggctggtgtacagggagcaacaccggagctggtgcacgctggggtttgtgcggagcatcgctctcacgccgcaggtatgcggcgccctcagctccccgcagtggatcacgctgctcatgaaggtcgtggaagggcacgcacccttcactgccacctcgctgcagaggcagatcttagctgtgcatttgttgcaagcagtccttccatcatgggacaagaccgaaagggcgagggacatgaaatgcctcgtggagaagctgtttgacttcttgggaagcttgctcactacctgctcctctgacgtgccattactcagagagtccacgctgaggcggcgcagggtgcgcccgcaggcctcgctgactgccacccacagcagcacactggcggaggaggtggtggcactgctgcgcacgctgcactccctgactcagtggaatgggctcatcaacaagtacatcaactcccagctccgctccatcacccacagctttgtgggaaggccttccgaaggggcccagttagaggactacttccccgactccgagaaccctgaagtggggggcctcatggcagtcctggctgtgattggaggcatcgatggtcgcctgcgcctgggcggtcaagttatgcacgatgagtttggagaaggcactgtgactcgcatcaccccaaagggcaaaatcaccgtgcagttctctgacatgcggacgtgtcgcgtttgcccattgaatcagctgaaaccactccctgccgtggcctttaatgtgaacaacctgcccttcacagagcccatgctgtctgtctgggctcagttggtgaacctcgctggaagcaagttagaaaagcacaaaataaagaaatcgactaaacaggcctttgcaggacaagtggacctggacctgctgcggtgccagcagttgaagctatacatcctgaaagcaggtcgggcgctgctctcccaccaggataaactgcggcagatcctgtctcagccagctgttcaggagactggaactgttcacacagatgatggagcagtggtatcacctgaccttggggacatgtctcctgaagggccgcagccccccatgatcctcttgcagcagctgctggcctcggccacccagccgtctcctgtgaaggccatatttgataaacaggaacttgaggctgctgcactggccgtttgccagtgcttggctgtggagtccactcacccttcgagcccaggatttgaagactgcagctccagtgaggccaccacgcctgtcgccgtgcagcacatccgccctgccagagtgaagaggcgcaagcagtcgcccgttcccgctctgccgatcgtggtgcagctcatggagatgggattttccagaaggaacatcgagtttgccctgaagtctctcactggtgcttccgggaatgcatccagcttgcctggtgtggaagccttggtcgggtggctgctggaccactccgacatacaggtcacggagctctcagatgcagacacggtgtccgacgagtattctgacgaggaggtggtggaggacgtggatgatgccgcctactccatgtctactggtgctgttgtgacggagagccagacgtacaaaaaacgagctgatttcttgagtaatgatgattatgctgtatatgtgagagagaatattcaggtgggaatgatggttagatgctgccgagcgtatgaagaagtgtgcgaaggtgatgttggcaaagtcatcaagctggacagagatggattgcatgatctcaatgtgcagtgtgactggcagcagaaagggggcacctactgggttaggtacattcatgtggaacttataggctatcctccaccaagttcttcttctcacatcaagattggtgataaagtgcgggtcaaagcctctgtcaccacaccaaaatacaaatggggatctgtgactcatcagagtgtgggggttgtgaaagctttcagtgccaatggaaaagatatcattgtcgactttccccagcagtctcactggactgggttgctatcagaaatggagttggtacccagtattcatcctggggttacgtgtgatggatgtcagatgtttcctatcaatggatccagattcaaatgcagaaactgtgatgactttgatttttgtgaaacgtgtttcaagaccaaaaaacacaataccaggcatacatttggcagaataaatgaaccaggtcagtctgcggtattttgtggccgttctggaaaacagctgaagcgttgccacagcagccagccaggcatgctgctggacagctggtcccgcatggtgaagagcctgaatgtgtcgtcctccgtgaaccaggcatcccgtctcattgacggcagcgagccctgctggcagtcatcggggtcgcaaggaaagcactggattcgtttggagattttcccagatgttcttgttcatagattaaaaatgatcgtagatcctgctgacagtagctacatgccgtccctggttgtagtgtcaggtggaaattccctgaataaccttattgaactaaagacaatcaatattaacccttctgacaccacagtgccccttctgaatgactgcacagagtatcacaggtatattgaaattgctataaagcagtgcaggagctcaggaatcgattgtaaaatccatggtctcatcctgctgggacggatccgtgcagaagaggaagatttggctgcagttcctttcttagcttcggataatgaagaggaggaggatgagaaaggcaacagcggaagcctcattagaaagaaggctgctgggctggaatcagcagctacgataagaaccaaggtgtttgtgtggggcctgaatgacaaggaccagctgggcgggctgaaaggctccaagataaaggttccttcgttctctgagacactgtcagctttgaatgtggtacaggtggctggtggatctaaaagtttgtttgcagtgactgtggaagggaaggtgtatgcctgtggagaagccacgaatggccggctggggctgggcatttccagcgggacggtgcccatcccacggcagatcacagctctcagcagctacgtggtcaagaaggtggctgttcactcaggtggccggcacgcgacggctttaactgtcgatggaaaagtgttttcgtggggcgaaggtgacgatggaaaacttggacacttcagcagaatgaactgtgacaaaccaaggctgatcgaggccctgaaaaccaagcgtatccgggatatcgcctgtgggagctcgcacagcgcagccctcacatccagcggagaactgtacacctggggcctcggcgagtacggccggctgggacatggggataatacgacacagctaaagcccaaaatggtgaaagtccttctcggtcacagagtaatccaggttgcatgtgggagtagagacgcgcagaccctggctctgaccgatgaaggtttggtattttcctggggtgatggtgactttggaaaactgggccggggcggaagtgaaggctgtaacattccccagaacattgagagactaaatggacagggggtgtgccagattgagtgtggagctcagttctccctggcgctcaccaagtctggagtggtgtggacatggggaaagggggattacttcagattgggccacggctctgacgtgcacgtgcggaaaccacaggtggtggaagggctgagagggaagaagatcgtgcatgtggctgtcggggccctgcactgcctggcggtcacggactcggggcaggtgtatgcttggggtgacaacgaccacggccagcagggcaatggcacgaccacggttaacaggaagcccacactcgtgcaaggcttagaaggccagaagatcacacgcgtggcttgtgggtcgtcccacagtgtggcgtggacaactgtggatgtggccacgccctctgtccacgagcccgtcctcttccagactgcaagagaccctttaggtgcttcctatttaggcgtgccttcagatgctgattcttctgctgccagtaataaaataagtggtgcaagtaattctaagccaaatcgcccttctcttgccaagattctcttgtcattggatggaaatctggccaaacagcaggccttatcacatattcttacagcattgcaaatcatgtatgccagagatgctgttgtcggggccctgatgccggccgccatgatcgccccggtggagtgcccctcgttctcctcggcggccccttccgacgcatctgcgatggctagtcccatgaatggagaagaatgcatgctggctgttgatatcgaagacagactgagtccaaatccatggcaagaaaagagagagattgtttcctctgaggacgcagtgaccccctctgcagtgactccgtcggccccctcagcctccgctcggccttttatcccagtgacggatgacctgggagccgcaagcatcattgcagaaaccatgaccaaaaccaaagaggatgttgaaagccaaaataaagcagcaggtccggagcctcaggccttggatgagttcaccagtctgctgattgcggatgacactcgtgtggtggtagacctgctcaagctgtcagtgtgcagccgggccggggacaggggcagggatgtgctctccgcggtgctttccggcatggggaccgcctacccacaggtggcagatatgctgttggagctctgtgtcaccgagttggaggatgtggccacagactcgcagagcggccgcctctcttctcagcctgtggtggtggagagtagccacccttacaccgacgacacctccaccagtggcacagtgaagataccaggtgcagaaggactcagggtagaatttgaccggcagtgctccacagagaggcgccacgaccctctcacagtcatggacggcgtcaacaggatcgtctccgtgcggtcaggccgagagtggtccgactggtccagcgagctgcgcatcccaggggatgagttaaagtggaagttcatcagcgatgggtctgtgaatggctggggctggcgcttcaccgtctatcccatcatgccagctgctggccctaaagaactcctctctgaccgctgcgtcctctcctgtccatccatggacttggtgacgtgtctgttagacttccgactcaaccttgcctctaacagaagcatcgtccctcgccttgcggcctcgctggcagcttgtgcacagctgagtgccctagctgccagtcacagaatgtgggcccttcagagactgaggaagctgcttacaactgaatttgggcagtcaattaacataaataggctgcttggagaaaatgatggggaaacaagagctttgagttttacaggtagtgctcttgctgctttggtgaaaggtcttccagaagctttgcaaaggcagtttgaatatgaagatcctattgtgaggggtggcaaacagctgctccacagcccattctttaaggtactggtagctcttgcttgtgacctggagctggacactctgccttgctgtgccgagacgcacaagtgggcctggttccggaggtactgcatggcctcccgtgttgctgtggcccttgacaaaagaacaccgttgccccgtctgtttcttgatgaggtggctaagaaaattcgtgaattaatggcagacagcgaaaacatggatgttctgcatgagagccatgacatttttaaaagagagcaagacgaacaacttgtgcagtggatgaacaggcgaccagatgactggactctctctgctggtggcagtggaacaatttatggatggggacataatcacaggggccagctcgggggcattgaaggcgcaaaagtcaaagttcccactccctgtgaagcccttgcaactctcagacccgtgcagttaatcggaggggaacagaccctctttgctgtgacggctgatgggaagctgtatgccactgggtatggtgcaggtggcagactaggcattggagggacagagtcggtgtccaccccaacattgcttgaatccattcagcatgtgtttattaagaaagtagctgtgaactctggaggaaagcactgccttgccctgtcttcagaaggagaagtttactcttggggtgaggcagaagatgggaagttggggcatggcaacagaagtccgtgtgaccgccctcgtgtcatcgagtctctgagaggaattgaagtggtcgatgttgctgctggcggagcccacagcgcctgtgtcacagcagccggggacctctacacatggggcaaaggccgctacggccggctggggcacagcgacagtgaggaccagctgaagccgaagctggtggaggcgctgcagggccaccgtgtggttgacatcgcctgtggcagtggagatgcccagaccctctgcctcacagatgacgacactgtctggtcctggggggacggggactacggcaagctcggccggggaggcagcgatggctgtaaagtgcctatgaagattgattctcttactggtcttggagtagttaaagtggaatgcggatcccagttttctgttgcccttaccaaatctggagctgtttatacctggggcaaaggcgattatcacaggttgggccatggatcagatgaccatgttcgaaggcctcggcaggtccaagggttgcaggggaagaaagtcatcgccatcgccactggctccctgcactgtgtgtgctgcacagaggatggtgaggtttatacatggggcgacaatgatgagggacaactgggagacggaaccaccaatgccatccagaggcctcggttggtagctgcccttcagggtaagaaggtcaaccgtgtggcctgtggctcagcacataccctcgcctggtcgaccagcaagcccgccagtgctggcaaactccctgcacaggtccccatggagtacaatcacctgcaggagatccccatcattgcgctgaggaaccgtctgctgctgctgcaccacctctccgagctcttctgcccctgcatccccatgttcgacctggaaggctcgctcgacgaaactggactcgggccttctgttgggttcgacactctccgaggaattctgatatcccagggaaaggaggcggctttccggaaagtagtacaagcaactatggtacgcgatcgtcagcatggccccgtcgtggagctgaaccgcatccaggtcaaacgatcaaggagcaaaggcgggctggccggccccgacggcaccaagtctgtctttgggcagatgtgtgctaagatgagctcgtttggtcccgacagcctcctccttcctcaccgtgtctggaaagtcaagtttgtgggtgaatctgtggatgactgtgggggcggctacagcgagtccatagctgagatctgtgaggagctgcagaacggactcacgcccctgctgatcgtgacacccaacgggagggatgagtctggggccaaccgagactgctacctgctcagcccggccgccagagcacccgtgcacagcagcatgttccgcttcctgggtgtgttgctgggcattgccatccgaaccgggagtcccctgagcctcaaccttgccgagcctgtctggaagcagctggctgggatgagcctcaccatcgcggacctcagtgaggttgataaggattttattcctggactcatgtacatccgagacaatgaagccacctcagaggagtttgaagccatgagcctgcccttcacagtgccaagtgccagtggccaggacattcagttgagctccaagcacacacacatcaccctggacaaccgcgcggagtacgtgcggctggcgataaactatagactccatgaatttgatgagcaggtggctgctgttcgggaaggaatggcccgcgttgtgcctgttcccctcctctctctgttcaccggctacgaactggagacgatggtgtgtggcagccctgacatcccgctgcaccttctcaagtcggtggccacctataaaggcatcgagccttccgcatcgctgatccagtggttctgggaggtgatggagtccttctccaacacagagcgctctcttttccttcgcttcgtctggggccggacgaggctgcccaggaccatcgccgacttccggggccgagacttcgtcatccaggtgttggataaatacaaccctccagaccacttcctccctgagtcctacacctgtttcttcttgctgaagctgcccaggtattcctgcaagcaggtgctggaggagaagctcaagtacgccatccacttctgcaagtccatagacacagatgactacgctcgcatcgcacttacaggagagccagccgccgacgacagcagcgacgattcagataacgaggatgtcgactcctttgcttcggactctacacaagattatttaacaggacactaagatggggaaacgtcctcgtgagatgagagcctgagccaggcagcagagcgctcgctgctgtgtagactgtaggctgcctggtgtgtctgatgagaagcgtccgtcctcgagccaggcgggaggagggagtggagagactgactggccgtgatgggaatgacagtgagaaggtccgcctgtgcgcgtggaacactgtggacgctcgacttccaagggtcttctcacccgtaatgctgcattacatgtaggactgtgtttactaaagtgtgtaaatgtttatataaataccaaattgcagcatccccaaaatgaataaagcctttttacttgtgggtgcaatcgattttttttctttctcctttctttcaagtgtcgtgagtcgtcttgattgtatattggaaataactgtgtaacaaatcgtattataaatatttcaattaattttactctgaatttgtttattaaaagacttttgaacatgaaatgattagtattacttgaatgcatccagaggatatttaaaccaaaatgaaaaaccagaaggccatttggtgtcccccctcccaggtgtccccttgtagcatatgcattatgtcatctgaattgaggcctttctgtgaacagcatcataacttctatcatggaaagtgtactatatataatgtttgtgtcatgtatatgcctaaattttaattatctataaataaaacatctgacataaaaaaaaaaaaaaaaaaaaa

SEQ ID NO: 11568 - DNA, 8415 bp, Homo sapiens
tcgttctcatttgggtgtctgcactgttggaagctactgcactgtgtttccacgcagacagagtacagtgggaaaggctttctccagctgatggatggctgttctctttatttggagtatcttactggttatgtaagcgacctcgagagaaattatcctgacccagatcggaggatgcagtagtgcttcagctgcaggatttcttagtcgttaacaccacagtgctgatgacaaagagcgagttgtaatcctcatcactgccagggctgagccagagcagacagaaaatcgtcatttgctcgttggagacttgttaggttacagctcctgcttcgttctgtggtcttggcttttcttcctatacaatgacgccgctgcaagtgagctcagaaatgcttggtttgagagccatttgcctgtgatttttgaagactaaagaagtatttacactagatactcttccagaacaaaatagaaatttcagcaaatacttactgacctttaaagccttgttgtggatttctgagatttaaagatactttaaaattctcaagaacaaagtccttattccttaaatggatacagagtgagagtatatagacaagactctgccacccagtggtttactggcataattactcatcatgatctcttcacccgcaccatgatcgttatgaatgatcaggtactagaaccacagaatgtcgatccttctatggttcaaatgacctttctagatgatgttgttcactctttgttaaaaggtgaaaatattggcattacatcacgacgcaggtctcgtgccaatcaaaacgtcaacgctgttcacagccattatacacgtgcccaagcaaatagtcccagaccagcaatgaactcccaagctgctgtaccaaaacagaatacacaccagcaacagcaacaaagaagtatccgtccaaataagaggaagggctcagatagcagtataccagatgaagagaagatgaaggaggaaaaatatgattatatatcacgaggagaaaatcctaaaggtaaaaacaaacacttgatgaataaaagaaggaaacctgaggaggatgaaaagaaactaaatatgaaaagacttcgaactgacaatgtttcagacttttctgagagcagtgactcagaaaattcaaataagagaataatagataattcctcagaacagaagccagagaatgaattgaaaaataaaaatacttcaaaaataaatggagaagaaggaaaaccccataataatgagaaggcaggagaagagaccctaaaaaatagccagcctccctgggatcaaatacaggaagataaaaaacatgaagaagcagagaagcggaagtctgttgacactcagcttcaagaagatatgattattcattcgtcagaacagtccacagtttctgatcataattctaatgatttacttcctcaggaatgcaatatggataaaacacataccatggaattgctaccaaaggagaagtttgtatccagaccacccacaccaaaatgtgttattgatattacaaatgacactaatttagaaaaggtggctcaggaaaactcaagtacctttggccttcagacacttcagaaaatggatcctaatgttagtgattcaaaacactctattgcaaatgcaaaattcttggaaacagcaaaaaaagattctgaccagagctgggtcagtgatgtagttaaagtggatctaacccaatcaagtgttacaaatgcttcttcaggaaatgatcacttgaacatggaaaaagagaagtatgtctcttacatttctcctttaagtgcagtttctgtcatggaagataagctgcataagcgaagtccacctccagagactataaaatctaaacttaatacttcagtagatactcacaagataaaatccagcccatcacctgaagttgttaaacccaaaataactcattctcctgattctgtaaagtctaaggccacttatgtgaacagccaagctactggtgaaagaagattggcaaataagatagaacatgagctatcaagatgcagttttcatccaattcctactcgaagcagtacattagaaactacaaagagtcctcttatcattgataaaaatgagcattttacagtttacagagatcctgcacttattgggtcagaaacaggagctaatcatatttcacctttcctaagccagcatccttttcctcttcactcctcatctcatagaacctgtttaaatccaggtacccatcatcctgccttaactcctgcaccccatttactagccggatcatctagtcaaactccattacctaccattaacactcatcctctgactagtggtccacaccatgctgttcatcaccctcatttacttcccactgtgttacctggagtgcctactgcctccttacttggtggccacccacgactagagagtgctcatgccagcagcttgagccacttagcgctagcacaccagcaacaacaacagttgttacagcaccagtcacctcatcttcttggacaagcccatccttctgcttcatataatcagcttggactttatccaattatttggcagtatccaaatggaacacatgcatactcaggacttggtttgccttcttctaagtgggttcacccagaaaatgcagttaatgctgaagcttcattaaggaggaattctcccagtccttggctacatcagcccacccctgtgacctcagcagatggtattggattacttagtcacattcctgtcagaccttccagtgcagagcctcatcggcctcttaaaattacagcccattccagtccaccattgacaaaaactttagtagatcatcataaggaagaattagaaagaaaagcttttatggaaccattacggtctgttgcatccacatcagccaaaaatgacctggatctaaataggtcacagactggaaaagattgtcacttacataggcattttgtggatccagtattaaatcagttacagaggccaccccaggagactggagagaggttaaacaaatacaaagaggaacaccgtcgaattcttcaagaaagtattgatgttgctccctttacaactaaaatcaagggacttgagggtgagagagagaattattccagagtggcatcatcatcttccagtcctaaaagccatatcatcaaacaagatatggatgtagaacgctcagtatcagatctttataaaatgaagcactcagtgcctcagagtttaccccaaagtaactatttcactacattgtctaatagtgtggtcaatgaaccaccaagatcatacccatccaaagaagtttcaaatatttacggtgataaacagagtaatgcccttgcagcggcagcagctaatcctcaaactctgacttcatttataacatctctttcaaagcctccacctttgattaaacaccaaccagaaagtgaaggtttagtaggcaagataccagaacatcttccacatcagattgcatctcactcagtaacaaccttcagaaatgattgtaggagtcctacccatttgacagtttcttctacaaatacactccgcagtatgcctgcattacatagagcaccagtatttcacccaccaatccatcacagcctggaaagaaaggaaggcagctatagtagtctttcccctccaactttaactccggtgatgccagtaaatgctggtggtaaagttcaagaatcacagaagcctccaactctaatacccgaaccaaaagactcccaggcaaattttaagagttcttcagaacagagtttgacggagatgtggagacctaataataacctcagcaaagagaaaactgaatggcatgtggagaaaagcagcggaaagttacaggctgctatggcatctgtcattgtgcgtccatcttctagtacaaaaactgatagtatgccagcaatgcagttagcttctaaagatcgagttagtgaaagatcttcagctggggcacataaaacagattgcctcaaactagcagaagccggagaaactggaagaatcattttgccaaatgtgaattcagacagtgttcacacaaaatctgaaaaaaactttcaggctgtctcacagggcagtgttcccagttcagtcatgtctgctgtaaatacgatgtgtaataccaaaacggatgtaatcacatctgctgccgatactaccagtgtttccagctggggtggttcagaagtaatttcctctttatcaaataccattttggcctctacatcatcagaatgtgtatcttcaaaaagtgtcagtcagccagtggctcaaaaacaagaatgcaaggtcagcaccacagcaccagttacattagccagtagtaagacaggaagtgttgttcaacccagttctgggttctcaggcacaactgattttatccatttaaaaaagcacaaggcagcattggctgcagctcagtataaaagtagtaatgccagtgagactgaacctaatgctataaaaaatcagacactttcagcctcccttcctctggatagcactgtaatctgtagtacaattaacaaagcaaactctgtaggaaatgggcaagcttcccagacaagtcaaccaaactaccatactaaactgaaaaaggcctggctcaccagacactcagaagaagataaaaatactaataaaatggaaaattcagggaattctgtatcagaaattattaagccatgttctgtcaacttaatagcctctacatctagtgatatacaaaatagtgtagatagtaagatcatagttgataaatatgtaaaagatgataaagtcaacaggagaaaagccaaaagaacttatgaatctggctctgaaagtggagactcagatgaaagtgaaagcaagtcagagcaaaggactaaaagacaacctaagccaacttacaaaaagaagcaaaatgatttgcaaaagagaaaaggtgaaatagaagaagatttgaaacccaatggagttctcagcaggagtgccaaagaaagaagtaaactgaagttgcaaagcaacagtaatactggcattcctcgttcagtattgaaagattggcgtaaagtcaagaagctgaagcaaactggggaatcctttttacaggatgactcctgctgtgagatagggcctaatttacaaaagtgtcgagaatgtagacttattcgcagtaaaaaaggagaagaaccagctcactcaccagtattttgtagattttactactttagacggttgtcatttagtaaaaacggagtagttagaatagatggtttctcttctcctgaccaatatgatgatgaagctatgagtttgtggacacatgaaaattttgaagatgatgaactagatatagagacttctaaatatatcttggatataataggtgataagttctgtcaattagtaacatctgaaaaaacagctttgtcctgggtgaaaaaggatgccaaaattgcctggaaaagagcagtgagaggagtccgggagatgtgtgatgcatgtgaagcaacattgtttaacattcactgggtctgccaaaaatgtggatttgtggtctgcttagattgttacaaggcaaaggaaaggaagagttctagagataaagaactatatgcttggatgaagtgtgtgaagggacagcctcatgatcacaaacatttaatgccaacccaaattatacctggttctgttttgacagatcttctagatgccatgcacactcttagggaaaaatatggtattaaatcccattgtcattgtactaacaaacagaatttacaagttggaaattttcctacaatgaatggtgtatctcaatctcagcagcaaaatactcctccgaagtctgagaaaaatggtggcagcagcccagagagtgatgtaggcacagataacaagttaactcctccagaatcccagtcaccactgcactggttagcagatcttgcagagcaaaaagccagagaggaaaaaaaagaaaacaaagaacttacccttgaaaaccaaattaaagaagaaagagaacaagacaactctgaatctccaaatggcagaacatcacctcttgtgtcccagaataatgaacaaggctcaaccttacgggatttgctgactacaacagctggaaagctacgtgtggggtctacagatgctggcattgcctttgccccagtatattcaatgggagccccaagtagcaaaagtggacggactatgcctaacattcttgatgacataattgcttcagttgttgaaaacaaaattccaccaagtaaaacctccaagataaatgtaaaaccagagcttaaagaagagcctgaagaaagcataatatctgcagtggatgaaaataataaattatacagtgatataccacattcttggatctgtgagaagcatattttatggcttaaggattataagaatagcagtaattggaagcttttcaaagaatgttggaaacaaggacagcctgcagtggtttctggtgtgcataagaaaatgaacattagcctatggaaggcggaatcaattagtcttgattttggagaccaccaagctgatctcctgaactgcaaagatagcatcatttcaaatgccaatgttaaggaattctgggatggttttgaagaagtttcaaaacggcagaaaaacaagagtggagaaacagttgttttaaaattgaaagactggccttcaggagaagacttcaagactatgatgccagcaagatacgaagatcttttaaaaagtctgccattgccagaatattgtaatccagaaggaaaattcaatttggcctctcatttgccaggattttttgtacgtcctgatctaggacccaggttgtgcagtgcctatggtgtagttgctgctaaagatcatgatataggaacaacaaatctccatattgaagtttctgatgttgtaaatatactagtttatgttggcatagcaaaaggaaatggcattctctcaaaagcaggaattctcaagaaatttgaggaagaagatttggatgacattttaaggaaaagattgaaggactcaagtgaaatacctggtgctctgtggcatatttatgctgggaaagatgttgacaagataagggaatttcttcaaaagatttcaaaagaacaaggccttgaagttctaccagaacatgatccaatacgtgaccaaagttggtatgtgaacaaaaagctccgtcaaaggctgcttgaagaatatggagtcagaacctgtactcttattcagttccttggtgatgctattgttttgccagcgggagcacttcatcaggttcagaattttcacagctgtattcaggtaactgaagattttgtgtctccagaacatcttgtagagtcatttcatttaacacaggaactgagacttttgaaggaagaaatcaattatgatgataaactacaggttaaaaatattttgtatcatgcagtcaaagaaatggtgagagccttgaagatacacgaggatgaagtagaggatatggaagaaaattaagtgtgatccagtttgatatttttaggttgttgaactgggattacttaaccttgaatgatgatatgtatgcacactgactttaagcttcataaaaccatcagtgccaagaaattctctttgtagtaattacttgttactgacaccacagcagtatagcatatgtcacagctcctgtgattcaatgttataaaacaagcagaattttaaaagcagcactatatagctgttttgtattatagtgtatatgatgtttgtgaaaatgccagatttaaaatgatgtatttatttttggtaaaaaataaaaaattctatgctatattgttgatcaagtgtaaatgtgaccttgtacagtttactaaaattactgatatttttcactacattgagacagttactgtgagaataggacacaaacaccagctattgcctgcatctgggaaattgctgaatcgcacagcagtcatgtcataatcagaaaattactgccaaataattgtaaaatttgtaaagtataaagtatataaagtagatactaaatacagacacttcaatattttgttgaagctattgactgtacaattaaacattttcaaaaggtgtaatttatttaaaattgtctcattttggtaaaatttatgtgaacttttaaagctaaatattaaacttaatatgctatgtaaatatatacatatatacatttaatgatgtatttttttaaaacattggcttgcttttgttaaagtgcaagtgttacatatggctttgtacattaaagttgaaaggggttttacattttccattaaaaggactttatcaaaaaaaaaaaaaaaaaaaaaaaa

SEQ ID NO: 11569 - DNA, 1243 bp, Homo sapiens
ggacgcaaccatctgcggaaaggataggggggaggaagacttaacactgcaacaacaggtacaaaaaagaaggaaactcagtaacaggacccagaggaccattatatattgctctatattctaggtcgcccactttacacttccttctcatgcacttggtcaataccacgcccgctgaccacactggcgacttccctctctgtcgcccctccgtgaagtcagacccactctgcgggccaagaaaggtgaccgggcttccttccggcttgctaagcagaggccggaagcggtggtttttagcggctctctgggtagcagggtggtgtgatagcggcagcgaggggctcggagaggtgctcggattctcgtagctgtgccgggacttaaccaccaccatgtcgagcaaaagaacaaagaccaagaccaagaagcgccctcagcgtgcaacatccaatgtgtttgctatgtttgaccagtcgcagattcaggagttcaaagaggccttcaacatgattgatcagaacagagatggtttcatcgacaaggaagatttgcatgatatgcttgcttcattggggaagaatccaactgatgagtatctagatgccatgatgaatgaggctccaggccccatcaatttcaccatgttcctcaccatgtttggtgagaagttaaatggcacagatcctgaagatgtcatcagaaatgcctttgcttgctttgatgaagaagcaactggcaccatacaggaagattacttgagagagctgctgacaaccatgggggatcggtttacagatgaggaagtggatgagctgtacagagaagcacctattgataaaaaggggaatttcaattacatcgagttcacacgcatcctgaaacatggagccaaagacaaagatgactgaaataacttcaaattccagccaaacgttccttgttgccactttgggtattctgagattttctcttgcatgcccttagctttacagcttttgcatttcctgttgtatttattctcagccattttgggcatatgtatctttataatcagactggaaacgggactttctattaatatcattttcagaataaaaaataggataatttaacctaccagcccttctcccccaataactgtggtctatacagagtcaatatattttttcggagaaagttattcgctcgattttttctgaatcataattaaactttatgataaaataaaaaaaaaaaaaaa

SEQ ID NO: 11570 - DNA, 2471 bp, Homo sapiens
agaaagcgagcagccacccagctccccgccaccgccatggtccccgacaccgcctgcgttcttctgctcaccctggctgccctcggcgcgtccggacagggccagagcccgttgggctcagacctgggcccgcagatgcttcgggaactgcaggaaaccaacgcggcgctgcaggacgtgcgggagctgctgcggcagcaggtcagggagatcacgttcctgaaaaacacggtgatggagtgtgacgcgtgcgggatgcagcagtcagtacgcaccggcctacccagcgtgcggcccctgctccactgcgcgcccggcttctgcttccccggcgtggcctgcatccagacggagagcggcgcgcgctgcggcccctgccccgcgggcttcacgggcaacggctcgcactgcaccgacgtcaacgagtgcaacgcccacccctgcttcccccgagtccgctgtatcaacaccagcccggggttccgctgcgaggcttgcccgccggggtacagcggccccacccaccagggcgtggggctggctttcgccaaggccaacaagcaggtttgcacggacatcaacgagtgtgagaccgggcaacataactgcgtccccaactccgtgtgcatcaacacccggggctccttccagtgcggcccgtgccagcccggcttcgtgggcgaccaggcgtccggctgccagcggcgcgcacagcgcttctgccccgacggctcgcccagcgagtgccacgagcatgcagactgcgtcctagagcgcgatggctcgcggtcgtgcgtgtgtgccgttggctgggccggcaacgggatcctctgtggtcgcgacactgacctagacggcttcccggacgagaagctgcgctgcccggagcgccagtgccgtaaggacaactgcgtgactgtgcccaactcagggcaggaggatgtggaccgcgatggcatcggagacgcctgcgatccggatgccgacggggacggggtccccaatgaaaaggacaactgcccgctggtgcggaacccagaccagcgcaacacggacgaggacaagtggggcgatgcgtgcgacaactgccggtcccagaagaacgacgaccaaaaggacacagaccaggacggccggggcgatgcgtgcgacgacgacatcgacggcgaccggatccgcaaccaggccgacaactgccctagggtacccaactcagaccagaaggacagtgatggcgatggtataggggatgcctgtgacaactgtccccagaagagcaacccggatcaggcggatgtggaccacgactttgtgggagatgcttgtgacagcgatcaagaccaggatggagacggacatcaggactctcgggacaactgtcccacggtgcctaacagtgcccaggaggactcagaccacgatggccagggtgatgcctgcgacgacgacgacgacaatgacggagtccctgacagtcgggacaactgccgcctggtgcctaaccccggccaggaggacgcggacagggacggcgtgggcgacgtgtgccaggacgactttgatgcagacaaggtggtagacaagatcgacgtgtgtccggagaacgctgaagtcacgctcaccgacttcagggccttccagacagtcgtgctggacccggagggtgacgcgcagattgaccccaactgggtggtgctcaaccagggaagggagatcgtgcagacaatgaacagcgacccaggcctggctgtgggttacactgccttcaatggcgtggacttcgagggcacgttccatgtgaacacggtcacggatgacgactatgcgggcttcatctttggctaccaggacagctccagcttctacgtggtcatgtggaagcagatggagcaaacgtattggcaggcgaaccccttccgtgctgtggccgagcctggcatccaactcaaggctgtgaagtcttccacaggccccggggaacagctgcggaacgctctgtggcatacaggagacacagagtcccaggtgcggctgctgtggaaggacccgcgaaacgtgggttggaaggacaagaagtcctatcgttggttcctgcagcaccggccccaagtgggctacatcagggtgcgattctatgagggccctgagctggtggccgacagcaacgtggtcttggacacaaccatgcggggtggccgcctgggggtcttctgcttctcccaggagaacatcatctgggccaacctgcgttaccgctgcaatgacaccatcccagaggactatgagacccatcagctgcggcaagcctagggaccagggtgaggacccgccggatgacagccaccctcaccgcggctggatgggggctctgcacccagccccaaggggtggccgtcctgagggggaagtgagaagggctcagagaggacaaaataaagtgtgtgtgcagggaaaaaaaaaaaaaaaaaaaa

SEQ ID NO: 11571 - DNA, 1720 bp, Homo sapiens
aggcagaacaggatcaggaagcgatcaaacctaccaaggcagtctcacttctcaatgactggactgtgtgggtactctgctccagacatgcgtggcctcagactcatcatgataccagttgagctgctactttgctacctcctgctgcaccctgtggatgccacttcatatggaaagcagacaaatgtcttgatgcactttcccttgtccttggaatcccagacaccctcctcagaccccttgtcctgccaatttctgcacccaaagtcactgcctggtttcagccacatggcccctctacccaagttcttggtaagcctggctctaaggaatgccctggaggaagctggttgtcaggctgatgtttgggctctacagctacagctctaccgccagggtggtgtgaatgctacacaggtcctcatccagcatcttcgagggctccagaaaggcagaagcacagagaggaacgtgtcagtggaagccctggcctctgctctgcagctgttagccagggagcagcaaagcacaggaagggtcgggcgctccctcccgacagaggactgtgagaatgagaaggagcaagctgtgcacaatgtagtccagctgctgccaggagtgggaaccttctacaacctgggcacagctttgtattatgctactcaaaactgcctgggcaaggccagggaacgaggccgagatggggccatagatctgggatatgaccttctgatgaccatggctgggatgtcaggggggcctatgggtctagcgatcagtgctgcacttaaacctgcattaaggtctggggttcagcagttgatccagtattaccaagatcagaaagacgcaaacatctctcagccggagaccaccaaggagggtttgagggccatctcagatgtgagtgacttggaagaaacaactactctggcttctttcatatcagaagtagtaagttcagctccctactgggggtgggccataatcaagagctatgacttagatcctggggctgggagtcttgagatataaaagaatgtggtaaccacagaattaataactgtactaccctgacaagctatatacatgtcttcaaaattttaatctgatttatccaggaggaaggctgtacagtaaaacgtaagaacgtaaatgtttgggtgttgaagtcacagggtttggtttcgaatctaggctccacttgttagagcctcggtgatcactgaatagtaacttctttcttgaactaagatcagttttgaagtttctaaaggagatagaatgattttaacctcaatgagttgccctgtaaatttaaaatgatacaatgaatctaaaatgcttatcacagtactttcaataaatagctattagccaggtgcggtggctcacgcctgtaatcccagcactgtgagaggctgaggcgggatgatcacctgaggtcaggagttcaagatcagcctgggcaacatggcgaaaccccgtctctacaataaatacaaaaaattatcctggcggagttatgcacgcttgtagtcccaactacctgggaggctgaggcgggagaatcacctgagcctgggaggtcgaggctgcagcgagccgagatcgcgccgctgcattccagcctgggtgacagagcgagaccatgtctcaaaaaataaaaataaaaaaaaattgttttcacaaaaaaaaaaaaaaaaaaaaaaaaaaaaaa

SEQ ID NO: 11572 - DNA, 2205 bp, Homo sapiens
cctgggtgcaaccagtcacagctctgcagaggttactgtgattttgcccctgaaggatctgtccacaacttaggaactcacacagcttttggcctgagcccccgttaccaagagaaaggaggtttttgccaaggactccaaggggagtgcacttgatgctggtcgggacccaaagcgcccagccctccctgagacattgtgtgagtcgggctgggcctcaaacacggcccccactgccccaccccagccagggtggtgcttgtgtgggaaggactttaaatccagctgccagacccctggacgggagaaggagagacggctggccaccatgcacggctcctgcagtttcctgatgcttctgctgccgctactgctactgctggtggccaccacaggccccgttggagccctcacagatgaggagaaacgtttgatggtggagctgcacaacctctaccgggcccaggtatccccgacggcctcagacatgctgcacatgagatgggacgaggagctggccgccttcgccaaggcctacgcacggcagtgcgtgtggggccacaacaaggagcgcgggcgccgcggcgagaatctgttcgccatcacagacgagggcatggacgtgccgctggccatggaggagtggcaccacgagcgtgagcactacaacctcagcgccgccacctgcagcccaggccagatgtgcggccactacacgcaggtggtatgggccaagacagagaggatcggctgtggttcccacttctgtgagaagctccagggtgttgaggagaccaacatcgaattactggtgtgcaactatgagcctccggggaacgtgaaggggaaacggccctaccaggaggggactccgtgctcccaatgtccctctggctaccactgcaagaactccctctgtgaacccatcggaagcccggaagatgctcaggatttgccttacctggtaactgaggccccatccttccgggcgactgaagcatcagactctaggaaaatgggtactccttcttccctagcaacggggattccggctttcttggtaacagaggtctcaggctccctggcaaccaaggctctgcctgctgtggaaacccaggccccaacttccttagcaacgaaagacccgccctccatggcaacagaggctccaccttgcgtaacaactgaggtcccttccattttggcagctcacagcctgccctccttggatgaggagccagttaccttccccaaatcgacccatgttcctatcccaaaatcagcagacaaagtgacagacaaaacaaaagtgccctctaggagcccagagaactctctggaccccaagatgtccctgacaggggcaagggaactcctaccccatgcccaggaggaggctgaggctgaggctgagttgcctccttccagtgaggtcttggcctcagtttttccagcccaggacaagccaggtgagctgcaggccacactggaccacacggggcacacctcctccaagtccctgcccaatttccccaatacctctgccaccgctaatgccacgggtgggcgtgccctggctctgcagtcgtccttgccaggtgcagagggccctgacaagcctagcgtcgtgtcagggctgaactcgggccctggtcatgtgtggggccctctcctgggactactgctcctgcctcctctggtgttggctggaatcttctgaaggggataccactcaaagggtgaagaggtcagctgtcctcctgtcatcttccccaccctgtccccagcccctaaacaagatacttcttggttaaggccctccggaagggaaaggctacggggcatgtgcctcatcacaccatccatcctggaggcacaaggcctggctggctgcgagctcaggaggccgcctgaggactgcacaccgggcccacacctctcctgcccctccctcctgagtcctgggggtgggaggatttgagggagctcactgcctacctggcctggggctgtctgcccacacagcatgtgcgctctccctgagtgcctgtgtagctggggatggggattcctaggggcagatgaaggacaagccccactggagtggggttctttgagtgggggaggcagggacgagggaaggaaagtaactcctgactctccaataaaaacctgtccaacctgtggcaaaaaaaaaaaaaaaaa

SEQ ID NO: 11573 - DNA, 2281 bp, Homo sapiens
ggacagaaaactccctccttttccaagttagccttatagtctagggcttaaaatactggtttaatggtgaaggtaagtgcttttcttctttttgggtagaaggattattactaacttaccaaaggtccattaaggggagggaacagttttaggagaagtcagagaaaagacattaacagcaacataaggatctccatctggtaatattgcctaattccaaaatgaagagactctctgaaaaagataactgattcaatgaagaccctagggcaaggcttgagaagccactggtaccaatggacactgtggacaatggtcatttctccaaggacgctataaaagactgtcgtagtaaaagagattcagggcacagggaaactccaccacaaagcgtggtaccatttcccacagaagctaaatggacgggaagcctgccaccaggaaaggtccagatttctgttcattacgctatgggctggctcttatcatgcacttctcaaacttcaccatgataacgcagcgtgtgagtctgagcattgcgatcatcgccatggtgaacaccactcagcagcaaggtctatctaatgcctccactgaggggcctgttgcagatgccttcaataactccagcatatccatcaaggaatttgatacaaaggcctctgtgtatcaatggagcccagaaactcagggtatcatctttagctccatcaactatgggataatactgactctgatcccaagtggatatttagcagggatatttggagcaaaaaaaatgcttggtgctggtttgctgatctcttcccttctcaccctctttacaccactggctgctgacttcggagtgattttggtcatcatggttcggacagtccagggcatggcccagggaatggcatggacaggtcagtttactatttgggcaaagtgggctcctccacttgaacgaagcaagctcaccaccattgcaggatcagggtcagcatttggatccttcatcatcctctgtgtggggggactaatctcacaggccttgagctggccttttatcttctacatctttggtagcactggctgtgtctgctgtctcctatggttcacagtgatttatgatgaccccatgcatcacccgtgcataagtgttagggaaaaggagcacatcctgtcctcactggctcaacagcccagttctcctggacgagctgtccccataaaggcgatggtcacatgcctaccactttgggccattttcctgggttttttcagccatttctggttatgcaccatcatcctaacatacctaccaacgtatatcagtactctgctccatgttaacatcagagatagtggagttctgtcctccctgccttttattgctgctgcaagctgtacaattttaggaggtcagctggcagatttccttttgtccaggaatcttctcagattgatcactgtgcgaaagctcttttcatctcttgatatgcaagtttcctcatgggaatctcaaggggatttgggctcatcgcaggaatcatctcttccactgccactggattcctcatcagtcaggattttgagtctggttggaggaatgtctttttcctgtctgctgcagtcaacatgtttggcctggtcttttacctcacgtttggacaagcagaacttcaagactgggccaaagagaggacccttacccgcctctgaggacataaagttacaaacttaaatgtggtactgagcatgaactttttaaacattttttacttctctccatattcctgaccatagactcagcagttcttaactctggctgtgtgttagtcttccctggggagcctttataagacactgatacttgggacccactccagagattctgaatgaattggtctggggtggaacccagatactactaatttttagatactccttagaggtttctagcatgcgcccggggttgacaacagctggacaaacttgaaaagtcaattcatgtggcctttgaattttcctcattggaaagtactaaataaataaaaattcatgtgaaaatgatcactgataaatatcttcatggtggggcaggttattggatgcagagaagatctgctcggaattgtagccatatgttacagatctcagcaccgatcagaactgtaaagctataatccccagaattaaagtttttattattttttatacattgtaaaacatagacgtttatttatgtgattaaattctattaaaatttacatgctaaaataaaaaaaaaaaaaaa

SEQ ID NO: 11574 - DNA, 9117 bp, Homo sapiens
tgaggcctgaggcctggggcggggtggcggccgggctggccttggcctcgcgccttcccctgcggccgccgcgggctccgcgggcggtatcggagtgtcgtgcggcgcgtggccgcgtgacacgcgcacttgtcggagtgacgggccctgcggaagaggaggtgcggcccagggcgcaggggagccctcgggagcgggcccggccctcagcgccgccccggccgtgtcccggaggagcggcctgcgccgccgcgcgagaggaagcacccaggcatgtggaatatgctcatagtggcgatgtgcttggcccttctgggctgcctgcaagcccaggagctccagggacatgtctccataatcctgctgggagcaactggggacctggctaagaagtacttatggcagggactgttccagctgtacctggatgaagcggggaggggtcacagttttagcttccatggagctgctctgacagcccccaagcagggtcaagagctcatggccaaggccctggaatccctctcctgccccaaggacatggcacccagtcactgtgcagagcacaaggatcagttcctgcagctgagccagtaccgccaactgaagacggccgaggactatcaggccctgaacaaggacatcgaggcacagctccagcacgcaggcctccgggaggctggcaggatcttctacttctcagtgccacccttcgcctatgaagacattgcccgcaacatcaacagtagctgccggccaggcccgggcgcctggctgcgggttgtccttgagaaaccctttggccatgaccacttctcagcccagcagctggccacagaactcgggacctttttccaggaggaggagatgtaccgggtggaccattacttaggcaagcaggctgtggcgcagatcctgcctttccgagaccagaaccgcaaggctttggacggcctctggaaccggcaccatgtggagcgggtggagatcatcatgaaagagaccgtggatgctgaaggccgcaccagcttctatgaggagtacggtgtcattcgcgacgtcctccagaaccatctgacggaggtcctcaccctcgtggccatggagctgccccacaatgtcagcagtgcggaggctgtgctgcggcacaagcttcaggtcttccaggcgctgcggggcctgcagaggggcagtgccgtcgtgggccagtaccagtcttacagtgagcaggtgcgcagagagctgcagaagccagacagcttccacagcctgacgccgaccttcgcagccgtcctagtgcacattgacaaccttcgctgggagggcgtgcctttcatcctgatgtctggcaaagccttggacgagagagtgggctacgctcggatcttgttcaagaaccaggcctgctgtgtgcagagcgaaaagcactgggccgcggcgcagagccagtgcctgccccggcagctcgtcttccacatcggccatggcgacctgggcagccctgccgtgctggtcagcaggaacctgttcaggccctccctgccctccagctggaaggaaatggagggaccacctgggctccgccttttcggcagccctctgtccgattactacgcctacagccctgtgcgggagcgggacgcccactccgtcctcttatcccatatcttccatggccggaagaatttcttcatcaccacagagaacttgctggcctcctggaacttctggacccctctgctggagagcctggcccataaggccccacgcctctaccctggaggagctgagaatggccgtctgttggactttgagttcagtagcggccggttgttcttttcccagcagcagccggagcagctggtgccagggccagggccggccccaatgcccagtgacttccaggtcctcagggccaagtaccgagagagcccgctggtctccgcctggtccgaggagctgatctctaagctggctaatgacatcgaggccaccgctgtgcgagccgtgcggcgctttggccagttccacctggcactgtcggggggctcgagccccgtggccctgttccagcagctggccacggcgcactatggcttcccctgggcccacacgcacctgtggctggttgacgagcgctgcgtcccactctcagacccggagtccaacttccagggcctgcaggcccacctgctgcagcacgtccggatcccctactacaacatccaccccatgcctgtgcacctgcagcagcggctctgcgccgaggaggaccagggcgcccagatctatgccagggagatctcagccctggtggccaacagcagcttcgacctggtgctgctgggcatgggtgccgacgggcacacagcctccctcttcccacagtcacccactggcctggatggcgagcagctggtcgtgctgaccacgagcccctcccagccacaccgccgcatgagccttagcctgcctctcatcaaccgcgccaagaaggtggcagtcctggtcatgggcaggatgaagcgtgagatcaccacgctggtgagccgggtgggccatgagcccaagaagtggcccatctcgggtgtcctgccgcactccggccagctggtgtggtacatggactacgacgccttcctgggatgagggcgcctgtgccccttgcccgcttcgctcctgtgctttccttcgcccgtgtcttccctcccttctcggccccgccacctgcccagcgtgccctggctctccagaaccttctatcccacagtcaggccccagagagggcaggacaagccttgtcccgatgcctttgaccggcagctctgtgtattggtggatagatgcagaaacaaggaagaaatggagtctgctcctgagaagcttcaaattcaggccaggagagaagtcttaagaaaagacctccagcagttacacattcatatcaaccagcacaacacgggatggcgcccaaactccggcgttcacaagaggagacgtgacgtggtgggctgaggttaatcagggaaggtttcctgggggaggtgatccttgaactggctcccggggaacattcagagcatgattggtagacagaagggtgcagaggcgcccaggggagtacattgccccgtgcaaagcaggggcattggggactgtcttgagaccctgagggggtcaagcccctccttccccagctgcccctccttctagaacctctgcacatctagcctctggccctcctcttcactgcctccacctgctcccgcttgccatccctgtctcctccatcctggctgtgcagtaggaattccaggctcctccctgtgtctttgctgttcttcagactccatttatagagaatgagggctgataacaggaatacagtggcaaagactagactgtggaaagggttccagaaatcttttttcttttttaattaaaaaaaatatttgcagagatgagctcttgctatgttgcccaggctggtctcaaactcctgggctcaagcgatcctcccatctcagcctcccagagtgctgggattacaggtgtgagctactgcgcccagccccagaaatctcagtgctgtttggagctccatttctcatttgatgacttgctctgcgtggggaggtggggtctcattcccccaacttcctcagggaggacccctgccctccgctgctcctctgtcctgctagccttcctccaggaagcacactgggtgcagataatcaggacattccagagatccccaatttaagagggtcatttccatctcaggggactcccggatgggtgtttccgctctcaatagcccctcttgttttaccaggaaagatccagttaaatcacccactgaggtgacagctcattagcggggagagagatggagcatcgagtgacactgggccatccaggcggctctgctcccaccagacaggagctaggcctcactggcaggggggctgcccacagccttttcaggggctcgcttggcgggtgacggggccgcagccaggccttctctccctgccccttggtgaccccgtggcttcctgtctgctggcctctcctgctacttatcacttcaccacgaactctctgcctgagactggggaagtaagcgggtatcttctcagtgagcataggttggggactgtgatcttgagaagccatgggccagcaatacctgcttttctgaagcccccaaggagggctctgacattctttttaaaaacaccacaaagcaaaattcccaggacatgtgtagttttgtttgttcagtatcccacaacttaaggctgggagatggaactcttggttaaggtcgatttttctgtctggcttctccgcaccttccacttgctctctggatcaggcagatataaactttctagcgcattttgagagagggctttcttgggtgagggagcatggcaaagtcggtttctctctggactgtttacacttcaaggcggtggatttagaggaatcctggctttcattttcaatgccagtctgagacatgttcccaagccggggctcttgttcacaccacttactctggccaccaacaacaacccaggccagacagagcatctcttttttttttttttgagacagagtctctgtcgcccaggctggagcccagtggcgagatcttggctcactacaacctccacctcccgggttcaggcaattctcgtgcctaagcctcccgagtagctgcgactacaggcgccggccagcatgcctgtctaatttttgtattttagtagagacagggtttcaccatgttgcccaggctggtctcgaactcctgagctcaggcagtctacccacctcagcctcccaaagtgctgggattacaggcgtgagccaccgcgcccagccagaacatctgtttttacacccagagagcgcccctcgttaggacagaaccacggtgcccagagccaggaagccgccctcctggcgcccagcatctgagcttctacacgtgatgggcgggctcaggagaggacagggagtcgtggtggaagttccacagctggccgcgtgggggggcccttgcaccgcactgccgcctcctgactgcccctatccccgcagcccctgtgccggatttcatttccctcctctctcccagggtacctggccccagcactctcccatctgttcttcaggaaccgactcctctccagttgcaacaccagggagaaaggggcctccacatgcccaagtacccctgcaggatgaagggcaggccggcccttgatgtgccatttctgaataatagtcactgccgccgagtctaggatgtcctgttctaactcagccctgcctcggatgcaccaccgatctgtgcagagtgggtgtgggagtgtgggtgagggtcgaaatgccaaaggtctactttccagaatcaagtgccttctgcaaatcatgttggaaaagtccaaacctggagatgtccctgtgcctccgcccctacccaccccttttccttcagctgtgttaggaaggagaagttttcagaaccctctaggctggtggctttcaaacttcagaccatgatctgcagcaagaaacgtgccttccatcataaatcagtccatttgtttacaactgtgttccaagcaggtttcataaagaaattcttaaccttagaacctcggatatcctctatgttttagttttcatttttttaaaatgcttcttaaaattcactaaattgggctaggtgtggctcatgcctgtaatcccagcactatgggaggctgaggtgagaggatcacttgagcccagaaggttgaaaccagcctgggcaacatagtgagaccccatctctacaaaaagttttaaaaccaggtatggtggtgccctcctgtggtcccagctactcgggagtctgaggtgggaggatcacctgagcccaggagactgaggctgcagtaaggtgtgattgcactattgctctctagcctggaaaacagagtgagaccctatctcaaaaaaaaaaaaaaaaaaaaaggaaagagtgatgacaacagcccagggagcagccccgctcagaacccaagtcccaagttccagcactgtgttcccaggcaggctgtttgcctcttcctggtctggaagcccttgggtcctatggtggcggcagctcccacagtccaggttccctggtggggaccaatgattccatccgcatggaagcccacgtgtgcacttaggggcccataaatggcagaagggcccctcctttgggagaccttgtcagtcagcatctctagggcaaccgtgattgccatttgtagaggggaaggaatcaagggactttaagctagatcaaaatctggggacaaattctcctgctaactgcaagttaaaataggcccttcttactgaatttccctgtttgtttctctgcagacaatgctttagccctactcttgggcccccaagttagcagagtaatcaaagcttcctaccgtttggcctactattccagactagtccctcgaggggttcccttccaaaatatgcagggctcaggctcccaattccgggcctgtctgctttgcttgtgtttctcctgtccctgttctcccggagggcccaggtggaactcacgacagggagggagacgcttcccaaaaacctgcagggctatttcccagaatttggttttcaagtacaaaactttttgtcctgtaagatatatgcagcctcacagaagcagcctctgcctccactttaccagctacgtttttatcttaagcacatggggctcccttagaacttactccactgatttaaaaaaaaaaaactgcctggcagcatctcagtgtcagagtgagcacggcacaggaaaggcccgtggtgacgagggtgaggtggccacagtgaccggacgacaaatgagactctgcaaatgagactccagagggtgaagatctgcggtctccagacatcataggccatgtgacccactaggggccgcttacccctggccgtccgctggctgaactgaacgcattccctctctccgcaactctcccgtgaggctgcacccgtgtgggtagcactggaagcggcactgtttgcattgtacataggaaggaaggaagttcttccagcctcaccagcacctggcagcgagtcagagcctgtgagggcatccgaagcagtgatgcagtgtcaacctcccagctggtgccactctgccctcgggggctccaagcattgtaactcagtcatgggagctgcctctttggaagtgcagatttattcctgtaataatcctgcctgcttttacctctcgtccactgaccagcaagtgtgagtcccggtgtcagtcggcacagtccagtgtccatctgcatttgctcatgcagagggggtgagttgggcactccctgttgttggttttccttttgcagcacactgggcagtctccctataaaacaaaaaccccaccttctgtgccttctgctttagagcagagctccccctcccatttcctcagtcttccctgcaaaatctgtccaccggggaaggcagcaggaaccctgggcagcgggtgttctgggaaggctagtgacagcagatgtcatccaggaacagccacacacggttctccaggccgccgtcagcagctcaaggtggggtatgagtgagaagctgaggatctcgcagcttgttgctgagcaaggtgcaaccgggctcatgctgtcatcagcacaagacgggatggcaagggctttcagacgcatttccaagagtccagcaagccagggggaagatgatccctttgccgaagtgtaccctctagccaacttttgggagcgcttctgtttgcaaagcgctggggatgtgcctgtctctgtgtgacccacgaacgggaagggagagcactggagtaatgacacttctgctgctgctttgattctcaaggctgatctttaaaaccctcgccttgctgacaggtgctttaaaggcagtctgcatcttttcttcccttggtgtgggagaggtaaacactttgatttgctgaaagctgtatggagtatatttgaacagctagtagttagctttgaaagtggaagtgtgaacagacactacttgtgtcgctttgggtccttcactttacccccacagaagtctagaggcgtctgttataaagcgttacggggcgcctgcatgcaggaggaaggacctgtattagctggaaatcatcaggaacccagcttgcctccatctctctgagatgtgctgggtacagcctgcccctcctagttctgtccaccgggaagagccggctggcggcagatccccaggggcagagcccctgctggatcctgggagctcatctttacctgtgccggagtgggaactgtgattccagccgggcaggtcagagtggagcagtgctaagaggctgttgcaggagaactagacgggcggggcctgctgcatctggatcatgtttctgtgctctgccccgcgctagggactcagggtctgggcttctgccaggtgaggagcagagagactgttcccttgggtggagaggtgtgggcatgagagccacccattgccaagcagcaagaatgttcgtgcttttttccagagaggggaaccccactggtttttgtggaaacaatggaaacttacagatgcctgcctgggatgatgaggcacattcagaacaaatgcttttttttttttgagacagagtctcgctctgacgcccaggctggagtgcagtggcgcgatctcggctcactgcaaactttgcctcccaggttcaagtgattctcctacctcagcctcccgagtagctgggattacaccaccatgcccagcaaatttttgtgtttttagtagagacggagtttcaccatgttggccaggctggtctcgaactcctgacctcaggtgatccatccgccttggcctcccaaagtgctgggattacaggcgggagccaccatgcctggccagaacaaatgcctttttaaaccttttaagaacatttttaaaatgtctttttctatgtcaaatgtaacgtttatttttttaaacaataaaattgatttgccaaaa

SEQ ID NO: 11575 - DNA, 6032 bp, Homo sapiens
gaattccgtgggcggaggtctgggatctcctggctgttgctgtcttctgctctcatcctgcaggtgggactctcagctgacaccatgagtagtgacactgaaatggaagtgttcggcatagctgctcctttcctccggaagtcagaaaaggagaggatcgaggctcagaaccagccctttgatgccaagacgtattgcttcgtggtggactcaaaggaagaatatgccaaggggaaaatcaagagttctcaggatgggaaggtcactgtggaaactgaggacaacaggaccctggtggtcaaaccagaggatgtgtacgccatgaacccccccaagttcgacaggatcgaagacatggccatgctgacgcacctgaatgagccagccgtgctgtacaacctgaaggaccgttacacatcttggatgatctatacctactcaggcctcttctgtgtcactgtcaacccctacaagtggctgccggtgtacaaccccgaggtggtggaaggctaccgaggcaaaaagcgccaggaggccccaccccacatcttctccatctctgacaacgcctatcagttcatgctgactgatcgtgaaaaccagtccattctgatcacgggagaatccggggcaggaaagactgtgaacaccaaacgggtcatccagtactttgcaacaattgcagctactggggacctggccaagaagaaggactccaaaatgaaggggactctggaagatcaaatcatcagtgccaatcccctgctggaggcctttgggaacgccaagactgtgaggaatgacaactcctcccgttttggcaagttcatccgaatccattttggaaccactgggaagctggcctctgcagatattgaaacttatcttctggaaaaatcaagagtcactttccagctgaaggctgaaagaagctaccacatcttctaccagattctttctaacaagaagcctgagctcatagagctgctgcttattacgaccaacccttacgactacccgttcattagccagggggagatcctggtggccagcatagatgatcgagaggagctgctggctacagacagcgccattgacatcctgggcttcaccccagaagagaaatctgggctctacaagctgacgggagccgtgatgcactacgggaacatgaagttcaagcagaagcagcgagaggagcaggccgagccggatggcacagaagtggctgacaaaacagcctatctgatgggcctgaactcttcggacctcctaaaagctttgtgctttcctagagtgaaagttgggaatgagtacgttaccaaaggtcaaactgtggatcaggttcaccatgctgtgaatgctctttcaaaatcagtttatgaaaagttgttcttgtggatggtcactcgcattaaccagcaactggatacgaagcttccaagacaacacttcattggtgttttggacattgcaggctttgaaatctttgagtataacagcctggagcagctgtgcatcaacttcaccaatgagaaactgcaacagtttttcaaccaccacatgttcgtgctggagcaggaggagtacaagaaggaaggcatcgagtggacgttcattgacttcgggatggacctggctgcctgcatcgagctcatcgagaagcctatgggcatcttctccatcctggaagaggagtgcatgttccccaaggcaacagacacctccttcaagaacaagctgtatgaccagcatcttggaaagtccaacaacttccagaagcccaaggtggtcaaaggcagggcagaggctcacttctcactgatccactatgcgggcaccgtggactacagtgtctcaggttggctggagaagaacaaggaccctctgaacgagactgtggttgggctgtaccagaagtcttccaacaggctcctggcacacctctatgccacgtttgccacggcggatgctgacagtggaaagaagaaagttgccaagaagaagggttcttccttccaaactgtctctgcccttttcagggaaaacctgaacaagctgatgtcaaatttaagaactactcaccctcattttgtgcgttgtataattcccaatgaaaccaaaactccaggggctatggaacacagccttgttctgcaccagctgcggtgtaacggtgtcctggagggcatccgcatctgcaggaaagggttcccaaacaggattctctatggagattttaaacaaagataccgagtgctgaatgccagtgcaatcctggagggacaattcattgacagcaagaaagcctgtgaaaagcttctggcatccattgatattgaccacactcagtacaaatttggacataccaaggtgttcttcaaggctggcttgctgggaaccctggaagagatgcgggatgaccgcctggccaaactaatcacccggacacaagctgtgtgcagagggttcctcatgcgtgtggaattccagaagatggtgcagaggagggagtccatcttctgcatccagtacaacattcgctcattcatgaacgtcaagcactggccctggatgaaactcttcttcaagatcaagcccctcctcaagagtgcggagactgagaaagagatggccaccatgaaggaagaattccagaaaaccaaagatgaactcgccaagtcggaggcaaagaggaaggagctagaggaaaaactggtgactctggtccaagagaaaaatgacctgcagctccaagtacaagctgaaagcgaaaatttgttggatgctgaggaaagatgcgatcagctgatcaaagccaaattccagctcgaggccaagatcaaggaggtgacagagagagctgaagatgaggaggagatcaatgctgagctgacggccaagaagaggaaactggaggatgaatgctcagagctcaagaaagacattgatgaccttgagttgaccctggccaaggttgagaaggagaagcatgccacggagaacaaggttaaaaaccttactgaggaactctccgggttagatgaaacaattgcaaagttaaccagagagaagaaggccctccaagaggcgcaccagcaggccttggatgacctccaagctgaagaagacaaagtcaattctttgaacaaaaccaagagcaaactggaacagcaagtggaagacctggaaagctccctagaacaagaaaagaagctccgcgtagacctggaaaggaacaaaaggaaattggaaggagacttgaagcttgctcaagagtccatattagatctggagaatgacaagcaacagctggacgaaaggctcaagaagaaagattttgaatattgtcaacttcaaagcaaagtggaagatgagcagacactgggcctccagtttcagaagaaaatcaaagagttgcaggctcgaattgaggagctggaagaggagatagaggcggagagggccacccgcgcgaagacagagaaacagcgcagcgactatgcccgggagctggaggagctgagcgagcggctggaggaggcgggaggcgtcacctccacgcagatagagctcaacaagaagcgggaggctgagttcctgaagctgcgcagggacctggaggaggccacactgcagcacgaagccatggtggccacgctgaggaagaagcatgcggatagtgtggccgagcttggggagcagattgacaacctgcagcgggtcaagcagaagctggagaaggagaagagcgagttcaagctggagatcgatgacctctccagcagcatggagagtgtgtcgaaatctaaggcaaatctggaaaaaatctgccgaaccctggaggatcagttaagtgaggccaggggcaagaatgaggaaattcagaggagcctgagcgagctgaccacacagaagtctcgtttgcagaccgaggctggtgagctgagtcgtcagctggaagaaaaagaaagcatagtatcccaactttccaggagcaagcaagcctttacccagcaaacagaagagctcaagaggcagctggaggaagagaacaaggccaagaacgccctggcgcacgccctgcagtcctcccgccacgactgtgacctgctgcgggaacagtatgaggaggagcaggaaggcaaagctgagctgcagagggcgctgtccaaggccaatagtgaggttgcccagtggagaaccaaatacgagacggacgccatccagcgcacagaagagctggaggaggcccaagaaaaacttgctcagcgccttcaagattccgaggaacaggttgaggcagtgaatgctaaatgtgcttcactggagaagaccaagcagaggctgcaaggagaggtggaggatctgatggttgatgttgaaagagccaattccttggccgccgctctggacaagaagcagaggaactttgacaaggtgttggcagagtggaagacaaagtgtgaggagagccaagcagagctggaggcatccctgaaggagtcccgctccttgagcactgagctcttcaaactgaaaaatgcctacgaggaagccttagatcaacttgaaactgtgaaacgggaaaataagaacttagagcaggagatagcagatctcacagaacaaattgctgaaaatggcaaaaccatccatgaactggagaaatcaagaaagcagattgagctggaaaaggctgatatccagctggctctcgaggaagcagaggctgctcttgagcatgaagaagccaagatcctccgaatccagcttgaattgacacaagtgaaatcagaaattgatagaaagattgccgagaaggatgaagagatcgagcagctgaagaggaactaccagagaacagtggaaaccatgcagagcgccctggacgccgaggtgcggagcaggaatgaagccatccggctcaagaagaagatggagggggacctgaatgaaatcgagatccagctgagccacgccaaccgccaggcggcggagaccctcaaacacctcaggagtgtccagggacagctgaaggatacgcagctccacctggatgatgccctccgaggccaggaggacctgaaggagcagctggcgattgtggagcgcagagccaacctgctgcaggccgaggtggaggagctgcgggctactctggagcagacggagagggcccggaaactggcggaacaggagctcctggactccaacgagagggtgcagctgctgcatacccagaacaccagcctcatccacaccaagaagaagctggagacagacctcatgcagctccagagtgaggtagaagatgccagcagggatgcaaggaacgctgaggagaaggccaagaaggccatcacggacgctgccatgatggcggaggagctgaagaaggagcaggacaccagcgcccaccttgagcggatgaagaagaacctggaacagacggtgaaggacctgcagcatcgtctagatgaggccgagcagctggcgctgaagggcgggaagaagcagatccagaaactggagaccaggatccgagagctggagtttgaacttgagggagagcagaagaagaacacagagtctgttaagggcctgaggaagtatgagcggagggtcaaggagctgacgtaccagagtgaagaggacaggaagaatgtgctgagattgcaggatctggtggataaactgcaagtgaaagtcaagtcctacaagaggcaggcggaggaggctgatgaacaagccaatgctcatctcaccaaattccggaaagctcagcatgagctggaggaggccgaggaacgtgcggatatcgcagaatctcaagtcaacaagctccgcgctaagactcgagacttcacctccagcaggatggtggtccacgagagtgaagagtgagccagcccttctggagcaggagcaggacagaagatatgcaaaatgtatattttcttgattcctgaccattgatacttaatgtccatgtgactctttttcacatgcaataaactttgctttgtttc

SEQ ID NO: 11576 - DNA, 6016 bp, Homo sapiens
gtggaacacttctgaacctgcatttttatctggaactccagaagcagaatcctttgctaaataaatcgcagccatgagtgcgagctcagacgctgagatggctgtttttggcgaagctgctccctaccttcgaaaatcagaaaaggagcggattgaggcccaaaacaagccgtttgatgctaaaacatctgtctttgtggcggagcccaaggaatcctatgtgaagagcactatacaaagcaaagaaggagggaaagtaaccgtaaagactgaaggtggagcaactctaactgtcagggaagaccaagtcttccctatgaaccctccgaaatatgacaaaattgaggacatggccatgatgactcatctacacgagcctggagtgctgtacaacctcaaagagcgctatgcagcctggatgatctacacctactcaggcctcttctgtgtcaccgtcaacccctacaagtggctgccggtgtacaagcccgaggtggtggctgcctacagaggcaaaaagcgccaggaggccccgccccacatcttctccatctctgacaatgcctatcagttcatgttgactgatcgagagaatcagtccatcctgatcaccggagaatctggtgccggaaagactgtgaacaccaagcgtgtcatccaatactttgcaacaattgcagttactggagagaagaagaaggatgaatctggcaaaatgcaggggactctggaagatcaaatcatcagcgccaatcccctactggaggcctttggcaatgccaaaaccgtgaggaatgacaactcctctcgctttggtaaattcattagaatccactttggtactacagggaagctggcatctgctgatatagaaacatatcttttagaaaagtccagagttactttccagctaaaggcggaaagaagctaccatattttttatcagatcacttccaataagaagccagatctaattgaaatgctcctgatcaccaccaacccatatgactatgccttcgtcagtcagggggagatcacagttcccagtattgatgaccaagaagagttgatggccactgatagtgccattgacatcctgggcttcactcctgaagagaaagtgtccatctataaactcacaggggctgtgatgcattatgggaacatgaaattcaagcaaaagcagcgtgaggagcaagctgagccagatggcacagaagtcgctgacaaggcagcctatctccagagtctgaactctgcagacctactcaaagccctctgctaccctagggtcaaggttggcaatgagtatgtcaccaaaggccagactgtgcagcaggtgtacaatgccgtgggtgctctggccaaagccgtctacgagaagatgttcctgtggatggtcacccgcatcaaccagcagctggacaccaagcagcccaggcagtacttcatcggggtcttggacattgctggctttgaaatctttgattttaacagcctggagcagctgtgcatcaacttcaccaacgagaaactgcaacagtttttcaaccaccacatgtttgtgctagagcaggaggagtacaagaaggaaggcatcgagtggacgttcattgactttgggatggacctggctgcctgcattgagctcattgagaagccactgggcatcttctccatcctggaagaggagtgcatgttccctaaggccacggacacctccttcaagaacaagctgtatgaccagcacctgggcaagtctgccaacttccagaagcccaaggtggtcaaaggcaaggctgaggcccacttctctctgattcactatgctggcactgtggactacaacattactggctggctggacaaaaataaggaccccctgaatgatactgtggttgggctgtaccagaagtctgcaatgaagactctagccagtctcttttccacgtatgctagtgctgaagcagatagcagcgcgaagaaaggtgctaagaaaaagggctcttctttccagactgtgtctgcccttttcagggaaaatttaaataaattgatgacgaatctgaggagcacacaccctcacttcgtacggtgtatcattcccaatgaaaccaaaactcctggggcaatggaacatgaacttgtgttgcaccagctgaggtgtaatggtgtgctggaaggcatccgcatctgtaggaaaggattcccaagcagaatcttatatggtgatttcaaacaaagatacaaggttttaaatgcaagtgctattccagagggacagttcattgacagcaagaaggcttctgagaaacttcttgcatctattgatattgatcatactcaatataaatttggacataccaaggttttcttcaaagctggacttctgggtcttctggaagaaatgagagatgaaaaattagcccaaattataacaagaacacaagctgtctgtaggggattcctaatgagggtagaatatcagaagatgttgcaaaggagagaagcacttttctgcatccagtataatgtccgtgccttcatgaacgtcaagcactggccctggatgaaactctttttcaagattaagcccctcctcaagagtgcagagaccgagaaagagatggccaccatgaaggaagaattccagaaaaccaaagatgaactcgccaagtcagaggcaaaacggaaggagctagaggaaaaaatggtcactctcttaaaagagaaaaatgacctgcaactccaggttcaatctgaagcagatagcttggctgatgcagaggaaaggtgtgagcaactgattaaaaacaaaatccaacttgaggccaaaatcaaagaggtgactgaaagagctgaggaggaggaagagatcaatgctgagctgacagccaagaagagaaaactggaggatgaatgttcagaactcaagaaagacattgatgaccttgagctgacactggccaaggttgagaagcagaaacatgccacggagaacaaggtgaaaaatcttacagaagagatggcaggcctggatgaaaccattgcaaaactgtccaaggagaagaaggctctccaagagacccaccagcagaccctggatgacctgcaggcagaggaggacaaagtcaacatcctgaccaaagctaaaaccaagctagaacagcaagtggatgatcttgaagggtctctggaacaagaaaagaagcttcgaatggatctagaaagagcaaagcggaaactggagggtgacctcaaattggcccaagaatccacaatggatatggaaaatgacaaacagcaacttgatgaaaagcttgaaaagaaagaatttgaaatcagcaatttgataagcaaaattgaagatgagcaagctgtagaaattcaactacagaagaagatcaaagagttgcaggcccgcattgaggagctgggggaagaaatcgaggcagagagggcgtcccgagccaaagcggagaagcagcgctctgacctctcccgggaactggaggagatcagcgagaggctggaagaagccggtggggcaacttctgctcaggtggaattgaacaagaagcgggaggctgagtttcagaaactgcgcagggacctggaggaggccaccctgcagcatgaagctatggtggctgctcttcggaagaagcacgcagacagtatggctgagcttggggagcagattgacaacttgcagcgggtcaaacagaagctggagaaggagaagagtgagctgaagatggagactgatgacctcagcagtaacgcagaggccatttccaaagccaagggccaccttgaaaagatgtgccgctctctagaagatcaagtgagtgggcttaagaccaaggaagaggagcagcagcggctgatcaatgacctcacagcacagagagcgcgcctgcagacagaagcgggtgaatattctcgacaattagatgagcaagatgctttagtctctcagctttcaaggagcaagcaagcatctactcagcagattgaagagctgaaacatcaactagaggaagaaactaaagccaagaacgccctggcacacgccctgcagtcctcccgccatgactgcgacctgctgcgggaacagtatgaggaagagcaggaaggcaaagctgagctgcagagggcgctgtccaaggccaacagtgaggttgcccagtggagaaccaaatacgagacggatgccatccagcgcacagaggagctggaggaggccaagaaaaagttggcccagcgcctgcaagaagctgaggaacatgtagaagctgtgaacgccaaatgtgcttcccttgagaagacgaagcagcggctccagaatgaagttgaagacctcatgcttgatgtggaaaggtctaatgcagcctgtgcagcccttgataagaagcaaaggaactttgacaaggtcctatcagaatggaagcagaagtatgaggaaactcaggctgaacttgaggcctcccagaaggagtcacgttctcttagcactgagctgttcaaggtgaagaatgtctatgaggaatccctggatcaactcgaaacgctaagaagagcacataagaacttgcaacaggagatttctgacctcactgagcagattgcagagggaggaaagcaaattcatgaattggagaaaataaagaagcaagtagaacaagagaaatgtgaaattcaggctgctttagaggaagcagaggcatctcttgaacatgaagaaggaaagattctgcgtatccagcttgagttaaaccaagtcaagtctgaagttgatagaaaaatcgcagaaaaggatgaggaaattgaccagctgaagagaaaccacactagagtcgtggagacaatgcagagcacgctggatgcagagattagaagcagaaatgatgctctgagagtcaagaagaaaatggaaggagatctgaatgaaatggaaatccagctgaaccatgccaatcgcttagctgcagagagtttaaggaactacaggaacacccaaggaatcctgaaggaaacccagctccacctggatgatgctctccggggccaggaggacctcaaggaacagctggcaattgtggagcgcagagccaacctgctgcaggctgagatcgaggagctgtgggccactctggaacagacagagagaagcaggaaaatcgccgaacaggagctcctggatgccagtgagcgtgtccagctcctccacacccagaataccagtctcattaacaccaagaagaaattagaaaatgacgtttcccaactccaaagtgaagtggaagaagtaatccaagaatcacgcaatgcagaagagaaagccaagaaggccatcactgatgctgccatgatggctgaggagctgaagaaggaacaggacaccagcgcccacctggagcggatgaagaagaacctggagcagacggtgaaggacctgcagcatcgtctagatgaggccgagcagctggcgctgaagggtgggaagaagcagatccagaaactggaggccagggtacgtgagcttgaaggagaggttgaaaatgaacagaaacgtaatgcagaggctgttaaaggtttacggaaacatgaccgacgagtaaaagaactcacctaccagactgaagaagatcgcaagaatgttctcaggctgcaggacttggtagataaattacaggcgaaggtgaaatcatacaagagacaagctgaggaggctgaggaacaatccaatgctaatctatctaaattccgcaaactccagcatgagctggaggaggccgaggaacgggctgacattgctgagtcccaggtcaacaaattgcgagtgaagagccgagaggttcacacaaaaatcagtgcagagtaaacacacctgcctgatgctatcaagaggctgaagaaaggcacaaaatgtgctatttttggtcacttgctttatgacgtttattttcctgttaaagctgaataaataaaaactacagtaaatgtatacatt

SEQ ID NO: 11577 - DNA, 6008 bp, Homo sapiens
tgtctttccctgctgctctcaggtcccctgcaggccttggcccctttcctcatctgtagacacacttgagtagcccaggcacagccatgggagattcggagatggcagtctttggggctgccgccccctacctgcgcaagtcagagaaggagcggctagaagcgcagaccaggccttttgacctcaagaaggatgtcttcgtgcctgatgacaaacaggagtttgtcaaggccaagatcgtgtctcgagagggtggcaaagtcactgccgagactgagtatggcaagacagtgaccgtgaaggaggaccaggtgatgcagcagaacccacccaagttcgacaaaatcgaggacatggccatgctgaccttcctgcatgagcccgcggtgctctacaacctcaaggatcgctacggctcctggatgatctacacctactcgggcctcttctgtgtcaccgtcaacccttacaagtggctgccggtgtacactcctgaggtggtggctgcctaccggggcaagaagaggagcgaggccccgccccacatcttctccatctccgacaacgcctatcagtacatgctgacagacagagaaaaccagtccatcctgatcaccggagaatccggagcagggaagacagtcaacaccaagagggtcatccagtactttgctgttattgcagccattggggaccgcagcaagaaggaccagagcccgggcaagggcaccctggaggaccagatcatccaggccaaccctgctctggaggcctttggcaatgccaagaccgtccggaacgacaactcctcccgcttcgggaaattcattcgaattcattttggggcaacaggaaagttggcatctgcagacatagagacctatcttctggaaaaatccagagttattttccagctgaaagcagagagagattatcacattttctaccaaatcctgtctaacaaaaagcctgagctgctggacatgctgctgatcaccaacaacccctacgattatgcattcatctcccaaggagagaccaccgtggcctccattgatgacgctgaggagctcatggccactgataacgcttttgatgtgctgggcttcacttcagaggagaaaaactccatgtataagctgacaggcgccatcatgcactttggaaacatgaagttcaagctgaagcagcgggaggagcaggcggagccagacggcactgaagaggctgacaagtctgcctacctcatggggctgaactcagccgacctgctcaaggggctgtgccaccctcgggtgaaagtgggcaatgagtacgtcaccaaggggcagaatgtccagcaggtgatatatgccactggggcactggccaaggcagtgtatgagaggatgttcaactggatggtgacgcgcatcaatgccaccctggagaccaagcagccacgccagtacttcataggagtcctggacatcgctggcttcgagatcttcgatttcaacagctttgagcagctctgcatcaacttcaccaacgagaagctgcagcagttcttcaaccaccacatgtttgtgctggagcaggaggagtacaagaaggagggcatcgagtggacattcattgactttggcatggacctgcaggcctgcattgacctcatcgagaagcccatgggcatcatgtccatcctggaagaggagtgcatgttccccaaggccaccgacatgaccttcaaggccaagctgtttgacaaccacctgggcaaatccgccaacttccagaagccacgaaatatcaaggggaagcctgaagcccacttctccctgatccactatgccggcatcgtggactacaacatcattggctggctgcagaagaacaaggatcctctcaatgagactgtcgtgggcttgtatcagaagtcttccctcaagttgctcagcaccctgtttgccaactatgctggggctgatgcgcctattgagaagggcaaaggcaaggccaagaaaggctcgtcctttcagactgtgtcagctctgcacagggaaaatctgaacaagctgatgaccaacttgcgctccacccatccccactttgtacgttgtatcatccctaatgagacaaagtctccaggcgtgatggacaaccccctggtcatgcaccagctgcgctgcaatggtgtgctggagggcatccgcatctgcaggaaaggcttccccaaccgcatcctctacggggacttccggcagaggtatcgcatcctgaacccagcggccatccctgagggacagttcattgatagcaggaagggggcagagaagctgctcagctccctggacattgatcacaaccagtacaagtttggccacaccaaggtgttcttcaaggccgggctgctggggctgctggaggaaatgagggacgagaggctgagccgcatcatcacgcgtatccaggcccagtcccgaggtgtgctcgccagaatggagtacaaaaagctgctggaacgtagagactccctgctggtaatccagtggaacattcgggccttcatgggggtcaagaattggccctggatgaagctctacttcaagatcaagccgctgctgaagagtgcagaaagagagaaggagatggcctccatgaaggaggagttcacacgcctcaaagaggcgctagagaagtccgaggctcgccgcaaggagctggaggagaagatggtgtccctgctgcaggagaagaatgacctgcagctccaagtgcaggcggaacaagacaacctggcagatgctgaggagcgctgtgatcagctgatcaaaaacaagattcagctggaggctaaggtgaaggagatgaacgagaggctggaggatgaggaggagatgaatgctgagctcactgccaagaagcgcaagttggaagatgagtgctcagagctcaaaagggacatcgatgatctggagctgacactggccaaagtggagaaggagaaacacgcaacagagaacaaggtgaaaaacctgacagaggagatggctgggctggatgagatcattgccaagctgaccaaggagaagaaagctctgcaagaggcccaccaacaggctctggatgaccttcaggccgaggaggacaaggtcaacaccctgactaaggccaaagtcaagctggagcagcaagtggatgatctggaaggatccctggagcaagagaagaaggtgcgcatggacctggagcgagcgaagcggaagctggagggcgacctgaagctgacccaggagagcatcatggacctggagaatgacaagcagcagctggatgagcggctgaaaaaaaaagactttgagctgaatgctctcaacgcaaggattgaggatgaacaggccctcggcagccagctgcagaagaagctcaaggagcttcaggcacgcatcgaggagctggaggaggagctggagtccgagcgcaccgccagggctaaggtggagaagctgcgctcagacctgtctcgggagctggaggagatcagcgagcggctggaagaggccggcggggccacgtccgtgcagatcgagatgaacaagaagcgcgaggccgagttccagaagatgcggcgggacctggaggaggccacgctgcagcacgaggccactgccgcggccctgcgcaagaagcacgccgacagcgtggccgagctgggcgagcagatcgacaacctgcagcgggtgaagcagaagctggagaaggagaagagcgagttcaagctggagctggatgacgtcacctccaacatggagcagatcatcaaggccaaggctaacctggagaagatgtgccggaccttggaagaccagatgaatgagcaccggagcaaggcggaggagacccagcgttctgtcaacgacctcaccagccagcgggccaagttgcaaaccgagaatggtgagctgtcccggcagctggatgagaaggaggcactgatctcccagctgacccgaggcaagctcacctacacccagcagctggaggacctcaagaggcagctggaggaggaggttaaggcgaagaacgccctggcccacgcactgcagtcggcccggcatgactgcgacctgctgcgggagcagtacgaggaggagacggaggccaaggccgagctgcagcgcgtcctttccaaggccaactcggaggtggcccagtggaggaccaagtatgagacggacgccattcagcggactgaggagctcgaggaggccaagaagaagctggcccagcggctgcaggaagctgaggaggccgtggaggctgttaatgccaagtgctcctcgctggagaagaccaagcaccggctacagaatgagatcgaggacttgatggtggacgtagagcgctccaatgctgctgctgcagccctggacaagaagcagaggaacttcgacaagatcctggccgagtggaagcagaagtatgaggagtcgcagtcggagctggagtcctcgcagaaggaggctcgctccctcagcacagagctcttcaaactcaagaacgcctatgaggagtccctggaacatctggagaccttcaagcgggagaacaaaaacctgcaggaggagatctccgacttgactgagcagttgggttccagcggaaagactatccatgagctggagaaggtccgaaagcagctggaggccgagaagatggagctgcagtcagccctggaggaggccgaggcctccctggagcacgaggagggcaagatcctccgggcccagctggagttcaaccagatcaaggcagagatcgagcggaagctggcagagaaggacgaggagatggaacaggccaagcgcaaccacctgcgggtggtggactcgctgcagacctccctggacgcagagacacgcagccgcaacgaggccctgagggtgaagaagaagatggaaggagacctcaatgagatggagatccagctcagccacgccaaccgcatggccgccgaggcccagaagcaagtcaagagcctccagagcttgttgaaggacacccagattcagctggacgatgcagtccgtgccaacgacgacctgaaggagaacatcgccatcgtggagcggcgcaacaacctgctgcaggctgagctggaggagttgcgtgccgtggtggagcagacagagcggtcccggaagctggcggagcaggagctgattgagactagtgagcgggtgcagctgctgcattcccagaacaccagcctcatcaaccagaagaagaagatggatgctgacctgtcccagctccagactgaagtggaggaggcagtgcaggagtgcaggaatgctgaggagaaggccaagaaggccatcacggatgccgccatgatggcagaggagctgaagaaggagcaggacaccagcgcccacctggagcgcatgaagaagaacatggaacagaccattaaggacctgcagcaccggctggacgaagccgagcagatcgccctcaagggcggcaagaagcagctgcagaagctggaagcgcgggtgcgggagctggagaatgagctggaggccgagcagaagcgcaacgcagagtcggtgaagggcatgaggaagagcgagcggcgcatcaaggagctcacctaccagacggaggaggacaggaaaaacctgctgcggctgcaggacctggtagacaagctgcagctaaaggtcaaggcctacaagcgccaggccgaggaggcggaggagcaagccaacaccaacctgtccaagttccgcaaggtgcagcacgagctggatgaggcagaggagcgggcggacatcgccgagtcccaggtcaacaagctgcgggccaagagccgtgacattggcacgaagggcttgaatgaggagtagctttgccacatcttgatctgctcagccctggaggtgccagcaaagccccatgctggagcctgtgtaacagctccttgggaggaagcagaataaagcaattttccttgaagccga

SEQ ID NO: 11578 - DNA, 5939 bp, Homo sapiens
atagagagactctgcggcccagattcttcaggattctccgtgaagggataaccaggggaagcaccaagatgaccgatgcccagatggctgactttggggcagcggcccagtacctccgcaagtcagagaaggagcgtctagaggcccagacccggccctttgacattcgcactgagtgcttcgtgcccgatgacaaggaagagtttgtcaaagccaagattttgtcccgggagggaggcaaggtcattgctgaaaccgagaatgggaagacggtgactgtgaaggaggaccaggtgttgcagcagaacccacccaagttcgacaagattcaggacatggccatgctgaccttcctgcacgagcccgcggtgcttttcaacctcaaggagcgctacgcggcctggatgatatatacctactcgggcctcttctgtgtcactgtcaacccctacaagtggctgccggtgtacaatgccgaggtggtggccgcctaccggggcaagaagaggagtgaggccccgccccacatcttctccatctccgacaacgcctatcagtacatgctgacagatcgggagaaccagtccatcctcatcacgggagaatccggggcggggaagactgtgaacaccaagcgtgtcatccagtactttgccagcattgcagccataggtgaccgtggcaagaaggacaatgccaatgcgaacaagggcaccctggaggaccagatcatccaggccaaccccgctctggaggccttcggcaatgccaagactgtccggaacgacaactcctcccgctttgggaaattcattaggatccactttggggccactggaaagctggcttctgcagacatagagacctacctgctggagaagtcccgggtgatcttccagctgaaagctgagagaaactaccacatcttctaccagattctgtccaacaagaagccggagttgctggacatgctgctggtcaccaacaatccctacgactacgccttcgtgtctcagggagaggtgtccgtggcctccattgatgactccgaggagctcatggccaccgatagtgcctttgacgtgctgggcttcacttcagaggagaaagctggcgtctacaagctgacgggagccatcatgcactacgggaacatgaagttcaagcagaagcagcgggaggagcaggcggagccagacggcaccgaagatgctgacaagtcggcctacctcatggggctgaactcagctgacctgctcaaggggctgtgccaccctcgggtgaaagtgggcaacgagtatgtcaccaaggggcagagcgtgcagcaggtgtactactccatcggggctctggccaaggcagtgtatgagaagatgttcaactggatggtgacgcgcatcaacgccaccctggagaccaagcagccacgccagtacttcataggagtcctggacatcgctggcttcgagatcttcgacttcaacagctttgagcagctctgcatcaacttcaccaacgagaagctgcagcagttcttcaaccaccacatgttcgtgctggagcaggaggagtacaagaaggagggcattgagtggacattcattgactttggcatggacctgcaggcctgcattgacctcatcgagaagcccatgggcatcatgtccatcctggaggaggagtgcatgttccccaaggccactgacatgaccttcaaggccaagctgtacgacaaccacctgggcaagtccaacaatttccagaagccacgcaacatcaaggggaagcaggaagcccacttctccctgatccactacgccggcactgtggactacaacatcctgggctggctggaaaaaaacaaggatcctctcaacgagactgttgtggccctgtaccagaagtcctccctcaagctcatggccactctcttctcctcctacgcaactgccgatactggggacagtggtaaaagcaaaggaggcaagaaaaagggctcatccttccagacggtgtcggctctccaccgggaaaatctcaacaagctaatgaccaacctgaggaccacccatcctcactttgtgcgttgcatcatccccaatgagcggaaggctccaggggtgatggacaaccccctggtcatgcaccagctgcgctgcaatggcgtgctggagggcatccgcatctgcaggaagggcttccccaaccgcatcctctacggggacttccggcagaggtatcgcatcctgaacccagtggccatccctgagggacagttcattgatagcaggaaggggacagagaagctgctcagctctctggacattgatcacaaccagtacaagtttggccacaccaaggtgttcttcaaggcagggctgcttgggctgctggaggagatgcgggatgagaggctgagccgcatcatcacgcgcatgcaggcccaagcccggggccagctcatgcgcattgagttcaagaagatagtggaacgcagggatgccctgctggtaatccagtggaacattcgggccttcatgggggtcaagaattggccctggatgaagctctacttcaagatcaagccgctgctgaagagcgcagagacggagaaggagatggccaccatgaaggaagagttcgggcgcatcaaagagacgctggagaagtccgaggctcgccgcaaggagctggaggagaagatggtgtccctgctgcaggagaagaatgacctgcagctccaagtgcaggcggaacaagacaacctcaatgatgctgaggagcgctgcgaccagctgatcaaaaacaagattcagctggaggccaaagtaaaggagatgaatgagaggctggaggatgaggaggagatgaacgcggagctcactgccaagaagcgcaagttggaagacgagtgctcagagctcaagaaggacattgatgacctggagctgacactggccaaggtggagaaggagaagcatgcaacagagaacaaggtgaagaacctaacagaggagatggctgggctggatgaaatcatcgctaagctgaccaaggagaagaaagctctacaagaggcccatcagcaggccctggatgaccttcaggttgaggaagacaaggtcaacagcctgtccaagtctaaggtcaagctggagcagcaggtggatgatctggagggatccctagagcaagagaagaaggtgcgcatggacctggagcgagcaaagcggaaactggagggcgacctgaagctgacccaggagagcatcatggacctggaaaatgataaactgcagctggaagaaaagcttaagaagaaggagtttgacattaatcagcagaacagtaagattgaggatgagcaggcgctggcccttcaactacagaagaaactgaaggaaaaccaggcacgcatcgaggagctggaggaggagctggaggccgagcgcaccgccagggctaaggtggagaagctgcgctcagacctgtctcgggagctggaggagatcagcgagcggctggaagaggccggcggggccacgtccgtgcagatcgagatgaacaagaagcgcgaggccgagttccagaagatgcggcgggacctggaggaggccacgctgcagcacgaggccactgccgcggccctgcgcaagaagcacgccgacagcgtggccgagctgggcgagcagatcgacaacctgcagcgggtgaagcagaagctggagaaggagaagagcgagttcaagctggagctggatgacgtcacctccaacatggagcagatcatcaaggccaaggcaaacctggagaaagtgtctcggacgctggaggaccaggccaatgagtaccgcgtgaagctagaagaggcccaacgctccctcaatgatttcaccacccagcgagccaagctgcagaccgagaatggagagttggcccggcagctagaggaaaaggaggcgctaatctcgcagctgacccgggggaagctctcttatacccagcaaatggaggacctcaaaaggcagctggaggaggagggcaaggcgaagaacgccctggcccatgcactgcagtcagcccggcatgactgcgacctgctgcgggagcagtacgaggaggagacagaggccaaggccgagctgcagcgcgtcctgtccaaggccaactcggaggtggcccagtggaggaccaagtatgagacggacgccattcagcggactgaggagctcgaagaggccaaaaagaagctggcccagcggctgcaggatgccgaggaggccgtggaggctgttaatgccaagtgctcctcactggagaagaccaagcaccggctacagaatgagatagaggacttgatggtggacgtagagcgctccaacgccgctgctgcagccctggacaagaagcagagaaactttgacaagatcctggccgagtggaagcagaagtatgaggagtcgcagtctgagctggagtcctcacagaaggaggctcgctccctcagcacagagctcttcaagctcaagaacgcctacgaggagtccctggagcacctagagaccttcaagcgggagaacaagaaccttcaggaggaaatctcggaccttactgagcagctaggagaaggaggaaagaatgtgcatgagctggagaaggtccgcaaacagctggaggtggagaagctggagctgcagtcagccctggaggaggcagaggcctccctggagcacgaggagggcaagatcctccgggcccagctagagttcaaccagatcaaggcagagatcgagcggaagctggcagagaaggacgaggagatggaacaggccaagcgcaaccaccagcgggtggtggactcgctgcagacctccctggatgcagagacacgcagccgcaacgaggtcctgagggtgaagaagaagatggaaggagacctcaatgagatggagatccagctcagccacgccaaccgcatggccgccgaggcccagaagcaagtcaagagcctccagagcttgctgaaggacacccagatccagctggatgatgcggtccgtgccaacgacgacctgaaggagaacatcgccatcgtggagcggcgcaacaacctgctgcaggctgagctggaggagctgcgtgccgtggtggagcagacagagcggtcccggaagctggcggagcaggagctgattgagaccagcgagcgggtgcagctgctgcattcccagaacaccagcctcatcaaccagaagaagaagatggagtcggatctgacccagctccagtcggaagtggaggaggcagtgcaggagtgcagaaacgccgaggagaaggccaagaaggccatcacggatgccgccatgatggcagaggagctgaagaaggagcaggacaccagcgcccacctggagcgcatgaagaagaacatggagcagaccattaaggacctgcagcaccggctggacgaggccgagcagatcgccctcaagggaggcaagaagcagctgcagaagctggaagcgcgggtgcgggagctggagggtgagctggaggccgagcagaagcgcaacgcagagtcggtgaagggcatgaggaagagcgagcggcgcatcaaggagctcacctaccagacagaggaagacaaaaagaacctgctgcggctacaggacctggtggacaagctgcaactgaaggtcaaggcctacaagcgccaggccgaggaggcggaggagcaagccaacaccaacctgtccaagttccgcaaggtgcagcatgagctggatgaggcagaggagcgggcggacatcgctgagtcccaggtcaacaagcttcgagccaagagccgtgacattggtgccaagcaaaaaatgcacgatgaggagtgacactgcctcgggaacctcactcttgccaacctgtaataaatatgagtgcca

SEQ ID NO: 11579 - DNA, 6062 bp, Homo sapiens
tacgggtcctgctttaaaaagctccaagaactgtctcactcccaggctacatcttctcacttgctaacaaggacctctgagttcagcagccatgagttcagactcagaattggctgtttttggggaggctgctcctttcctccgaaagtctgaaagggagcgcattgaggcccagaataggccctttgatgccaaaacatctgtctttgtggcggagcccaaagaatcctttgtcaaagggaccatccagagcagagaaggaggaaaagtgacggtgaagactgagggaggagcgactctgacagtgaaggatgatcaggtcttccccatgaaccctcccaaatatgacaagatcgaggatatggccatgatgactcatctgcatgagcctgctgtgctgtacaacctcaaagaacgttatgcagcctggatgatctacacctattcaggtctcttctgtgtcactgtcaacccctacaagtggctgcctgtgtataagcccgaggtggtgacagcctaccgaggcaaaaagcgccagggggccccgccccacatcttctccatctctgacaacgcctatcagttcatgctgactgaccgagagaatcagtcaatcctgatcactggagaatctggtgcagggaagactgtgaacaccaagcgtgtcatccagtactttgcaacaattgcagttactggtgagaagaagaaggaagaaattacttctggcaaaatacaggggactctggaagatcaaatcatcagtgccaaccccctactggaggcctttggcaacgccaagaccgtgaggaatgacaactcctctcgctttggtaaattcatcagaatccactttggcactactggaaaactggcatctgctgatattgaaacatatctgctagagaagtctagagttgttttccagcttaaggctgagagaagttatcatattttttaccagattacatcgaataagaaaccagaacttattgaaatgcttctgattaccacgaacccatatgattacccatttgtcagtcaaggggagatcagtgtggccagcatcgatgatcaggaagaactgatggccacagatagtgctattgatattttgggctttactaatgaagaaaaggtctccatttacaagctcacgggggctgtgatgcattatgggaacctaaaatttaagcaaaagcagcgtgaggagcaagcagagccagatggcacagaagttgctgacaaggcggcctacctccagagtctgaactctgcagatctgctcaaagctctctgctaccccagggtcaaggtcggcaatgagtatgtcaccaaaggccagactgtagaacaggtgtccaacgcagtaggtgctctggccaaagccgtctacgagaagatgttcctgtggatggttgcccgcatcaaccagcagctggacaccaagcagcccaggcagtacttcatcggggtcttggacattgctggttttgagatttttgatttcaacagcctggagcagctgtgcatcaacttcaccaatgagaaactgcaacagtttttcaaccaccacatgttcgtgctggagcaggaggagtacaagaaggaaggcatcgagtggacgttcatcgacttcgggatggacctggctgcctgcatcgagctcatcgagaagcctatgggcatcttctccatcctggaagaggagtgcatgttccctaaggcaacagacacctccttcaagaacaagctgtatgaccagcacctgggcaagtctgccaacttccagaagcccaaggtggtcaaaggcaaggccgaggcccacttcgctctgattcactatgctggtgttgtggactacaacattactggctggctggagaagaacaaggaccccctgaatgagaccgtggttggactgtaccagaagtctgcaatgaaaactctagctcagctcttctctggggctcaaactgctgaaggagagggagctggcggaggggccaagaaaggtggtaagaagaagggctcttctttccagacagtgtctgcccttttcagagagaatttgaacaagctgatgaccaacctcaggagtacccatcctcactttgtgaggtgtatcatccccaatgagacaaaaactcctggtgccatggagcatgagcttgtcctccaccagctgaggtgtaacggtgtgctggaaggcatccgcatctgtaggaaaggatttccaagcagaatcctttatgcagacttcaaacagagatacaaggtattaaatgcaagtgcaatccctgaagggcaattcattgatagcaagaaggcctctgagaagctccttgcatccatcgacattgaccacacccagtataaatttgggcacaccaaggtctttttcaaagctggtcttctggggctcctagaggagatgcgagatgacaagctggcccagctgattacccgaacccaggccaggtgcagagggttcttggcaagagtggagtaccagaggatggtggagagaagggaggccatcttctgtatccagtacaatatcagatccttcatgaatgtcaagcactggccctggatgaaactcttcttcaagatcaagcctctgttgaagagtgcagaaactgagaaggagatggccaccatgaaggaagaatttcagaaaattaaagacgaacttgccaagtcagaggcaaaaaggaaggaactggaagaaaagatggtgacgctgttgaaagaaaaaaatgacttgcagctccaagttcaggctgaagccgaaggcttggctgatgcagaggaaaggtgtgaccagctaatcaaaaccaaaatccagctagaagccaaaatcaaagaggtgactgagagagctgaggatgaggaagagatcaatgctgagctgacagccaagaagaggaaactggaggatgaatgttcagaactcaagaaagacattgatgaccttgagctgacactggccaaggttgagaaggagaaacatgccacagaaaacaaggtgaaaaacctcacagaagagatggcaggtctggatgaaaccattgctaagctgaccaaggagaagaaggctctccaggaggcccaccagcagaccctggatgacctgcaggcagaggaggacaaagtcaacaccctgaccaaagctaaaatcaaacttgaacaacaagtggatgatcttgaagggtccttggagcaagaaaagaaacttcgcatggacctagaaagggctaagaggaaacttgagggtgacttgaagttggcccaagaatccataatggacattgaaaatgagaaacagcaacttgatgaaaagctcaaaaagaaagagtttgaaatcagcaatctgcaaagcaagattgaagatgaacaggcacttggcattcaattgcagaagaaaattaaagaattgcaagcccgcattgaggagctggaggaggaaatcgaggcagagcgggcctcccgggccaaagcagagaagcagcgctctgacctctcccgggagctggaggagatcagcgagaggctggaagaagccggtggggccacttcagcccagattgagatgaacaagaagcgggaggctgagttccagaaaatgcgcagggacctggaggaggccaccctacagcatgaagccacagcggccaccctgaggaagaagcatgcagatagtgtggccgagcttggggagcagattgacaacctgcagcgagtgaagcagaagctggagaaggagaagagtgagatgaagatggagattgatgaccttgctagtaatgtagaaacggtctccaaagccaagggaaacctagagaaaatgtgccggactctagaggaccaactgagtgaactgaaatcaaaggaagaggagcagcagcggctgatcaatgacctgactgcgcagagggggcgcctgcagactgaatctggtgagttttcacgccagcttgatgaaaaggaagctctggtgtctcagttatcaagaggcaaacaagcctttactcaacagattgaagaattaaagaggcaacttgaagaggagataaaagccaagaacgccctggcgcatgccctgcagtcttcccgccacgactgtgacctgctgcgggaacagtatgaggaggagcaggaatccaaggccgagctgcagagagcactgtccaaggccaacaccgaggttgcccaatggaggaccaaatacgagacggacgccatccagcgcacagaggagctggaggaggccaagaagaagctggcccagcggctgcaggcagctgaggaacatgtagaagctgtgaacgccaaatgtgcttccctcgaaaagacgaagcagcggctgcagaatgaggtcgaggacctcatgcttgatgtggagaggacaaatgccgcctgtgccgcccttgacaaaaagcaaaggaacttcgataagatcctggcagaatggaaacagaaatgtgaggaaacgcatgctgagcttgaggcctcccagaaggaggcccgttcccttggcactgagctgttcaagataaagaatgcctatgaggaatctttggatcagctagaaaccctgaagcgagagaacaaaaacttacagcaggagatttctgacctcacggaacagattgcagaaggagggaaacgtatccatgaactggagaaaataaagaaacaagtggaacaagaaaagtgtgaacttcaggctgctttagaagaagcagaggcatctcttgaacatgaagagggaaagatcctgcgcatccagcttgagttgaaccaagtcaagtctgaggttgataggaaaattgctgaaaaagatgaggaaattgaccagctgaagagaaaccacattagaatcgtggagtccatgcagagcacgctggatgctgagatcaggagtaggaatgatgccattaggctcaagaagaagatggagggagacctcaatgaaatggaaatccagctgaaccatgccaaccgcatggctgctgaggccctgaggaactacaggaacacccaaggcatcctcaaggatacccagatccacctggatgatgctctccggagccaggaggacctgaaggaacagctggccatggtggagcgcagagccaacctgctgcaggctgagatcgaggagctgcgggccactctggaacagacagagaggagcagaaaaatcgcagaacaggagctcctggatgccagtgagcgtgttcagctactgcacacccagaacaccagcctgatcaacaccaagaagaagctggagacagatatttcccaaatgcaaggagagatggaggacattctccaggaagcccgcaatgcagaagaaaaggccaagaaggccatcactgatgccgccatgatggctgaggagctgaagaaggagcaggacaccagcgcccacctggagcggatgaagaagaacatggagcagaccgtgaaggatctgcagctccgtctggatgaggctgagcagctggccctgaagggtgggaagaagcagatccagaaactggaggccagggtacgggagctggaaggagaggttgagagtgagcaaaagcgtaatgctgaggctgtcaaaggtctgcgcaaacatgagaggcgagtgaaggaactcacttaccagacggaagaagatagaaagaatattctcaggcttcaagatttggtagataaacttcaggcaaaagtgaaatcttataagagacaagctgaggaggctgaggaacaatccaacaccaatctagctaaattccgcaagctccagcatgagctggaggaggccgaggaacgggctgacattgctgagtcccaggtgaacaaactgcgggtgaagagccgggaggttcacacaaaagtcataagtgaagagtgatcatgtcctgatgccatggaatgactgaagacaggcacaaaatgtgacatctttggtcatttccctctgtaattattgtgtattctaccctgttgcaaaggaaataaagcatagggtagtttgcaaacaaaaaaaaaaaaaaaaa

SEQ ID NO: 11580 - DNA, 6016 bp, Homo sapiens
atccttcctcaaaattcttgaagtagttgtctgctttgagcctgccaccttcttcatctgataatacaagaggtatacctagtccagcactgccatcaataacctgcagccatgagttctgactctgagatggccatttttggggaggctgctcctttcctccgaaagtctgaaaaggagcgaattgaagctcagaacaagccttttgatgccaagacatcagtctttgtggtggaccctaaggagtcctacgtgaaagcaatagtgcagagcagggaaggggggaaggtgacagccaagaccgaagctggagctactgtaactgtgaaagaagaccaagtcttctccatgaaccctcccaaatatgacaagatcgaggacatggccatgatgactcacctgcatgagcctgctgtgctgtataacctcaaagagcgttacgcagcctggatgatctacacctactcgggcctcttctgtgtcaccgtcaacccctacaagtggctgccggtgtacaaccctgaggtggtgacagcctaccgaggcaaaaagcgccaggaggccccaccccatatcttctccatctctgacaatgcctatcagttcatgctaactgatcgtgaaaaccagtcaatcttgattactggagaatctggtgcagggaagactgtgaacacgaagcgtgtcatccagtactttgcaacaattgcagttactggagagaagaaaaaagaggaacctgcctctggcaaaatgcaggggacccttgaagatcaaatcatcagtgctaaccccctactggaagccttcggcaatgccaagaccgtgaggaatgacaactcctctcgctttggtaaattcatcaggatccattttggtgccacaggcaaactggcttctgcagatattgaaacatatctgctagagaagtcccgagttacttttcagctaaaggctgaaagaagctaccacatattttatcaaatcctgtccaataagaaaccagagctcattgaaatgcttctgatcaccaccaacccatatgacttcgcatttgtcagccaaggggaaattactgtgcccagcattgatgaccaggaagagctgatggccacagatagtgctgtggacatcctgggtttcactgctgatgaaaaggtggccatttacaagctcactggagccgtgatgcattatgggaacatgaaattcaagcaaaagcaaagggaagagcaggcagagccagatggcacggaagttgctgacaaagctgcttatctgacaagtctgaactctgctgacctgctcaaatctctctgctatcccagagtcaaggtcggcaatgagttcgtaaccaaaggccagactgtgcagcaggtgtacaacgcagtgggtgctctggccaaagccatctacgagaagatgttcctgtggatggtcacccgcatcaaccagcagctggacaccaagcagcccaggcagtacttcatcggggtcttggacattgctggctttgagatctttgatttcaacagcctggagcagctgtgcatcaacttcaccaacgagaaactgcaacagtttttcaaccaccacatgttcgtgctggagcaggaagagtacaagaaggaaggcatcgagtgggagttcattgacttcgggatggacctggctgcctgcatcgagctcatcgagaagcctatgggcatcttctccatcctagaagaggagtgcatgttccccaaggcaacagacacctccttcaagaacaagctgtatgaacaacatcttggaaaatccaacaacttccagaagcccaagcctgccaaaggcaagcctgaggctcacttctcactggtgcactatgccggcaccgtggactacaacatcgccggctggctggacaaaaacaaggaccccctgaatgagactgtggtggggctgtaccagaagtctgcaatgaagactctggctttcctcttctctggggcacaaactgctgaagcagagggtggtggtggaaagaaaggtggcaaaaagaagggttcttctttccagacagtgtcagctcttttcagggagaatttgaataagctgatgaccaacttgaggagcactcacccccactttgtgcggtgcatcatccccaatgaaactaaaactcctggtgccatggagcatgagcttgtcctgcatcagctgaggtgtaacggtgtgctggaaggcatccgcatctgcaggaaaggcttcccaagcagaatcctttatgcagacttcaaacagagatacaaggttctaaatgcgagtgctatcccagagggtcagttcattgacagcaagaaggcttctgagaaacttctagggtctattgaaattgaccacacccagtacaaattcggtcataccaaggttttcttcaaagctggcctgctgggaactctagaagaaatgcgagatgaaaagctagctcaactcatcacgcgcactcaagccatatgcagggggttcctgatgagagtggagttcagaaagatgatggagaggagagagtccatcttctgcattcagtacaacatccgtgctttcatgaatgtgaagcactggccctggatgaagctgtatttcaagatcaagcccctcctcaagagtgcagagacagagaaggagatggccaacatgaaggaagaatttgagaaaaccaaagaagagctggctaagacagaggcaaaaaggaaagaactagaagaaaagatggtgacgctaatgcaagagaaaaatgacttacaactccaagttcaagctgaagcagatgccttggctgatgcagaggaaagatgtgatcagttgattaaaaccaaaatccaacttgaggccaaaatcaaagaggtaactgaaagagctgaggatgaggaagagatcaatgctgagctgacagccaagaagaggaaactggaggatgaatgttcagagctcaagaaagacattgatgaccttgagctgacactggccaaggttgagaaggagaaacatgccacagagaacaaggtgaaaaacctcacagaagagatggcaggtctggatgaaaccattgctaagctgaccaaggagaagaaggctctccaggaggcccaccagcagaccctggatgacctgcagatggaggaggacaaagtcaacaccctgaccaaagctaaaaccaagctagaacagcaagtggacgatcttgaaggatctctggaacaagaaaagaaactttgcatggacttagaaagagccaagagaaaactggagggtgacctaaaattggcccaagaatccacaatggatacagaaaatgacaaacagcaacttaatgagaaactcaaaaagaaagagtttgaaatgagcaatctgcaaggcaagattgaagatgaacaagcccttgcaatgcagctacaaaagaagatcaaagaattacaggcccgcattgaggagctggaggaggaaatcgaggcagagcgggcctcccgggccaaagcagaaaagcagcgctctgacctctcccgggagctggaggagatcagtgagaggctggaagaagccggtggggccacttcagcccagattgagttgaacaagaagcgggaggctgagttccagaaaatgcgcagggacctggaagagtccaccctgcagcacgaagccacggcagctgctcttcggaagaagcacgcagatagtgtggctgagcttgggaagcagatcgacagccttcagcgggtcaagcagaagctggagaaggaaaagagtgagctgaagatggagatcaatgaccttgctagtaacatggagactgtctccaaagccaaggcaaactttgagaaaatgtgccgcaccctagaggaccagcttagtgaaataaaaacaaaggaagaagagcagcaacgcttaataaatgagttgtcagcccagaaggcacgtttacacacagaatcaggtgagttttcacgacagctagatgaaaaagatgctatggtttctcagctatcccgaggcaaacaagcatttacacaacagattgaagaattaaagaggcagctagaagaggagactaaggccaagagcactctggcccatgccctgcagtcagcccgccatgactgtgacctgctgcgggaacagtatgaggaggagcaggaagccaaggctgagctgcagaggggaatgtccaaggccaacagtgaggttgcccagtggaggaccaagtacgagacggacgccatccagcgcacagaggagctggaggaggccaagaagaagctagcccagcgtctgcaggatgcagaagaacatgtagaagctgtgaattccaaatgtgcttctcttgaaaagacaaagcagaggctacagaatgaagtagaggacctcatgattgatgtggaacgatctaatgctgcctgcatagctctcgataagaagcaaagaaactttgacaaggttctggcagaatggaaacagaagtatgaggaaactcaggctgaacttgaggcctcccagaaggagtcgcgttctctcagcactgagctgttcaaggtgaagaatgcctacgaggaatccctggatcatcttgaaactctaaagcgagagaataagaacttacaacaggagatttctgacctgacagagcaaattgcagagggtggaaagcatatccatgaactggagaaagtaaagaaacaacttgatcatgagaagagtgaactacagacttccctagaggaagcagaggcatctcttgagcatgaagaaggcaaaattcttcgcattcaacttgagctaaatcaggtgaaatctgagattgaccgaaaaattgctgaaaaagatgaagaactcgatcagctaaagaggaaccatctcagagttgtggagtcaatgcagagtacactggatgctgagatcaggagcagaaatgatgctctgaggatcaagaagaagatggagggagatcttaatgaaatggaaatccagctgaaccatgccaaccgccaggctgctgaggcactaaggaatcttagaaacacacaaggaatactgaaggacactcagctacatttggatgatgccatcagaggccaagatgaccttaaggaacaattggcaatggttgagcgcagagctaacctgatgcaggctgaagttgaagagctcagggcatccctggaacggactgagagaggcaggaaaatggcagagcaagagcttctggatgccagtgaacgtgtgcaacttctgcacactcagaacaccagcctgatcaacaccaagaagaagctggaaacagacatttcccaaatccagggagagatggaggacatcgtccaggaagcccgcaatgcagaggagaaggccaagaaggccatcactgatgctgccatgatggctgaggagctgaagaaggaacaggacaccagcgcccacctggagcggatgaagaagaacatggagcagaccgtgaaggatctgcagctccgtctgggtgaggctgagcagctggcgctgaagggtgggaagaagcagatccagaaactggaggccagggtgagagagcttgaaagtgaggtggaaagtgaacagaagcacaatgttgaggctgtcaagggtcttcgcaaacatgagagaagagtgaaggaactcacttaccagactgaggaggaccgcaagaatattctcaggctgcaggacttggtggacaaattgcaaaccaaagtcaaagcttacaagagacaagctgaagaggctgaggaacaatccaatgtcaaccttgccaagttccgcaagctccagcacgagctggaggaggccgaggaacgggctgacattgctgagtcccaagtcaacaagctgagagtgaagagtcgggaggttcacacaaaagtcataagtgaagagtaattcattctaatgaaagaaaatgtgaccaaagaaatgcacgaaatgtgaagttctttgtcactgtcctgtatatcaaggaaataaa

SEQ ID NO: 11581 - DNA, 1779 bp, Homo sapiens
tgatctgcctgtagctgccacagcctccagcggtggctacagttgaaaccctcacaccacgcaggaagaggtcatcatcatgtcggacgatttcttatggtttgaaggcatagctttccctactatgggtttcagatccgaaaccttaagaaaagtacgtgatgagttcgtgataagggatgaagatgtaataatattgacttaccccaaatcaggaacaaactggttggctgagattctctgcctgatgcactccaagggggatgccaagtggatccaatctgtgcccatctgggagcgatcaccctgggtagagagtgagattgggtatacagcactcagtgaaacggagagtccacgtttattctcctcccacctccccatccagttattccccaagtctttcttcagttccaaggccaaggtgatttatctcatgagaaatcccagagatgttttggtgtctggttattttttctggaaaaacatgaagtttattaagaaaccaaagtcatgggaagaatattttgaatggttttgtcaaggaactgtgctatatgggtcatggtttgaccacattcatggctggatgcccatgagagaggagaaaaacttcctgttactgagttatgaggagctgaaacaggacacaggaagaaccatagagaagatctgtcaattcctgggaaagacgttagaacccgaagaactgaacttaattctcaagaacagctcctttcagagcatgaaagaaaacaagatgtccaattattccctcctgagtgttgattatgtagtggacaaagcacaacttctgagaaaaggtgtatctggggactggaaaaatcacttcacagtggcccaagctgaagactttgataaattgttccaagagaagatggcagatcttcctcgagagctgttcccatgggaataacgtccaaaacactctggatcttatatggagaatgacattgattctcctgtccttgtacatgtacctgactggggtcattgtgtaagacttattattttatcctgaaaccttaaatatcaaacctctgcatctctgatcccttccttgttaaaagttaccacggttggccaggcgcggtggttcatgcctgtaatcccagcactatgggaggccgagacgggcggatcacgaggtcaggagactgagaccatcctggctaacacggtgaaaccccatctctactaaaaatacaaaaaacaaaaaaaattagccaggcgcattggctcatgtctgtaatcccagcactttgggaggtcgggggggtgggggaggatcacggggtcaggagatcgagaccatcctggccaacatgatgaaaccctatctctactaaaaatacaaaaattagccgggcatggtggtgcacgcctatagtcccagctactcgggaggctgaggtaggagaatcgtttgaactcaggaggcagaggttgcaatgagccaagatcgcgccactgcactccagcctgggtgacagagcgagaccgtctcaaaaagaaagaagtgactagggttcagagaaccagggttcaaagcccagggatgcaaaggttgcagtgagttgagtcatgggatcccagacttttttaaatgtttgcaatgtttcccgtttacagaatgctacaagaataatgtacgtactacctaaaaggatgtctaaatgtttgttaataaaaataagaaatagctacagtgacagattttagagcaaaaattagtaataaaaataagaaataaaatta

SEQ ID NO: 11582 - DNA, 11072 bp, Homo sapiens
gagggaaggagggagggaagcagccgctgacccgtggcatgagctggatgcggtgtccgttgcaggactagggcgccgacatgaacctgcaccaggtgctgaccggggctgtgaaccctggcgaccactgcttctccgtgggcagcattggcgaccagcgcttcacggcttatgcatctggatgtgacattgtaatactgggaagcgattttgaaagattacagataatcccaggagctaaacatggaaatattcaagtgggatgtgtagactgttcaatgcaacaaggcaagattgcagcgtcttatggaaatgttatctccatttttgaaccagttaacctaccaaaacaaaagaaaaatttggaattatatagtcagtggcagaaaagtggccaattttttctggaatcaatagcacacaatataacctgggatcccacaggcagtcgtcttttaactggttccagctatttgcaactctggtccaatactaacttggagaagccaactgaagatgaaaatttaaataaaacagatcttaactttggagattggaaatgcatttggcattgcaaaactgcttcccaagttcatttaatgaaattttcaccagatggagaattttttgccactgctgggaaggatgactgtcttttgaaggtttggtataatgtagaaaactggcggacagctgttacttctccagatggaagttcagaaaaacaatcccaaggagaaattgacttttcttttgtgtatctggcccatcctcgagcagtaaatggattttcctggcgtaaaacaagcaaatatatgcctagggcttctgtatgtaatgtactgttgacttgctgcaaagataatgtgtgtcgtctttgggtagagacatttttaccaaatgattgtttgctatacggaggtgactgcagccattggactgaatcaattaatttaacaaataacttcaagagaaatgcttccagtaaagaacgagttcaaaatgctttagaagtaaatctgagacattttcgtagaggtcggaggagatcacttgctcttgtagcacatacgggatatctaccacatcagcaggatcctcatcatgttcacaggaacactccactgcatgccaatgcactttgccactttcatattgcagccagcatcaacccagccacagacattccacttcttccatctattacatctctgagtctaaatgaaaatgaagagaagaccggaccttttgttgtacactggctaaacaataaagaactgcattttactttgtccatggaagtttttttacagcaacttagaaaaagttttgaacaaccatcttctgaggccagtgtagaagattctaatcaggcagatgtaaaatctgatgaagaaactgatgatggtgttgatgatctgaaaataaatcccgaaaagaaggaattaggctgtgataaaatggtaccaaactcaagttttacatcattatcgtcagctgccattgatcatcagattgaagtacttctgtctgaatggagtaaaaatgcagatatgctatttagtattcatcccatggatggttctttgctagtttggcatgtggattggctggatgaataccagcctggtatgtttcgtcaagtacaggtgtcctttgtttccagaattccagtagctttccccacaggtgatgcaaactctctctgtaaaagcataatgatgtatgcctgtaccaagaatgttgacttggctattcagcaggggaaacaaaaaccttctggcctcacccgttccacatcaatgcttatttcttctggtcacaataaatcatctaatagtttaaaattaagtatttttacgcctaatgttatgatgatatcaaaacatgctgatggttctctgaatcagtggctggtcagttttgccgaggaatctgctttttctactgttctcagtatttcccacaaatccagatattgtggtcatcgttttcatcttaatgatttagcttgccactcagtattaccattattgctgacaacatcacaccataatgcattaaggacaccagatgttgataacccagagcaaccttttgatgctctaaatattgaagaatgctctttgacacaacaaaataaaagcactgttgacgtggcatttcaggatcccagtgcagtttacagtgagcttattctgtggagggttgacccagttgggccattgtctttttctggaggagtttctgagcttgcccggattaattctcttcatgtttctgccttttccaatgtggcatggctgcccactcttatacccagttattgtctgggtgcatactgcaactctcctagtgcatgctttgtagccagtgatggacaatatctgagattatatgaagcagttattgatgctaagaaacttttatctgagctttctaaccctgaaatttctaaatatgttggtgaagtctttaacatcgtcagtcaacaatcaacagccaggccaggatgcattattgcattagatcccattaccaaacttcatggcagaaaaacccaactgcttcatgtttttgaagaagacttcattttgaataaccttgagaagaaaagccttggcaaagacagcattttatctaatgcaggcagctcacctaatggattttctgagaagttctacctaattgtaatagaatgcactcaagacaaccgttcactgttacacatgtggaatttacatctaaagtcaattcctgtctcattagatgaaaaagtagatacaaaattatccgaagcggtttggcagccagaagaacattattcttcttctccagagaagatcctatctcctttttcacaaaagtatcaggcttgcagagcaaatctccagagtaccagcaggttgactctgttttcagaaatggtttatagccaagaattgcatttaccagaaggagttgagataataagtattaagccatcagcaggacatctgagttcatcttctatatatcctgcatgcagtgctccttatttattggcaacttcatgttcagatgagaaagtaagattctggagatgcagagtaacagatggagaatctgccacgtcaaagaatggaaaaattgatcttgcatacatttgggaagaatggccattacttattgaagatggacttcagagcaatagtagtataactgtacctggtaggcctgtagaagttagctgtgcacatacaaatcgtttagcagtagcttataagcagcctgcatctaatagtagatcttcccaggactttgtgatgcatgtaagtatttttgaatgtgagtcaacaggaggttcatgttgggtccttgagcagacaattcatttagatgagttaagcacagtattggattctggcattagtgttgatagcaatttagtggcctataataaacaagacatgtatttatctagtaaagagaatatcacatcaaacacaaagcatttagttcacttagattggatgtctagagaagacggttctcatatcctgactgtaggaattggatcaaaactttttatgtatggacccctggctggcaaggtacaagaccaaactggtaaggaaaccctggcatttcctctctgggagagtaccaaagttgtgcccctttctaaatttgtactattacgaagtgtggacctagtttcttctgtagatggctccccaccttttcctgtttctttatcgtgggtccgggatggcatccttgtggtaggaatggactgtgaaatgcatgtgtattgccaatggcaaccatcttctaaacaagaacctgttataacagattcgtacagtgggagcactccatctataacaagtttaataaaacagagtaactccagttctgggttacatcctccaaagaaaactctgactcgatccatgaccagtcttgcacagaaaatctgtggaaagaaaactgcattcgatccttcagtggatatggaagattcaggtctttttgaagcagctcatgtactttccccgactctacctcagtatcatcccttgcagcttttggaactcatggatcttggtaaagttcggagagccaaggccatcttgtcccatcttgttaagtgcattgctggggaagttgtggctctgaatgaagctgaatctaatcatgaacgccgccttaggtctctcacaatcagtgctagtggaagcactaccagagacccccaggcattcaacaaggctgaaaatacagattacacagaaatagattctgttcctccacttcctttatatgccttacttgcagcagatgatgatagctgttactcatctttggagaaatctagtaatgagagtacgttaagtaaatcaaaccaattatctaaagaaagttatgatgagctttttcagactcaacttctaatgactgatactcatatgttagagacagatgaagaaaatacaaagcctagagttattgacctttcacagtacagtccgacttactttggacctgagcatgctcaggttctttctggccacttacttcattctagtttaccaggactcagccggatggagcagatgtctttgatggccttagcagatacaattgcaactacaagcactgatattggagaaagccgagacagaagccaaggtggagaaactcttgatgaatgtgggttaaaatttcttttggctgttcgactccatacctttcttacaacttcccttccagcctatcgagctcaactccttcaccaaggcctgtctacaagtcattttgcttgggcatttcactcagtagcagaagaagaactgctgaacatgttgccagccatgcagaaagatgatcccacttggtctgaactaagagctatgggtgtggggtggtgggtccggaatacccgcatcttacgcaaatgcatagaaaaagtagctaaagcagccttttatagaaagaatgatcctttagatgctgccattttttaccttgcaatgaaaaagaaagctgtgatttggggattatatagagctgaaaaaaacaccaggatgacacagttttttggacacaattttgaggatgagaggtggcgtaaagcagctttaaagaatgctttttctttgctaggcaaacaaagatttgaacattctgcagcattttttcttttagctggttgcctcagagatgcaattgaggtatgtcttgagaaattgaatgacattcagttggctcttgtaatagcaagactctatgagtctgaatttgatacatctgcagcatataaatctattttacgtaaaaaagttttgggaatcgattctcctgtcagtgaactgtgttcattgaacataaatatgcatcatgatccttttcttcggagcatggcatattggattttggaagattatagtggtgctctggaaacattaataaagcaacctatcagagagaatgatgatcaagttttatcagccagtaatcctacagtttttaatttctacaattatctaagaacacatcctcttttgctgagacgtcattttggatcatctgatacattttccacacatatgagcctaacaggaaaaagtggactggcaggaacaattaatttaagtgaaagacgtttattttttaccactgccagtgctcatttaaaagctggctgcccaatgttggctttggaagtattatcaaagatgcctaaagtcatcaagaaaacaagacctttttatagggcttctagttttctggatactagtaaagactgttctccttcttctccattaaagttggatgcaagggaagataagtcttctgctgttgattggtcacagtcactgataaatggttttggatcttcttcagagggttcctcagagaagcaatcaaactccactctttcttttgactggagccaaccaagtgttgtgtttcaggatgactctttagagttaaaatgggacagtgataatgatgaagaaaatgaggatgtccctatttcaatgaaagaactaaaacctttacagagaaaaacagataaaaagttggatgacataagttctaactacacagaatctttcagcacactagatgaaaatgaccttttaaatccatcagaagatataattgcagttcagttaaaatttagagcatgtttaaagattctcacagtagaacttcgtactttatctactggctatgaaatagatggtggaaaattgcgttaccaactataccactggcttgaaaaagaggtgatagctcttcagaggacttgtgacttttgctcagatgctgaagaactacagtctgcatttggcagaaatgaagatgaatttggattaaatgaggatgctgaagatttgcctcaccaaacaaaagtgaaacaactgagagaaaattttcaggaaaaaagacagtggctcttgaagtatcagtcacttttgagaatgtttcttagttactgcatacttcatggatcccatggtgggggtcttgcatctgtaagaatggaattgattttgcttttgcaagaatctcagcaggaaacatcagaaccactattttctagccttctgtcagagcaaacctcagtgcctctcctctttgcttgtacagccaatgccaaaacagtagttgccaatccattattgcaccttagtaatctgacacatgatattctccatgccataataaactttgattcaccaccccaccctgatatccaaagcaataaagtgtatgtaatgcatactttagcagcttcactttctgcttgtatttatcagtgcctttgtggtagtcataactacagttcatttcagacgaatcagtttactggaatggtatatcagacagtactgcttcctcatcgaccttctttgaaaacaggaagcttagatgaagcattaactcccaatacgtcaccagctcaatggccaggaataacttgtctaattcgacttttgaattcttctggcgaggaagcccagtcagggcttacagtcttgctctgtgagattctcacagcagtgtatcttagtctcttcatccatggcctggccacacattcaagtaatgagctatttcggattgtggcccatcctctaaatgagaaaatgtggtctgctgtgtttggtggaggtgcacatgttcctagcaaagaacagacacattcaaaaactttacctgtttcttcactagttgaagaaggagaaaaacagaacaaacgttttaggccgtcaaaaatgtcttgcagagaatctgccccactgaccccttcctcggcaccagtaagccaggagtcactggcggttaaagaaaagttcatcccacctgagctcagtatctgggactatttcatagctaagccttttctaccctcttctcaaagtagagccgaatatgattcagaggagagtctgggaagtgatgatgatgacaatgatgatgatgatgatgttttagcatcagatttccatctccaggaacattctaattcaaattcatatagttggtccttgatgcggttggcgatggtgcaattggtgctcaacaatttgaagactttttatcccttcgcaggtcatgatcttgcagagcttccagttagttcacctctttgtcatgcggttctaaaaactcttcaatgttgggaacaagttcttctccgacgacttgaaatccatggtgggccacctcaaaattatatcgcaagtcataccgccgaagagagtttgtctgcaggtcctgcaattcttcgccacaaagctttactggaacctacaaacactcctttcaaatccaaacaccatctggcactgtctgtgaagaggctttggcagtatttggtgaagcaggaagaaattcaggaaacctttatcaaaaatatattcacaaagaaacggtgtctaaatgagatagaagcagatttgggatatcctggaggtaaagcaagaattattcataaggaatctgatatcattactgcgtttgctgttaataaggcaaatagaaactgcatagcaatcgcttccagtcatgatgttcaagaactggatgtttctggaattctggccacacaggtctacacttgggtagatgatgatatagaagtggaaaccaaaggatcagaagatttcttggttatacatgctcgtgatgatttaacagctgttcaaggtacaactccatatacacatagcaatcctggcactccaatcaacatgccatggcttggtagtacacagactggcagaggagcatctgtgatgattaagaaagccattaataatgttagaagaatgacttctcatccaactcttccttactatctgacaggagctcaagatggaagtgtcagaatgtttgaatggggccattctcaacaaataacctgttttcgatctggtggcaattcaagagttacaagaatgagatttaactatcagggaaataagtttggaatagttgatgctgatggatatttaagtttgtatcaaacaaactggaaatgttgtccagttactggaagcatgcctaagccatacctgacttggcagtgtcataacaaaacagccaatgattttgtcttcgttagttcctcctctctgatagctacagctggtctttcaactgacaatagaaacgtatgtttgtgggatactcttgtagcacctgccaatagtttagtccatgcatttacctgccatgacagtggagccacagttttagcatatgctccaaaacatcagctactaatatcaggtggcagaaaaggttttacatatgtatttgacctttgtcaacgacaacagaggcagcttttccagagccatgattctcctgttaaagccgttgctgttgatccaactgaagagtactttgttacaggatctgccgaaggcaatataaagatttggagtctctctacctttggtcttctccatacttttgtcagtgaacatgctcggcagtccatttttagaaatattggaactggagtgatgcaaattgagacagggcctgcaaatcacattttctcctgtggagctgatggaacaatgaaaatgagaatactgccagatcagtttagccctttaaatgaagtgttgaaaaatgatgtgaaatttatgctataacatttttacaataagatgtacaatttattacctatatggaagtggccaacagatataatatacagtgatcattctctatgccacaaattagctaatgctttcttgtttttatatttattttatggagctttgcccttgatgcactgatgccttaaaaattaacaaggtcattcagaagtagattacattgcctaaagtagaatgtgtaagtaatgctgtaataatacatatcatagtatattataatcagtatgtcatagtgttaaaggtgttttgttttcttaattgatacttttccacaggcatctctgcatgaatttcttccacagtaaaaatacgttttttgtaaaggcaattgtacataatactcatcacttaattcaccacactctcacttcctttattagccttatacatctcaaactcttctcttaattaatgataggtatttgagtaagaatgaaaaaaataatgaacatcttcattaaaattgtcattgagacgtcagtgataaatgagctagatggctcaatatgtaaggttttcagtagtttaccctccggaacccaagttatatgtatgtatacgtgtgtgtgtgtgtgtgtgtgtgtatcttacacatcttatttgaacttagttgtatatattagcgaaaactggtttttcatgtgtttttgtgccataacaactattgccaccagaataacttttttttgcaactgtgcttttcatttttaaaaaatttttgaattcccatcctaattttcaaataagtttcaaggagactatcaggattattattttaaagattagatttagtcaaataagtcttagcaggcaataaagtttctgtggtggcatatatcatgtaagacacttaaagtaagtttgtgaatttgtcaactttcgagcatcaaacaaatattttacttaaattttattttatcttatttttaggtgcttttaatctcaaaattctgaaaagcgaatagcagtgttttcagaaacaaatgtgaaagcagtcaaattaagtagatactatttagaaatgtaaaatactctccagatctaccattaatagaaaataaactaaaccttatattttatttttgccaaaatattttattataaaatatgaccaaaatatttaaaatgcacaatgcttttaacttaaatgtgctaaccctgtttctgtctgttttgtgctgtaccttttctgattcagaattatagaaaacttgataaatacttgattttaaccaatgagactacaggcagatgggactaagtgtttatgggacaattatgtactatttaacttaaatatattttgtttaataggaaatatataataatagcattttatgtaataaaatatgggcaacgattatcttggaaattaaagagtcaaagcaaagaaatgaagggctggtaaaatgaattttgtaatatcctcaggatacttttatcttaaaagtatgttgttaaagattttgtaaattgtatttcaacaattttaaatgtgttgagcaagttgcagtgcaaacactgtcattatgtagagagtttatatgcacataataacctgtacctataaatcgtgcaataaccatatgcgactattttgccatggagaaatctgacagcattgcaaacaatagtattgtttgatgtagttaaccttaagttatttttcagtaatttcttcacaaatcaagattcaaacagctttaaacacttccaatgagataaaatatttactattatgcttattagaacaaaaggtgtttaaggatgaactaaatattttaattgagcatttatatggataatcatacattatgtaagcccatatgtatttacatccagagtcataatattttaaataaacaatcatgcagaaacttt

SEQ ID NO: 11583 - DNA, 1652 bp, Homo sapiens
aaaaggggcgggaggccaggctcgtgccgttttgcagacgccaccgccgaggaaaaccgtgtactattagccatggtcaaccccaccgtgttcttcgacattgccgtcgacggcgagcccttgggccgcgtctcctttgagctgtttgcagacaaggtcccaaagacagcagaaaattttcgtgctctgagcactggagagaaaggatttggttataagggttcctgctttcacagaattattccagggtttatgtgtcagggtggtgacttcacacgccataatggcactggtggcaagtccatctatggggagaaatttgaagatgagaacttcatcctaaagcatacgggtcctggcatcttgtccatggcaaatgctggacccaacacaaatggttcccagtttttcatctgcactgccaagactgagtggttggatggcaagcatgtggtgtttggcaaagtgaaagaaggcatgaatattgtggaggccatggagcgctttgggtccaggaatggcaagaccagcaagaagatcaccattgctgactgtggacaactcgaataagtttgacttgtgttttatcttaaccaccagatcattccttctgtagctcaggagagcacccctccaccccatttgctcgcagtatcctagaatctttgtgctctcgctgcagttccctttgggttccatgttttccttgttccctcccatgcctagctggattgcagagttaagtttatgattatgaaataaaaactaaataacaattgtcctcgtttgagttaagagtgttgatgtaggctttattttaagcagtaatgggttacttctgaaacatcacttgtttgcttaattctacacagtacttagattttttttactttccagtcccaggaagtgtcaatgtttgttgagtggaatattgaaaatgtaggcagcaactgggcatggtggctcactgtctgtaatgtattacctgaggcagaagaccacctgagggtaggagtcaagatcagcctgggcaacatagtgagacgctgtctctacaaaaaataattagcctggcctggtggtgcatgcctagtcctagctgatctggaggctgacgtgggaggattgcttgagcctagagtgagctattatcatgccactgtacagcctgggtgttcacagatcttgtgtctcaaaggtaggcagaggcaggaaaagcaaggagccagaattaagaggttgggtcagtctgcagtgagttcatgcatttagaggtgttcttcaagatgactaatgtcaaaaattgagacatctgttgcggttttttttttttttttttcccctggaatgcagtggcgtgatctcagctcactgcagcctccgcctcctgggttcaagtgattctagtgcctcagcctcctgagtagctgggataacgggcgtgtgccaccatgcccagctaatttttgtatttttagtatagatggggtttcatcattttgaccaggctggtctcaaactcttgacctcagctgatgcgcctgccttggcctcccaaactgctgagattacagatgtgagccaccgcaccctacctcattttctgtaacaaagctaagcttgaacactgttgatgttcttgagggaagcat

SEQ ID NO: 11584 - DNA, 646 bp, Homo sapiens
atggtcaaccccaccgtgttcttccacatctctgtcgacggtgagtccttgggccgcatctcttttgagctgtttgcagacaagtttccaaagacagcagaaaacttttgtgctctgaatactggagagaaaggatttggttacaagggttgctgctttcacagaattattccagggtttatgtgtcatggtggtgacttcacacaccataatggcactggtggcaagtcaatctacggggagaaagttgatgatgacaacttcatcctgaagcatacaggtcctggcatattgtccatggcaaatgctggacccaacacaaatggttcccagtttttcatctgcactgccaagtctgagtggttggatagcaagcatgtggtcattggcaaggtgaaagaaggcatgaatattgtggaggccatggagcactttgggtccaggaatggcaagaccagcaagaaggtcaccattcctgactttggacaactcgaataagtttgacttgtgttttatcttaaccactggaccattccttctgcagctcaggagagcagccctccaccccatctgctcgcagtattctagaatctttgtgctctcgctgcagttccctttgggttccatgttttccttgttcccttcc

SEQ ID NO: 11585 - DNA, 4952 bp, Homo sapiens
gcacattctttcaagtgacagctatagcctgtcccaggggctgctgtccacagcttggggctgaagactcccaggccattaaccccttagcttttaggaagattactccccctttttcaaggccccatccacctccctcccttgactcccaggacgggaagttggccatgttcccaggagggaggccggaggcccatggatgggggtggagtatgtgttgggaggggggacctcctgtccagtcctcaggccctgggacagctgctgaggaaggagagcagacccaggagagccatgaagcctaggaaagctgagcctcatagcttccgggagaaggttttccggaagaaacctccagtctgtgcagtatgtaaggtgaccatcgatgggacaggcgtttcgtgcagagtctgcaaggtggcgacgcacagaaaatgtgaagcaaaggtgacttcagcctgtcaggccttgcctcccgtggagttgcggcgaaacacggccccagtcaggcgcatagagcacctgggatccaccaaatctctgaaccactcaaagcagcgcagcactctgcccaggagcttcagcctggacccgctcatggagcggcgctgggacttagacctcacctacgtgacggagcgcatcttggccgccgccttccccgcgcggcccgatgaacagcggcaccggggccacctgcgcgagctggcccatgtgctgcaatccaagcaccgggacaagtacctgctcttcaacctttcagagaaaaggcatgacctgacccgcttaaaccccaaggttcaagacttcggctggcctgagctgcatgctccacccctggacaagctgtgctccatctgcaaagccatggagacatggctcagtgctgacccacagcacgtggtcgtactatactgcaagggaaacaagggcaagcttggggtcatcgtttctgcctacatgcactacagcaagatctctgcaggggcggaccaggcactggccactcttaccatgcggaaattctgcgaggacaaggtggccacagaactgcagccctcccagcgtcgatatatcagctacttcagtgggctgctatctggctccatcagaatgaacagcagccctctcttcctgcactatgtgctcatccccatgctgccagcctttgaacctggcacaggcttccagcccttccttaaaatctaccagtccatgcagcttgtctacacatctggagtctatcacattgcaggccctggtccccagcagctttgcatcagcctggagccagccctcctcctcaaaggcgatgtcatggtaacatgttatcacaagggtggccggggcacagaccggaccctcgtgttccgagtccagttccacacctgcaccatccacggaccacagctcactttccccaaggaccagcttgacgaggcctggactgatgagaggttccccttccaagcctccgtggagtttgtcttctcctccagccccgagaagatcaaaggcagcactccacggaacgacccctcggtctctgtcgactacaacaccactgagccagccgtgcgctgggactcctatgagaacttcaaccagcaccacgaggacagtgtggatggctccttgacccacacccggggtcccctggatggcagtccttatgcccaggtgcagcggcctccccggcagacccccccggcaccctctccagagcctccaccaccccccatgctctctgtcagcagcgactcaggccattcctccacgctgaccacagagccggctgctgagtcccctggccggccgccccctacagctgctgaacggcaggagctggatcgcctcctaggaggctgcggagtggccagtgggggccggggagctgggcgcgagacggccatcctagatgacgaagagcagcccactgtgggcggaggcccccacctcggagtgtatccaggccataggcctggcctcagccgccactgctcctgccgccagggctaccgggagccctgcggggttcccaatgggggctactaccggccagagggaaccctggagaggaggcgactggcctacgggggctatgagggatccccccagggctacgccgaggcctcgatggagaagaggcgcctctgccgatcgctgtcagaggggctatacccctacccacctgagatggggaaaccagccactggggactttggctaccgcgccccaggctaccgggaggtggtcatcctggaggaccctgggctgcctgccctatacccatgcccagcctgcgaggagaagctggcgctgcctacagcagccttgtatggactgcggctggagagggaggctggagaagggtgggcaagtgaggctggcaagcctctcctgcacccagtgcggcctgggcacccgctgcctctgctcttgcctgcctgtgggcatcaccatgccccgatgcctgactacagctgcctgaagccacccaaggcaggcgaggaagggcacgagggctgctcctacaccatgtgccccgaaggcaggtatgggcatccagggtaccctgccctggtgacatacagctatggaggagcagttcccagttactgcccagcatatggccgtgtgcctcatagctgtggctctccaggagagggcagagggtatcccagccctggtgcccactccccacgggctggctccatttccccgggcagcccgccctatccacaatctaggaagctgagctacgagatccctacggaggagggaggggacaggtacccattgcctgggcacctggcctcagcaggacctttggcatctgcagagtcgctggagccggtgtcctggagggagggccccagtgggcacagcacactgcctcggtctccccgagatgccccatgcagtgcttcgtcagagttgtctggtccctccacgcccctgcacaccagcagtccagtccagggcaaggaaagcacccggcgacaggacaccaggtcccccacctcagcgcccactcagagactgagtcctggcgaggccttgccccctgtttcccaggcaggcaccggaaaggcccctgagctgccgtcgggaagtgggcctgagcctctggcccctagcccagtctctccgaccttccctcccagctcgcccagtgactggcctcaggaaaggagtccagggggccactcagatggcgccagtcctcggagccctgtgcccaccacacttcctggcctccgccacgccccctggcaaggccctcgaggcccccccgacagcccagatgggtctcccctcactcctgtgccttcccagatgccctggcttgtggccagcccagagccgcctcagagctcacctacacctgctttccccctggctgcctcctatgacaccaatggccttagccagcccccacttcctgagaaacgccacctgcccgggccggggcaacagccaggaccctggggcccagagcaggcatcatcgccagccagaggcatcagtcaccatgtcaccttcgcacctctgctctcagataatgtcccccaaaccccagagcctcctacacaagagagccaaagcaatgtcaagtttgtccaggatacatccaagttctggtacaagccacacctgtcccgtgaccaagccattgccctgctgaaggacaaggaccctggggccttcctgatcagggacagtcattcattccaaggagcttatgggctggccctcaaggtggccacaccgccacccagtgcccagccctggaaaggggaccccgtggaacagctggtccgccatttcctcatcgagactgggcccaaaggggtgaagatcaagggctgccccagtgagccctactttggcagcctgtccgccttggtctcccagcactccatctcccccatctccctgccctgctgcctgcgcattcccagcaaagatcctctggaagagaccccagaggctccagtgcccaccaacatgagcacagcggcagacctcctgcgtcagggtgctgcctgcagcgtgctctacttgacctcagtggagacagagtcactgacgggcccccaagctgtggcccgggccagctctgcagctctgagctgtagcccccgcccgacaccagctgttgtccacttcaaggtgtcagcccagggcattacactgacggacaaccaaaggaagctcttctttcgccgccattatccagtgaacagcatcaccttctccagcactgaccctcaagaccggagatggaccaacccagacgggaccacctccaagatctttggtttcgtggccaagaagccgggaagcccctgggagaatgtgtgtcacctctttgcagagcttgacccagatcagcctgctggcgccattgtcaccttcatcaccaaagttctactgggccagagaaaatgaaggaaggccacaagctcagagcccacatcaacactgcccccctcccagcaccccacagccctcacatcccctggcctggacccaggagacccaggagaaagcaccctcccttaggaatgaggagtgggcatcaggcctgggacactgctctccttccccgcccccagcctgctaagttaagtggacaggcccacaagatgaccttgcatgtgagcagatggcagagatgggtgtgtgaggggtgaggaggcatcagcagttgagccccgaaggagatcaggcagccccacctgcaggagaacgtcagccctccaggggatcagcccctgccagttccacccagctgcaggtgccagcacggcagggatgggagaggggtggggagcgagtcactgcctcctctgagcagagattcagagtaggatcacatgaataggggaaaaaagagagtctatttttgtctaataataaagaatttctataaactttagccgaaa

SEQ ID NO: 11586 - DNA, 4690 bp, Homo sapiens
gctggccgtctgcgcaccctctctcccctcggctctttcctaggaaagctgagcctcatagcttccgggagaaggttttccggaagaaacctccagtctgtgcagtatgtaaggtgaccatcgatgggacaggcgtttcgtgcagagtctgcaaggtggcgacgcacagaaaatgtgaagcaaaggtgacttcagcctgtcaggccttgcctcccgtggagttgcggcgaaacacggccccagtcaggcgcatagagcacctgggatccaccaaatctctgaaccactcaaagcagcgcagcactctgcccaggagcttcagcctggacccgctcatggagcggcgctgggacttagacctcacctacgtgacggagcgcatcttggccgccgccttccccgcgcggcccgatgaacagcggcaccggggccacctgcgcgagctggcccatgtgctgcaatccaagcaccgggacaagtacctgctcttcaacctttcagagaaaaggcatgacctgacccgcttaaaccccaaggttcaagacttcggctggcctgagctgcatgctccacccctggacaagctgtgctccatctgcaaagccatggagacatggctcagtgctgacccacagcacgtggtcgtactatactgcaagggaaacaagggcaagcttggggtcatcgtttctgcctacatgcactacagcaagatctctgcaggggcggaccaggcactggccactcttaccatgcggaaattctgcgaggacaaggtggccacagaactgcagccctcccagcgtcgatatatcagctacttcagtgggctgctatctggctccatcagaatgaacagcagccctctcttcctgcactatgtgctcatccccatgctgccagcctttgaacctggcacaggcttccagcccttccttaaaatctaccagtccatgcagcttgtctacacatctggagtctatcacattgcaggccctggtccccagcagctttgcatcagcctggagccagccctcctcctcaaaggcgatgtcatggtaacatgttatcacaagggtggccggggcacagaccggaccctcgtgttccgagtccagttccacacctgcaccatccacggaccacagctcactttccccaaggaccagcttgacgaggcctggactgatgagaggttccccttccaagcctccgtggagtttgtcttctcctccagccccgagaagatcaaaggcagcactccacggaacgacccctcggtctctgtcgactacaacaccactgagccagccgtgcgctgggactcctatgagaacttcaaccagcaccacgaggacagtgtggatggctccttgacccacacccggggtcccctggatggcagtccttatgcccaggtgcagcggcctccccggcagacccccccggcaccctctccagagcctccaccaccccccatgctctctgtcagcagcgactcaggccattcctccacgctgaccacagagccggctgctgagtcccctggccggccgccccctacagctgctgaacggcaggagctggatcgcctcctaggaggctgcggagtggccagtgggggccggggagctgggcgcgagacggccatcctagatgacgaagagcagcccactgtgggcggaggcccccacctcggagtgtatccaggccataggcctggcctcagccgccactgctcctgccgccagggctaccgggagccctgcggggttcccaatgggggctactaccggccagagggaaccctggagaggaggcgactggcctacgggggctatgagggatccccccagggctacgccgaggcctcgatggagaagaggcgcctctgccgatcgctgtcagaggggctatacccctacccacctgagatggggaaaccagccactggggactttggctaccgcgccccaggctaccgggaggtggtcatcctggaggaccctgggctgcctgccctatacccatgcccagcctgcgaggagaagctggcgctgcctacagcagccttgtatggactgcggctggagagggaggctggagaagggtgggcaagtgaggctggcaagcctctcctgcacccagtgcggcctgggcacccgctgcctctgctcttgcctgcctgtgggcatcaccatgccccgatgcctgactacagctgcctgaagccacccaaggcaggcgaggaagggcacgagggctgctcctacaccatgtgccccgaaggcaggtatgggcatccagggtaccctgccctggtgacatacagctatggaggagcagttcccagttactgcccagcatatggccgtgtgcctcatagctgtggctctccaggagagggcagagggtatcccagccctggtgcccactccccacgggctggctccatttccccgggcagcccgccctatccacaatctaggaagctgagctacgagatccctacggaggagggaggggacaggtacccattgcctgggcacctggcctcagcaggacctttggcatctgcagagtcgctggagccggtgtcctggagggagggccccagtgggcacagcacactgcctcggtctccccgagatgccccatgcagtgcttcgtcagagttgtctggtccctccacgcccctgcacaccagcagtccagtccagggcaaggaaagcacccggcgacaggacaccaggtcccccacctcagcgcccactcagagactgagtcctggcgaggccttgccccctgtttcccaggcaggcaccggaaaggcccctgagctgccgtcgggaagtgggcctgagcctctggcccctagcccagtctctccgaccttccctcccagctcgcccagtgactggcctcaggaaaggagtccagggggccactcagatggcgccagtcctcggagccctgtgcccaccacacttcctggcctccgccacgccccctggcaaggccctcgaggcccccccgacagcccagatgggtctcccctcactcctgtgccttcccagatgccctggcttgtggccagcccagagccgcctcagagctcacctacacctgctttccccctggctgcctcctatgacaccaatggccttagccagcccccacttcctgagaaacgccacctgcccgggccggggcaacagccaggaccctggggcccagagcaggcatcatcgccagccagaggcatcagtcaccatgtcaccttcgcacctctgctctcagataatgtcccccaaaccccagagcctcctacacaagagagccaaagcaatgtcaagtttgtccaggatacatccaagttctggtacaagccacacctgtcccgtgaccaagccattgccctgctgaaggacaaggaccctggggccttcctgatcagggacagtcattcattccaaggagcttatgggctggccctcaaggtggccacaccgccacccagtgcccagccctggaaaggggaccccgtggaacagctggtccgccatttcctcatcgagactgggcccaaaggggtgaagatcaagggctgccccagtgagccctactttggcagcctgtccgccttggtctcccagcactccatctcccccatctccctgccctgctgcctgcgcattcccagcaaagatcctctggaagagaccccagaggctccagtgcccaccaacatgagcacagcggcagacctcctgcgtcagggtgctgcctgcagcgtgctctacttgacctcagtggagacagagtcactgacgggcccccaagctgtggcccgggccagctctgcagctctgagctgtagcccccgcccgacaccagctgttgtccacttcaaggtgtcagcccagggcattacactgacggacaaccaaaggaagctcttctttcgccgccattatccagtgaacagcatcaccttctccagcactgaccctcaagaccggagatggaccaacccagacgggaccacctccaagatctttggtttcgtggccaagaagccgggaagcccctgggagaatgtgtgtcacctctttgcagagcttgacccagatcagcctgctggcgccattgtcaccttcatcaccaaagttctactgggccagagaaaatgaaggaaggccacaagctcagagcccacatcaacactgcccccctcccagcaccccacagccctcacatcccctggcctggacccaggagacccaggagaaagcaccctcccttaggaatgaggagtgggcatcaggcctgggacactgctctccttccccgcccccagcctgctaagttaagtggacaggcccacaagatgaccttgcatgtgagcagatggcagagatgggtgtgtgaggggtgaggaggcatcagcagttgagccccgaaggagatcaggcagccccacctgcaggagaacgtcagccctccaggggatcagcccctgccagttccacccagctgcaggtgccagcacggcagggatgggagaggggtggggagcgagtcactgcctcctctgagcagagattcagagtaggatcacatgaataggggaaaaaagagagtctatttttgtctaataataaagaatttctataaactttagccgaaa

SEQ ID NO: 11587 - DNA, 4862 bp, Homo sapiens
tcctcacaccagccagacagcctaccctccgcccaggggaagcggctgcctccgccaggccgcttccaggaagccccgggccaggccccagcattgttcaggccctggggccagcaccccagccagccgaacaccatgaagtccagcggccctgtggagaggctgctcagagccctggggaggagggacagcagccgggccgcaagcaggcctaggaaagctgagcctcatagcttccgggagaaggttttccggaagaaacctccagtctgtgcagtatgtaaggtgaccatcgatgggacaggcgtttcgtgcagagtctgcaaggtggcgacgcacagaaaatgtgaagcaaaggtgacttcagcctgtcaggccttgcctcccgtggagttgcggcgaaacacggccccagtcaggcgcatagagcacctgggatccaccaaatctctgaaccactcaaagcagcgcagcactctgcccaggagcttcagcctggacccgctcatggagcggcgctgggacttagacctcacctacgtgacggagcgcatcttggccgccgccttccccgcgcggcccgatgaacagcggcaccggggccacctgcgcgagctggcccatgtgctgcaatccaagcaccgggacaagtacctgctcttcaacctttcagagaaaaggcatgacctgacccgcttaaaccccaaggttcaagacttcggctggcctgagctgcatgctccacccctggacaagctgtgctccatctgcaaagccatggagacatggctcagtgctgacccacagcacgtggtcgtactatactgcaagggaaacaagggcaagcttggggtcatcgtttctgcctacatgcactacagcaagatctctgcaggggcggaccaggcactggccactcttaccatgcggaaattctgcgaggacaaggtggccacagaactgcagccctcccagcgtcgatatatcagctacttcagtgggctgctatctggctccatcagaatgaacagcagccctctcttcctgcactatgtgctcatccccatgctgccagcctttgaacctggcacaggcttccagcccttccttaaaatctaccagtccatgcagcttgtctacacatctggagtctatcacattgcaggccctggtccccagcagctttgcatcagcctggagccagccctcctcctcaaaggcgatgtcatggtaacatgttatcacaagggtggccggggcacagaccggaccctcgtgttccgagtccagttccacacctgcaccatccacggaccacagctcactttccccaaggaccagcttgacgaggcctggactgatgagaggttccccttccaagcctccgtggagtttgtcttctcctccagccccgagaagatcaaaggcagcactccacggaacgacccctcggtctctgtcgactacaacaccactgagccagccgtgcgctgggactcctatgagaacttcaaccagcaccacgaggacagtgtggatggctccttgacccacacccggggtcccctggatggcagtccttatgcccaggtgcagcggcctccccggcagacccccccggcaccctctccagagcctccaccaccccccatgctctctgtcagcagcgactcaggccattcctccacgctgaccacagagccggctgctgagtcccctggccggccgccccctacagctgctgaacggcaggagctggatcgcctcctaggaggctgcggagtggccagtgggggccggggagctgggcgcgagacggccatcctagatgacgaagagcagcccactgtgggcggaggcccccacctcggagtgtatccaggccataggcctggcctcagccgccactgctcctgccgccagggctaccgggagccctgcggggttcccaatgggggctactaccggccagagggaaccctggagaggaggcgactggcctacgggggctatgagggatccccccagggctacgccgaggcctcgatggagaagaggcgcctctgccgatcgctgtcagaggggctatacccctacccacctgagatggggaaaccagccactggggactttggctaccgcgccccaggctaccgggaggtggtcatcctggaggaccctgggctgcctgccctatacccatgcccagcctgcgaggagaagctggcgctgcctacagcagccttgtatggactgcggctggagagggaggctggagaagggtgggcaagtgaggctggcaagcctctcctgcacccagtgcggcctgggcacccgctgcctctgctcttgcctgcctgtgggcatcaccatgccccgatgcctgactacagctgcctgaagccacccaaggcaggcgaggaagggcacgagggctgctcctacaccatgtgccccgaaggcaggtatgggcatccagggtaccctgccctggtgacatacagctatggaggagcagttcccagttactgcccagcatatggccgtgtgcctcatagctgtggctctccaggagagggcagagggtatcccagccctggtgcccactccccacgggctggctccatttccccgggcagcccgccctatccacaatctaggaagctgagctacgagatccctacggaggagggaggggacaggtacccattgcctgggcacctggcctcagcaggacctttggcatctgcagagtcgctggagccggtgtcctggagggagggccccagtgggcacagcacactgcctcggtctccccgagatgccccatgcagtgcttcgtcagagttgtctggtccctccacgcccctgcacaccagcagtccagtccagggcaaggaaagcacccggcgacaggacaccaggtcccccacctcagcgcccactcagagactgagtcctggcgaggccttgccccctgtttcccaggcaggcaccggaaaggcccctgagctgccgtcgggaagtgggcctgagcctctggcccctagcccagtctctccgaccttccctcccagctcgcccagtgactggcctcaggaaaggagtccagggggccactcagatggcgccagtcctcggagccctgtgcccaccacacttcctggcctccgccacgccccctggcaaggccctcgaggcccccccgacagcccagatgggtctcccctcactcctgtgccttcccagatgccctggcttgtggccagcccagagccgcctcagagctcacctacacctgctttccccctggctgcctcctatgacaccaatggccttagccagcccccacttcctgagaaacgccacctgcccgggccggggcaacagccaggaccctggggcccagagcaggcatcatcgccagccagaggcatcagtcaccatgtcaccttcgcacctctgctctcagataatgtcccccaaaccccagagcctcctacacaagagagccaaagcaatgtcaagtttgtccaggatacatccaagttctggtacaagccacacctgtcccgtgaccaagccattgccctgctgaaggacaaggaccctggggccttcctgatcagggacagtcattcattccaaggagcttatgggctggccctcaaggtggccacaccgccacccagtgcccagccctggaaaggggaccccgtggaacagctggtccgccatttcctcatcgagactgggcccaaaggggtgaagatcaagggctgccccagtgagccctactttggcagcctgtccgccttggtctcccagcactccatctcccccatctccctgccctgctgcctgcgcattcccagcaaagatcctctggaagagaccccagaggctccagtgcccaccaacatgagcacagcggcagacctcctgcgtcagggtgctgcctgcagcgtgctctacttgacctcagtggagacagagtcactgacgggcccccaagctgtggcccgggccagctctgcagctctgagctgtagcccccgcccgacaccagctgttgtccacttcaaggtgtcagcccagggcattacactgacggacaaccaaaggaagctcttctttcgccgccattatccagtgaacagcatcaccttctccagcactgaccctcaagaccggagatggaccaacccagacgggaccacctccaagatctttggtttcgtggccaagaagccgggaagcccctgggagaatgtgtgtcacctctttgcagagcttgacccagatcagcctgctggcgccattgtcaccttcatcaccaaagttctactgggccagagaaaatgaaggaaggccacaagctcagagcccacatcaacactgcccccctcccagcaccccacagccctcacatcccctggcctggacccaggagacccaggagaaagcaccctcccttaggaatgaggagtgggcatcaggcctgggacactgctctccttccccgcccccagcctgctaagttaagtggacaggcccacaagatgaccttgcatgtgagcagatggcagagatgggtgtgtgaggggtgaggaggcatcagcagttgagccccgaaggagatcaggcagccccacctgcaggagaacgtcagccctccaggggatcagcccctgccagttccacccagctgcaggtgccagcacggcagggatgggagaggggtggggagcgagtcactgcctcctctgagcagagattcagagtaggatcacatgaataggggaaaaaagagagtctatttttgtctaataataaagaatttctataaactttagccgaaa

SEQ ID NO: 11588 - DNA, 1442 bp, Homo sapiens
gggcggcggcggctccagcaccatgtccctgcagtacggggcggaggagacgcccctcgccggcagttacggcgcggccgattcgtttccaaaggacttcggctacggcgtggaggaggaggaagaggaggcggcggcggcgggcggaggggttggggcaggggcaggcggtggctgtggtccggggggcgctgacagctccaagccgaggattctgctcatgggactccggcgcagcggcaagtcctccatccagaaggtggtgtttcataagatgtcacccaacgagaccctctttttggaaagtaccaacaagatttataaggatgacatttccaatagctcctttgtgaatttccagatatgggattttcctgggcaaatggacttttttgacccaacctttgactatgagatgatcttcaggggaacaggagcattgatatacgtcattgacgcacaggatgactacatggaggctttaacaagacttcacattactgtttctaaagcctacaaagttaacccagacatgaattttgaggtttttattcacaaagttgatggtctgtctgatgatcacaaaatagaaacacagagggacattcatcaaagggccaatgatgaccttgcagatgctgggctagaaaaactccatcttagcttttatctgactagtatctatgaccattcaatatttgaagcctttagtaaggtggtgcagaaactcattccacaactgccgaccttggaaaacctattaaatatctttatatcaaattcaggtattgaaaaagcttttctctttgatgttgtcagcaaaatctacattgcaacagacagttcccctgtggatatgcaatcttatgaactttgctgtgacatgatcgatgttgtaattgatgtgtcttgtatatatgggttaaaggaagatggaagtggaagtgcttatgacaaagaatctatggcaattatcaagctgaataatacaactgtcctttatttaaaggaggtgactaaatttttggcactggtctgcattctaagggaagaaagctttgaaagaaaaggtttaatagactacaacttccactgtttccgaaaagctattcatgaggtttttgaggtgggtgtgacttctcacaggagctgtggtcaccagactagtgcctccagtctgaaagcgctgacacacaatggcacgccacgaaacgccatctagtctgaatcccagcgtcggggctctgtgccagcttactcttcactccagggtcggatgccacgtgctacaggacatgggagctgctgcttgtgggaatctggtgcctgttccactagagacaaggggtagagtttctcatttggatgaaaaccccttcaactggtggtgtacaactgaagctactatatcttttttgaaaatggcaaaaaaaaaaaaaaaa

SEQ ID NO: 11589 - DNA, 3071 bp, Homo sapiens
gtcctaatagccacgcccacctcaaatggcgatcccagagagcatctggcttcaattttcctttttccggaggggagatggattccctggaatggaactgggctctggtgtatgagctcagtggagagcaccatgacgaagagtggtcagtgaagacttaccaggaagtagctcagaagtttgtggaaactcaccctgagtttattggaatcaaaatcatttattcggatcacagatccaaagatgtggctgtcatcgcagaatccatccgaatggccatggggctccgaatcaagttccccacggtggtggcagggtttgacctggtggggcatgaggacactggccactccttgcatgactacaaggaagctctgatgatccccgccaaggatggcgttaagctgccttacttcttccacgccggagaaacagactggcagggtacttccatagacaggaacattctggatgctctgatgctgaacactaccagaatcggccatggatttgctttgagcaaacaccccgcagtcaggacttactcctggaaaaaggacatccccatagaagtctgtcccatctctaaccaggtgctgaaactggtgtctgacttgaggaaccaccctgtagccactctgatggccactgggcaccccatggtgatcagctctgatgacccagctatgtttggtgccaaaggcttgtcctatgatttctatgaggtcttcatgggcattggggggatgaaggctgacctgaggaccctcaaacagctggccatgaactctatcaagtacagtaccctgttggagagtgagaaaaatactttcatggaaatctggaagaagagatgggataagttcatagcagatgtggctacaaagtgaggagaagctagccagccctctacaagctgtcttcttgcacacgctgtcacttcctctcactcgttcttgaatcagctccatgtgcccatgaaatcaatggcctctgtatggagcgaccctgtgagaagcacttggctggctgagcaaattcatcctctggaaatattctctctcagccacagtgacattgaccctcttggttttctcctgtctctggccatttcttccagtttccctatttcagagtcttctcctctctctgatctctgtgctgtttcctcaggactcagtcctgggctctcttctattctggtctctttatttttttatttttgtattttttcgagatggagttttgctcttgttgcccaggctggagtacaatggtgcgatctcagctcagtgcaacctccgccacccgggttcaggcaattctcttgcatcagcctcgcgagtagttggaattataggcatgtgccaccacacccagctgatttttgcatttttagtagagacaggttttcaccatgttggcgaggctggtatccaactcttgacctcaggtgatccactcgccccttggctcccaaagtgctggaattacaggcattagccaccatgcctggcctattctggtctctttaactctctcctctttatttctcttctctctctgtacacttttcctgggtggtctcatccattcctttgctttttcataccatttatttgttaatgattcccacatttatttatgcacttggagagctcacaggaatctcagaaactgatgaggtacaattctgaaccctcagtctcttccctttaaacctttctttttctctactttaatttttctaaagagtgtcttgctatgttgcccaggctggtctccaactcaagtgatcctcctgccgcagtctcccgaagtgctgggattactgacatgagccaccacactcagccctttaaacctttccctggcctttcccatagctggtgaaggacacctccatccattccacgcagttgctcaaagcagaaattttcagtgcaagtcttgatgctgcgccgtcccccactccctacatcagaacgcatccctcatctggactccagcggtggcttcttgatgctgcgcggtcccccactccctacatcagaatgcatcccgcatccagactccagcggtggtgctctacctgcacgctgttgccaagtccaagctaccatactcctgcctgagctatgacaacagcctcctcactgatctcccctttcttccctttgcctcctccagctcatttttcacagtgtagaatgacattttgtttgtttgttttgttttgtttgagatggagtctcgctctgttgcccagggtggagtgcagcggtgcgatctcggctcactgcaacctccacctcccgggttcaagcggattctcgtgcctcagcctcctgagtagctgggattacaggcatgcaccaccatgcccggataatttttgtatttttagtagagatggggtttcactatgttggccaggctggtctcgaacacctgacctcgtggtccacccgcctcggcctcccaaagcactgggattacaggcgtgagccacccggcctggcctagaatgacttttaaaagatcaaattaaatcaggtcactcctttgcttacaacgcagtgcgtttagaggtacaccccatgtctccacagggcatacagcatccgatttaatctggatccattccggcgccttcctctcccagtcacccagagggccccaaccccggcggccctttcttcctcaaatgtcctcggctctataccgtgcctgggtcttttctctttctctctgcctggaagattccttctttccccttttgtcttgcccactcctgtttacccttcaagtttcaagttcatgtcactgtctcagagaggttttcctgtgctcgccctgtttctctcaggaagccttgctcttttccatcatgcctctaatcacagcttataatcggatatttatttctgtgtctacagtcttgccctgccagactgtatgccccatgtgggcaggcgctcatgattgtttctgattgtttcacgcatgctgctaacccagagcctgggcccaaagctagttagtactcaataaacaatgcattgaatgag

SEQ ID NO: 11590 - DNA, 3947 bp, Homo sapiens
ttgggaaacccctacctgtctgtacctgtaggtcttttctctggggtctggaagaagaatccttcaatatcttgccttctggtaatctgagagcagggcgagaaaaggaagatcagagttccacccttaaatctgtaggttttcactcccccactctcctttgcagtcccgtggagtctccatctgagccctttcctagtccaggcatcccgatgttggtggatggcccatctgagcggccagccctgtgcttcttgctgttggctgtggcaatgtctttcttcggctcagctctatccatagatgaaacacgggcgcatctgttgttgaaagaaaagatgatgcggctgggggggcggctggtgctgaataccaaggaggagctggccaatgagaggctcatgacgctcaaaatcgctgagatgaaggaggccatgaggaccctgatattcccacccagcatgcactttttccaggccaagcatctcattgagagaagtcaagtgtttaatattctaaggatgatgccaaaaggggctgccttgcacctccatgacattggcatcgtgactatggactggctggtgaggaatgtcacctacaggcctcactgccacatctgtttcaccccaagggggatcatgcagttcagatttgctcacccaactccccgtccatcagaaaaatgttccaagtggattctgctggaggattatcggaagcgggtgcagaacgtcactgagtttgatgacagcttgctgaggaatttcactctggtgacccagcacccggaggtgatttacacaaaccaaaatgttgtctggtcgaaatttgaaaccatcttcttcaccatctctggtctcatccattacgcaccagtgttcagagactatgtcttccggagcatgcaggagttctacgaggacaacgtgctctacatggagatcagagccaggctgctgccggtgtatgagctcagtggagagcaccatgacgaagagtggtcagtgaagacttaccaggaagtagctcagaagtttgtggaaactcaccctgagtttattggaatcaaaatcatttattcggatcacagatccaaagatgtggctgtcatcgcagaatccatccgaatggccatggggctccgaatcaagttccccacggtggtggcagggtttgacctggtggggcatgaggacactggccactccttgcatgactacaaggaagctctgatgatccccgccaaggatggcgttaagctgccttacttcttccacgccggagaaacagactggcagggtacttccatagacaggaacattctggatgctctgatgctgaacactaccagaatcggccatggatttgctttgagcaaacaccccgcagtcaggacttactcctggaaaaaggacatccccatagaagtctgtcccatctctaaccaggtgctgaaactggtgtctgacttgaggaaccaccctgtagccactctgatggccactgggcaccccatggtgatcagctctgatgacccagctatgtttggtgccaaaggcttgtcctatgatttctatgaggtcttcatgggcattggggggatgaaggctgacctgaggaccctcaaacagctggccatgaactctatcaagtacagtaccctgttggagagtgagaaaaatactttcatggaaatctggaagaagagatgggataagttcatagcagatgtggctacaaagtgaggagaagctagccagccctctacaagctgtcttcttgcacacgctgtcacttcctctcactcgttcttgaatcagctccatgtgcccatgaaatcaatggcctctgtatggagcgaccctgtgagaagcacttggctggctgagcaaattcatcctctggaaatattctctctcagccacagtgacattgaccctcttggttttctcctgtctctggccatttcttccagtttccctatttcagagtcttctcctctctctgatctctgtgctgtttcctcaggactcagtcctgggctctcttctattctggtctctttatttttttatttttgtattttttcgagatggagttttgctcttgttgcccaggctggagtacaatggtgcgatctcagctcagtgcaacctccgccacccgggttcaggcaattctcttgcatcagcctcgcgagtagttggaattataggcatgtgccaccacacccagctgatttttgcatttttagtagagacaggttttcaccatgttggcgaggctggtatccaactcttgacctcaggtgatccactcgccccttggctcccaaagtgctggaattacaggcattagccaccatgcctggcctattctggtctctttaactctctcctctttatttctcttctctctctgtacacttttcctgggtggtctcatccattcctttgctttttcataccatttatttgttaatgattcccacatttatttatgcacttggagagctcacaggaatctcagaaactgatgaggtacaattctgaaccctcagtctcttccctttaaacctttctttttctctactttaatttttctaaagagtgtcttgctatgttgcccaggctggtctccaactcaagtgatcctcctgccgcagtctcccgaagtgctgggattactgacatgagccaccacactcagccctttaaacctttccctggcctttcccatagctggtgaaggacacctccatccattccacgcagttgctcaaagcagaaattttcagtgcaagtcttgatgctgcgccgtcccccactccctacatcagaacgcatccctcatctggactccagcggtggcttcttgatgctgcgcggtcccccactccctacatcagaatgcatcccgcatccagactccagcggtggtgctctacctgcacgctgttgccaagtccaagctaccatactcctgcctgagctatgacaacagcctcctcactgatctcccctttcttccctttgcctcctccagctcatttttcacagtgtagaatgacattttgtttgtttgttttgttttgtttgagatggagtctcgctctgttgcccagggtggagtgcagcggtgcgatctcggctcactgcaacctccacctcccgggttcaagcggattctcgtgcctcagcctcctgagtagctgggattacaggcatgcaccaccatgcccggataatttttgtatttttagtagagatggggtttcactatgttggccaggctggtctcgaacacctgacctcgtggtccacccgcctcggcctcccaaagcactgggattacaggcgtgagccacccggcctggcctagaatgacttttaaaagatcaaattaaatcaggtcactcctttgcttacaacgcagtgcgtttagaggtacaccccatgtctccacagggcatacagcatccgatttaatctggatccattccggcgccttcctctcccagtcacccagagggccccaaccccggcggccctttcttcctcaaatgtcctcggctctataccgtgcctgggtcttttctctttctctctgcctggaagattccttctttccccttttgtcttgcccactcctgtttacccttcaagtttcaagttcatgtcactgtctcagagaggttttcctgtgctcgccctgtttctctcaggaagccttgctcttttccatcatgcctctaatcacagcttataatcggatatttatttctgtgtctacagtcttgccctgccagactgtatgccccatgtgggcaggcgctcatgattgtttctgattgtttcacgcatgctgctaacccagagcctgggcccaaagctagttagtactcaataaacaatgcattgaatgcattgaaaaaaaaaaaaaaa

SEQ ID NO: 11591 - DNA, 3370 bp, Homo sapiens
gaactacaattcccagaaggatgtgcggccgaaagcctcgggcggccttttgaggggctcggctagcttcagcgccgtggggtctgacctggctggatatagtgtaccggcccggcaggaggggcggcccggtccgggttgcgcctcctggagccgcccccgggacgtcagtcctggaggaggcgagggttgctccggttgctaagaagactatgaacaagtcagagaacctgctgtttgctggttcatcattagcatcacaagtccatgctgctgccgttaatggagataagggtgctctacagaggctcatcgtaggaaactctgctcttaaagacaaagaagatcagtttgggagaacaccacttatgtattgcgtgttggctgacagattggattgtgcagatgctcttctgaaggcaggagcagatgtgaataaaactgaccatagccagagaacagccctccatcttgcagcccagaagggaaattatcgtttcatgaaactcttacttacacgcagagcaaactggatgcaaaaggatctggaagagatgactcctttgcacttgaccacccggcacaggagccctaagtgtttggcacttctgctgaagtttatggcaccaggagaagtggatacacaggataaaaacaagcaaacagctctgcattggagtgcctactacaataaccctgagcatgtgaagctgctcatcaagcatgattctaacattgggattcctgatgttgaaggcaagatcccacttcactgggcagccaaccataaagatccaagtgctgttcacacagtgagatgcattctggatgctgctccaacagagtctttactgaactggcaagactacgagggtcgaactcctcttcactttgcagttgctgatgggaatgtgaccgtggttgatgtcttgacctcatatgaaagctgcaatataacgtcttatgataacttatttcgaaccccactgcactgggcagctttattaggccatgcacagattgtccatctccttttagaaagaaataagtctggaactatcccatctgacagccaaggagccacacctttgcactatgctgctcagagtaactttgctgaaacggttaaagtgtttttaaaacatccttcagtgaaagatgattcagacctggaaggaagaacatcctttatgtgggcagctggcaaaggcagtgatgatgtccttagaactatgctgagcttaaaatcggacatagatattaacatggctgacaaatatggaggtacagctttgcatgctgctgctctttctggccatgtcagcaccgtgaagttattactggaaaataatgctcaagtagatgctactgatgttatgaaacatactccacttttccgagcctgtgagatgggacacaaagatgtgattcagacactcattaaaggtggagcaagggtagatctagttgaccaagatggacattctcttctacattgggcagcactgggaggaaatgctgatgtttgccagatattaatagaaaataagatcaatccaaatgtccaggattatgcaggaagaacccctttgcagtgtgcagcatatggaggctatatcaactgcatggcagttctcatggaaaacaatgcagaccctaacattcaagacaaagagggaagaacagctttgcattggtcctgcaacaatggataccttgatgccattaaattactgctagactttgctgctttccctaatcagatggaaaacaatgaagagagatacacaccccttgattatgctttgcttggtgagcgccatgaagtgatccagttcatgttggagcacggtgccctgtccatcgcagccatacaagacatcgccgccttcaaaatccaagctgtctacaaagggtacaaggtcagaaaagccttccgagacaggaaaaatctcctcatgaagcatgaacagttgagaaaagatgctgctgccaaaaagcgagaggaagaaaacaaacgaaaagaggcagaacagcaaaaaggaaggcggagcccagattcctgcagaccccaggcccttccctgtctgcctagcacccaggatgtgcccagcaggcagagccgggcccccagcaagcagcctcctgctggcaacgtggcccaaggccctgagccaagagacagcagaggatctccaggagggtctctaggcggagccctccagaaggagcagcatgtttcctcagatttgcagggaacaaactccagaaggccaaatgaaacagccagagaacattctaaaggccaatctgcttgtgtccacttcagacccaatgaaggcagtgatggaagcaggcatccaggagttccctctgttgagaagtccagagagctccgactgcagataattcagagagaacgaaggaggaaggagctgtttcgcaaaaagaacaaggcagcagcagtcatccagcgcgcctggcgaagctaccagctcaggaagcacctgtcccaccttcggcatatgaagcagcttggagctggagatgtggacagatggaggcaagagtctacagcattgctcctccaggtttggaggaaggaactggaactaaaattcccccaaaccactgcagtaagcaaggcccccaagagtccatccaagggcacctcaggcacaaagtccaccaagcactcagtgcttaagcaaatctatggttgttctcacgaagggaaaatacatcatcctacaagatctgtaaaagcctcttctgtgctgcgtctcaactcagtgagcaacctacagtgtatacatctccttgagaacagtggaagatcaaagaacttttcttataacctgcaatcagctactcagccaaaaaacaaaacaaaaccttgactgcctatggaggaagactgtgttcgggggagctggcatagctagtgcagagttcagattttctgctgataatcttttacaccttgggaaaactttaatatccgtacctgaaggctgattcacctaaaaatgtgttaactgaaagaaaatgtcagaatgtttcctttctgctcttacacagcattgttttgtcaatcaacacagcctgcactgaaaggacctgcatagactatgtctgtgcaaagtgcctgagtgtctgctttcacctcagtctgtacagttggaaatgagaattcataattaacagcaaaatctaaggaaaactacggctgctgggttgggatttctgccagctagctggtactggcttcttgtttcaagagatgaacctaaatgagataggaagcctgtcccatagcagccttcctctcactactttcctggcatctaatgcaacaaacttatcacac

SEQ ID NO: 11592 - DNA, 3880 bp, Homo sapiens
gaactacaattcccagaaggatgtgcggccgaaagcctcgggcggccttttgaggggctcggctagcttcagcgccgtggggtctgacctggctggatatagtgtaccggcccggcaggaggggcggcccggtccgggttgcgcctcctggagccgcccccgggacgtcagtcctggaggaggcgagggttgctccggttgctaagaagactatgaacaagtcagagaacctgctgtttgctggttcatcattagcatcacaagtccatgctgctgccgttaatggagataagggtgctctacagaggctcatcgtaggaaactctgctcttaaagacaaagaagatcagtttgggagaacaccacttatgtattgcgtgttggctgacagattggattgtgcagatgctcttctgaaggcaggagcagatgtgaataaaactgaccatagccagagaacagccctccatcttgcagcccagaagggaaattatcgtttcatgaaactcttacttacacgcagagcaaactggatgcaaaaggatctggaagagatgactcctttgcacttgaccacccggcacaggagccctaagtgtttggcacttctgctgaagtttatggcaccaggagaagtggatacacaggataaaaacaagcaaacagctctgcattggagtgcctactacaataaccctgagcatgtgaagctgctcatcaagcatgattctaacattgggattcctgatgttgaaggcaagatcccacttcactgggcagccaaccataaagatccaagtgctgttcacacagtgagatgcattctggatgctgctccaacagagtctttactgaactggcaagactacgagggtcgaactcctcttcactttgcagttgctgatgggaatgtgaccgtggttgatgtcttgacctcatatgaaagctgcaatataacgtcttatgataacttatttcgaaccccactgcactgggcagctttattaggccatgcacagattgtccatctccttttagaaagaaataagtctggaactatcccatctgacagccaaggagccacacctttgcactatgctgctcagagtaactttgctgaaacggttaaagtgtttttaaaacatccttcagtgaaagatgattcagacctggaaggaagaacatcctttatgtgggcagctggcaaaggcagtgatgatgtccttagaactatgctgagcttaaaatcggacatagatattaacatggctgacaaatatggaggtacagctttgcatgctgctgctctttctggccatgtcagcaccgtgaagttattactggaaaataatgctcaagtagatgctactgatgttatgaaacatactccacttttccgagcctgtgagatgggacacaaagatgtgattcagacactcattaaaggtggagcaagggtagatctagttgaccaagatggacattctcttctacattgggcagcactgggaggaaatgctgatgtttgccagatattaatagaaaataagatcaatccaaatgtccaggattatgcaggaagaacccctttgcagtgtgcagcatatggaggctatatcaactgcatggcagttctcatggaaaacaatgcagaccctaacattcaagacaaagagggaagaacagctttgcattggtcctgcaacaatggataccttgatgccattaaattactgctagactttgctgctttccctaatcagatggaaaacaatgaagagagatacacaccccttgattatgctttgcttggtgagcgccatgaagtgatccagttcatgttggagcacggtgccctgtccatcgcagccatacaagacatcgccgccttcaaaatccaagctgtctacaaagggtacaaggtcagaaaagccttccgagacaggaaaaatctcctcatgaagcatgaacagttgagaaaagatgctgctgccaaaaagcgagaggaagaaaacaaacgaaaagaggcagaacagcaaaaaggaaggcggagcccagattcctgcagaccccaggcccttccctgtctgcctagcacccaggatgtgcccagcaggcagagccgggcccccagcaagcagcctcctgctggcaacgtggcccaaggccctgagccaagagacagcagaggatctccaggagggtctctaggcggagccctccagaaggagcagcatgtttcctcagatttgcagggaacaaactccagaaggccaaatgaaacagccagagaacattctaaaggccaatctgcttgtgtccacttcagacccaatgaaggcagtgatggaagcaggcatccaggagttccctctgttgagaagtccagaggtgagacagctggcgatgagcggtgtgcaaaggggaaaggcttcgtgaagcagccctcctgtatcagggtggctgggcctgatgagaaaggagaggactccaggcgggcagctgcaagccttccaccgcacgatagccactggaagcccagcaggcggcatgacacagaacccaaggccaaatgtgccccccagaaaaggcgcactcaagagctcagaggaggaaggtgctctccggctggttctagccgccctggcagtgcccggggggaggcggtccatgctgggcagaatcctccccaccatcgtacaccaagaaacaaagtgacacaagccaagctcacaggagggctctattcacatttgccacagagcacagaggagttgaggtcaggagctaggaggctggagacatctaccctgtccgaggactttcaggtatctaaggagactgatccagcacctggtcccctctctgggcagagtgtgaatattgaccttctccccgtagagctccgactgcagataattcagagagaacgaaggaggaaggagctgtttcgcaaaaagaacaaggcagcagcagtcatccagcgcgcctggcgaagctaccagctcaggaagcacctgtcccaccttcggcatatgaagcagcttggagctggagatgtggacagatggaggcaagagtctacagcattgctcctccaggtttggaggaaggaactggaactaaaattcccccaaaccactgcagtaagcaaggcccccaagagtccatccaagggcacctcaggcacaaagtccaccaagcactcagtgcttaagcaaatctatggttgttctcacgaagggaaaatacatcatcctacaagatctgtaaaagcctcttctgtgctgcgtctcaactcagtgagcaacctacagtgtatacatctccttgagaacagtggaagatcaaagaacttttcttataacctgcaatcagctactcagccaaaaaacaaaacaaaaccttgactgcctatggaggaagactgtgttcgggggagctggcatagctagtgcagagttcagattttctgctgataatcttttacaccttgggaaaactttaatatccgtacctgaaggctgattcacctaaaaatgtgttaactgaaagaaaatgtcagaatgtttcctttctgctcttacacagcattgttttgtcaatcaacacagcctgcactgaaaggacctgcatagactatgtctgtgcaaagtgcctgagtgtctgctttcacctcagtctgtacagttggaaatgagaattcataattaacagcaaaatctaaggaaaactacggctgctgggttgggatttctgccagctagctggtactggcttcttgtttcaagagatgaacctaaatgagataggaagcctgtcccatagcagccttcctctcactactttcctggcatctaatgcaacaaacttatcacac

SEQ ID NO: 11593 - DNA, 1202 bp, Homo sapiens
ccccagccctcagagcaacctcagcccagcccagcccagctccagctccagctccagcccgggccccatcatggccaaggactttcaagatatccagcagctgagctcggaggaaaatgaccatcctttccatcaagggccacctcctgcccagcccctggcacagcgtctctgctccatggtctgcttcagtctgcttgccctgagcttcaacatcctgctgctggtggtcatctgtgtgactgggtcccaaagtgagggtcacagaggtgcacagctgcaagccgagctgcggagcctgaaggaagctttcagcaacttctcctcgagcaccctgacggaggtccaggcaatcagcacccacggaggcagcgtgggtgacaagatcacatccctaggagccaagctggagaaacagcagcaggacctgaaagcagatcacgatgccctgctcttccatctgaagcacttccccgtggacctgcgcttcgtggcctgccagatggagctcctccacagcaacggctcccaaaggacctgctgccccgtcaactgggtggagcaccaaggcagctgctactggttctctcactccgggaaggcctgggctgaggcggagaagtactgccagctggagaacgcacacctggtggtcatcaactcctgggaggagcagaaattcattgtacaacacacgaaccccttcaatacctggataggtctcacggacagtgatggctcttggaaatgggtggatggcacagactataggcacaactacaagaactgggctgtcactcagccagataattggcacgggcacgagctgggtggaagtgaagactgtgttgaagtccagccggatggccgctggaacgatgacttctgcctgcaggtgtaccgctgggtgtgtgagaaaaggcggaatgccaccggcgaggtggcctgaccccagcacacctctggctaacccataccccacacctgcccagctctggcttctctgttgaggattttgaggaaaggaagaaacactgagacaggggtatggggaagagctgagcaaagagagaaaggaggtagtttaagagtccctgaccctggaggactgagatcccacctccttctgtaattcattgtaattattataatcgtcagcctcttcaatggcgtaggaaagaagaaacaaatgcttgaatctc

SEQ ID NO: 11594 - DNA, 1333 bp, Homo sapiens
gcaggccttgcccggaccagcccctcctccactctcctctcccctgtgagctccacctgccccagttctcctggctttaacccctccttggccaaggccagggttgcctgcgggagccaggcgtccgctctccacacctttcacagccccagccctcagagcaacctcagcccagcccagcccagctccagctccagctccagcccgggccccatcatggccaaggactttcaagatatccagcagctgagctcggaggaaaatgaccatcctttccatcaagggccacctcctgcccagcccctggcacagcgtctctgctccatggtctgcttcagtctgcttgccctgagcttcaacatcctgctgctggtggtcatctgtgtgactgggtcccaaagtgcacagctgcaagccgagctgcggagcctgaaggaagctttcagcaacttctcctcgagcaccctgacggaggtccaggcaatcagcacccacggaggcagcgtgggtgacaagatcacatccctaggagccaagctggagaaacagcagcaggacctgaaagcagatcacgatgccctgctcttccatctgaagcacttccccgtggacctgcgcttcgtggcctgccagatggagctcctccacagcaacggctcccaaaggacctgctgccccgtcaactgggtggagcaccaaggcagctgctactggttctctcactccgggaaggcctgggctgaggcggagaagtactgccagctggagaacgcacacctggtggtcatcaactcctgggaggagcagaaattcattgtacaacacacgaaccccttcaatacctggataggtctcacggacagtgatggctcttggaaatgggtggatggcacagactataggcacaactacaagaactgggctgtcactcagccagataattggcacgggcacgagctgggtggaagtgaagactgtgttgaagtccagccggatggccgctggaacgatgacttctgcctgcaggtgtaccgctgggtgtgtgagaaaaggcggaatgccaccggcgaggtggcctgaccccagcacacctctggctaacccataccccacacctgcccagctctggcttctctgttgaggattttgaggaaaggaagaaacactgagacaggggtatggggaagagctgagcaaagagagaaaggaggtagtttaagagtccctgaccctggaggactgagatcccacctccttctgtaattcattgtaattattataatcgtcagcctcttcaatggcgtaggaaagaagaaacaaatgcttgaatctc

SEQ ID NO: 11595 - DNA, 1405 bp, Homo sapiens
gcaggccttgcccggaccagcccctcctccactctcctctcccctgtgagctccacctgccccagttctcctggctttaacccctccttggccaaggccagggttgcctgcgggagccaggcgtccgctctccacacctttcacagccccagccctcagagcaacctcagcccagcccagcccagctccagctccagctccagcccgggccccatcatggccaaggactttcaagatatccagcagctgagctcggaggaaaatgaccatcctttccatcaaggtgaggggccaggcactcgcaggctgaatcccaggagaggaaatccatttttgaaagggccacctcctgcccagcccctggcacagcgtctctgctccatggtctgcttcagtctgcttgccctgagcttcaacatcctgctgctggtggtcatctgtgtgactgggtcccaaagtgagggtcacagaggtgcacagctgcaagccgagctgcggagcctgaaggaagctttcagcaacttctcctcgagcaccctgacggaggtccaggcaatcagcacccacggaggcagcgtgggtgacaagatcacatccctaggagccaagctggagaaacagcagcaggacctgaaagcagatcacgatgccctgctcttccatctgaagcacttccccgtggacctgcgcttcgtggcctgccagatggagctcctccacagcaacggctcccaaaggacctgctgccccgtcaactgggtggagcaccaaggcagctgctactggttctctcactccgggaaggcctgggctgaggcggagaagtactgccagctggagaacgcacacctggtggtcatcaactcctgggaggagcagaaattcattgtacaacacacgaaccccttcaatacctggataggtctcacggacagtgatggctcttggaaatgggtggatggcacagactataggcacaactacaagaactgggctgtcactcagccagataattggcacgggcacgagctgggtggaagtgaagactgtgttgaagtccagccggatggccgctggaacgatgacttctgcctgcaggtgtaccgctgggtgtgtgagaaaaggcggaatgccaccggcgaggtggcctgaccccagcacacctctggctaacccataccccacacctgcccagctctggcttctctgttgaggattttgaggaaaggaagaaacactgagacaggggtatggggaagagctgagcaaagagagaaaggaggtagtttaagagtccctgaccctggaggactgagatcccacctccttctgtaattcattgtaattattataatcgtcagcctcttcaatggcgtaggaaagaagaaacaaatgcttgaatctc

SEQ ID NO: 11596 - DNA, 1493 bp, Homo sapiens
gcaggccttgcccggaccagcccctcctccactctcctctcccctgtgagctccacctgccccagttctcctggctttaacccctccttggccaaggccagggttgcctgcgggagccaggcgtccgctctccacacctttcacagatcctacccaggccaccaccccgaacccctccgaccctgcgttccatcccaccatcaacctccacgtgaatctgcacctctgccccagccccagccctcagagcaacctcagcccagcccagcccagctccagctccagctccagcccgggccccatcatggccaaggactttcaagatatccagcagctgagctcggaggaaaatgaccatcctttccatcaaggtgaggggccaggcactcgcaggctgaatcccaggagaggaaatccatttttgaaagggccacctcctgcccagcccctggcacagcgtctctgctccatggtctgcttcagtctgcttgccctgagcttcaacatcctgctgctggtggtcatctgtgtgactgggtcccaaagtgagggtcacagaggtgcacagctgcaagccgagctgcggagcctgaaggaagctttcagcaacttctcctcgagcaccctgacggaggtccaggcaatcagcacccacggaggcagcgtgggtgacaagatcacatccctaggagccaagctggagaaacagcagcaggacctgaaagcagatcacgatgccctgctcttccatctgaagcacttccccgtggacctgcgcttcgtggcctgccagatggagctcctccacagcaacggctcccaaaggacctgctgccccgtcaactgggtggagcaccaaggcagctgctactggttctctcactccgggaaggcctgggctgaggcggagaagtactgccagctggagaacgcacacctggtggtcatcaactcctgggaggagcagaaattcattgtacaacacacgaaccccttcaatacctggataggtctcacggacagtgatggctcttggaaatgggtggatggcacagactataggcacaactacaagaactgggctgtcactcagccagataattggcacgggcacgagctgggtggaagtgaagactgtgttgaagtccagccggatggccgctggaacgatgacttctgcctgcaggtgtaccgctgggtgtgtgagaaaaggcggaatgccaccggcgaggtggcctgaccccagcacacctctggctaacccataccccacacctgcccagctctggcttctctgttgaggattttgaggaaaggaagaaacactgagacaggggtatggggaagagctgagcaaagagagaaaggaggtagtttaagagtccctgaccctggaggactgagatcccacctccttctgtaattcattgtaattattataatcgtcagcctcttcaatggcgtaggaaagaagaaacaaatgcttgaatctc

SEQ ID NO: 11597 - DNA, 2347 bp, Homo sapiens
attcggagctgcctcctcgccaatgattccagcgcctgacagccaggaccccaggcagcagcgagtgacaggacgtctggaccggcgcgccgctagcagctctgccgggccgcggcggtgatcgatggggagcggctggagcggacccagcgagtgagggcgcacagccgggacgccgaggcggcgggcgggagacccgcaccagcgcagccggccctcggcgggacgtgacgcagcgcccggggcgcgggtttgatatttgacaaattgatctaaaatggctgggtttttatctgaataactcactgatgccatcccagaaagtcggcaccaggtgtatttgatatagtgtttgcaacaaattcgacccaggtgatcaaaatgattctcaactcttctactgaagatggtattaaaagaatccaagatgattgtcccaaagctggaaggcataattacatatttgtcatgattcctactttatacagtatcatctttgtggtgggaatatttggaaacagcttggtggtgatagtcatttacttttatatgaagctgaagactgtggccagtgtttttcttttgaatttagcactggctgacttatgctttttactgactttgccactatgggctgtctacacagctatggaataccgctggccctttggcaattacctatgtaagattgcttcagccagcgtcagtttcaacctgtacgctagtgtgtttctactcacgtgtctcagcattgatcgatacctggctattgttcacccaatgaagtcccgccttcgacgcacaatgcttgtagccaaagtcacctgcatcatcatttggctgctggcaggcttggccagtttgccagctataatccatcgaaatgtatttttcattgagaacaccaatattacagtttgtgctttccattatgagtcccaaaattcaacccttccgatagggctgggcctgaccaaaaatatactgggtttcctgtttccttttctgatcattcttacaagttatactcttatttggaaggccctaaagaaggcttatgaaattcagaagaacaaaccaagaaatgatgatatttttaagataattatggcaattgtgcttttctttttcttttcctggattccccaccaaatattcacttttctggatgtattgattcaactaggcatcatacgtgactgtagaattgcagatattgtggacacggccatgcctatcaccatttgtatagcttattttaacaattgcctgaatcctcttttttatggctttctggggaaaaaatttaaaagatattttctccagcttctaaaatatattcccccaaaagccaaatcccactcaaacctttcaacaaaaatgagcacgctttcctaccgcccctcagataatgtaagctcatccaccaagaagcctgcaccatgttttgaggttgagtgacatgttcgaaacctgtccataaagtaattttgtgaaagaaggagcaagagaacattcctctgcagcacttcactaccaaatgagcattagctacttttcagaattgaaggagaaaatgcattatgtggactgaaccgacttttctaaagctctgaacaaaagcttttctttccttttgcaacaagacaaagcaaagccacattttgcattagacagatgacggctgctcgaagaacaatgtcagaaactcgatgaatgtgttgatttgagaaattttactgacagaaatgcaatctccctagcctgcttttgtcctgttattttttatttccacataaaggtatttagaatatattaaatcgttagaggagcaacaggagatgagagttccagattgttctgtccagtttccaaagggcagtaaagttttcgtgccggttttcagctattagcaactgtgctacacttgcacctggtactgcacattttgtacaaagatatgctaagcagtagtcgtcaagttgcagatctttttgtgaaattcaacctgtgtcttataggtttacactgccaaaacaatgcccgtaagatggcttatttgtataatggtgttactaaagtcacatataaaagttaaactacttgtaaaggtgctgcactggtcccaagtagtagtgtcctcctagtatattagtttgatttaatatctgagaagtgtatatagtttgtggtaaaaagattatatatcataaagtatgccttcctgtttaaaaaaagtatatattctacacatatatatatatgtatatctatatctctaaactgctgttaattgattaaaatctggcaaagttatatttactttaaaataaaataattttattgc

SEQ ID NO: 11598 - DNA, 2321 bp, Homo sapiens
attcggagctgcctcctcgccaatgattccagcgcctgacagccaggaccccaggcagcagcgagtgacaggacgtctggaccggcgcgccgctagcagctctgccgggccgcggcggtgatcgatggggagcggctggagcggacccagcgagtgagggcgcacagccgggacgccgaggcggcgggcgggagacccgcaccagcgcagccggccctcggcgggacgtgacgcagcgcccggggcgcggatgaagaaaatgaatcacaagtcaactgacagtccaaaggctccacagctcagaggaggtgtatttgatatagtgtttgcaacaaattcgacccaggtgatcaaaatgattctcaactcttctactgaagatggtattaaaagaatccaagatgattgtcccaaagctggaaggcataattacatatttgtcatgattcctactttatacagtatcatctttgtggtgggaatatttggaaacagcttggtggtgatagtcatttacttttatatgaagctgaagactgtggccagtgtttttcttttgaatttagcactggctgacttatgctttttactgactttgccactatgggctgtctacacagctatggaataccgctggccctttggcaattacctatgtaagattgcttcagccagcgtcagtttcaacctgtacgctagtgtgtttctactcacgtgtctcagcattgatcgatacctggctattgttcacccaatgaagtcccgccttcgacgcacaatgcttgtagccaaagtcacctgcatcatcatttggctgctggcaggcttggccagtttgccagctataatccatcgaaatgtatttttcattgagaacaccaatattacagtttgtgctttccattatgagtcccaaaattcaacccttccgatagggctgggcctgaccaaaaatatactgggtttcctgtttccttttctgatcattcttacaagttatactcttatttggaaggccctaaagaaggcttatgaaattcagaagaacaaaccaagaaatgatgatatttttaagataattatggcaattgtgcttttctttttcttttcctggattccccaccaaatattcacttttctggatgtattgattcaactaggcatcatacgtgactgtagaattgcagatattgtggacacggccatgcctatcaccatttgtatagcttattttaacaattgcctgaatcctcttttttatggctttctggggaaaaaatttaaaagatattttctccagcttctaaaatatattcccccaaaagccaaatcccactcaaacctttcaacaaaaatgagcacgctttcctaccgcccctcagataatgtaagctcatccaccaagaagcctgcaccatgttttgaggttgagtgacatgttcgaaacctgtccataaagtaattttgtgaaagaaggagcaagagaacattcctctgcagcacttcactaccaaatgagcattagctacttttcagaattgaaggagaaaatgcattatgtggactgaaccgacttttctaaagctctgaacaaaagcttttctttccttttgcaacaagacaaagcaaagccacattttgcattagacagatgacggctgctcgaagaacaatgtcagaaactcgatgaatgtgttgatttgagaaattttactgacagaaatgcaatctccctagcctgcttttgtcctgttattttttatttccacataaaggtatttagaatatattaaatcgttagaggagcaacaggagatgagagttccagattgttctgtccagtttccaaagggcagtaaagttttcgtgccggttttcagctattagcaactgtgctacacttgcacctggtactgcacattttgtacaaagatatgctaagcagtagtcgtcaagttgcagatctttttgtgaaattcaacctgtgtcttataggtttacactgccaaaacaatgcccgtaagatggcttatttgtataatggtgttactaaagtcacatataaaagttaaactacttgtaaaggtgctgcactggtcccaagtagtagtgtcctcctagtatattagtttgatttaatatctgagaagtgtatatagtttgtggtaaaaagattatatatcataaagtatgccttcctgtttaaaaaaagtatatattctacacatatatatatatgtatatctatatctctaaactgctgttaattgattaaaatctggcaaagttatatttactttaaaataaaataattttattgc

SEQ ID NO: 11599 - DNA, 2263 bp, Homo sapiens
attcggagctgcctcctcgccaatgattccagcgcctgacagccaggaccccaggcagcagcgagtgacaggacgtctggaccggcgcgccgctagcagctctgccgggccgcggcggtgatcgatggggagcggctggagcggacccagcgagtgagggcgcacagccgggacgccgaggcggcgggcgggagacccgcaccagcgcagccggccctcggcgggacgtgacgcagcgcccggggcgcgggtgtatttgatatagtgtttgcaacaaattcgacccaggtgatcaaaatgattctcaactcttctactgaagatggtattaaaagaatccaagatgattgtcccaaagctggaaggcataattacatatttgtcatgattcctactttatacagtatcatctttgtggtgggaatatttggaaacagcttggtggtgatagtcatttacttttatatgaagctgaagactgtggccagtgtttttcttttgaatttagcactggctgacttatgctttttactgactttgccactatgggctgtctacacagctatggaataccgctggccctttggcaattacctatgtaagattgcttcagccagcgtcagtttcaacctgtacgctagtgtgtttctactcacgtgtctcagcattgatcgatacctggctattgttcacccaatgaagtcccgccttcgacgcacaatgcttgtagccaaagtcacctgcatcatcatttggctgctggcaggcttggccagtttgccagctataatccatcgaaatgtatttttcattgagaacaccaatattacagtttgtgctttccattatgagtcccaaaattcaacccttccgatagggctgggcctgaccaaaaatatactgggtttcctgtttccttttctgatcattcttacaagttatactcttatttggaaggccctaaagaaggcttatgaaattcagaagaacaaaccaagaaatgatgatatttttaagataattatggcaattgtgcttttctttttcttttcctggattccccaccaaatattcacttttctggatgtattgattcaactaggcatcatacgtgactgtagaattgcagatattgtggacacggccatgcctatcaccatttgtatagcttattttaacaattgcctgaatcctcttttttatggctttctggggaaaaaatttaaaagatattttctccagcttctaaaatatattcccccaaaagccaaatcccactcaaacctttcaacaaaaatgagcacgctttcctaccgcccctcagataatgtaagctcatccaccaagaagcctgcaccatgttttgaggttgagtgacatgttcgaaacctgtccataaagtaattttgtgaaagaaggagcaagagaacattcctctgcagcacttcactaccaaatgagcattagctacttttcagaattgaaggagaaaatgcattatgtggactgaaccgacttttctaaagctctgaacaaaagcttttctttccttttgcaacaagacaaagcaaagccacattttgcattagacagatgacggctgctcgaagaacaatgtcagaaactcgatgaatgtgttgatttgagaaattttactgacagaaatgcaatctccctagcctgcttttgtcctgttattttttatttccacataaaggtatttagaatatattaaatcgttagaggagcaacaggagatgagagttccagattgttctgtccagtttccaaagggcagtaaagttttcgtgccggttttcagctattagcaactgtgctacacttgcacctggtactgcacattttgtacaaagatatgctaagcagtagtcgtcaagttgcagatctttttgtgaaattcaacctgtgtcttataggtttacactgccaaaacaatgcccgtaagatggcttatttgtataatggtgttactaaagtcacatataaaagttaaactacttgtaaaggtgctgcactggtcccaagtagtagtgtcctcctagtatattagtttgatttaatatctgagaagtgtatatagtttgtggtaaaaagattatatatcataaagtatgccttcctgtttaaaaaaagtatatattctacacatatatatatatgtatatctatatctctaaactgctgttaattgattaaaatctggcaaagttatatttactttaaaataaaataattttattgc

SEQ ID NO: 11600 - DNA, 2405 bp, Homo sapiens
attcggagctgcctcctcgccaatgattccagcgcctgacagccaggaccccaggcagcagcgagtgacaggacgtctggaccggcgcgccgctagcagctctgccgggccgcggcggtgatcgatggggagcggctggagcggacccagcgagtgagggcgcacagccgggacgccgaggcggcgggcgggagacccgcaccagcgcagccggccctcggcgggacgtgacgcagcgcccggggcgcgggtttgatatttgacaaattgatctaaaatggctgggtttttatctgaataactcactgatgccatcccagaaagtcggcaccagatgaagaaaatgaatcacaagtcaactgacagtccaaaggctccacagctcagaggaggtgtatttgatatagtgtttgcaacaaattcgacccaggtgatcaaaatgattctcaactcttctactgaagatggtattaaaagaatccaagatgattgtcccaaagctggaaggcataattacatatttgtcatgattcctactttatacagtatcatctttgtggtgggaatatttggaaacagcttggtggtgatagtcatttacttttatatgaagctgaagactgtggccagtgtttttcttttgaatttagcactggctgacttatgctttttactgactttgccactatgggctgtctacacagctatggaataccgctggccctttggcaattacctatgtaagattgcttcagccagcgtcagtttcaacctgtacgctagtgtgtttctactcacgtgtctcagcattgatcgatacctggctattgttcacccaatgaagtcccgccttcgacgcacaatgcttgtagccaaagtcacctgcatcatcatttggctgctggcaggcttggccagtttgccagctataatccatcgaaatgtatttttcattgagaacaccaatattacagtttgtgctttccattatgagtcccaaaattcaacccttccgatagggctgggcctgaccaaaaatatactgggtttcctgtttccttttctgatcattcttacaagttatactcttatttggaaggccctaaagaaggcttatgaaattcagaagaacaaaccaagaaatgatgatatttttaagataattatggcaattgtgcttttctttttcttttcctggattccccaccaaatattcacttttctggatgtattgattcaactaggcatcatacgtgactgtagaattgcagatattgtggacacggccatgcctatcaccatttgtatagcttattttaacaattgcctgaatcctcttttttatggctttctggggaaaaaatttaaaagatattttctccagcttctaaaatatattcccccaaaagccaaatcccactcaaacctttcaacaaaaatgagcacgctttcctaccgcccctcagataatgtaagctcatccaccaagaagcctgcaccatgttttgaggttgagtgacatgttcgaaacctgtccataaagtaattttgtgaaagaaggagcaagagaacattcctctgcagcacttcactaccaaatgagcattagctacttttcagaattgaaggagaaaatgcattatgtggactgaaccgacttttctaaagctctgaacaaaagcttttctttccttttgcaacaagacaaagcaaagccacattttgcattagacagatgacggctgctcgaagaacaatgtcagaaactcgatgaatgtgttgatttgagaaattttactgacagaaatgcaatctccctagcctgcttttgtcctgttattttttatttccacataaaggtatttagaatatattaaatcgttagaggagcaacaggagatgagagttccagattgttctgtccagtttccaaagggcagtaaagttttcgtgccggttttcagctattagcaactgtgctacacttgcacctggtactgcacattttgtacaaagatatgctaagcagtagtcgtcaagttgcagatctttttgtgaaattcaacctgtgtcttataggtttacactgccaaaacaatgcccgtaagatggcttatttgtataatggtgttactaaagtcacatataaaagttaaactacttgtaaaggtgctgcactggtcccaagtagtagtgtcctcctagtatattagtttgatttaatatctgagaagtgtatatagtttgtggtaaaaagattatatatcataaagtatgccttcctgtttaaaaaaagtatatattctacacatatatatatatgtatatctatatctctaaactgctgttaattgattaaaatctggcaaagttatatttactttaaaataaaataattttattgc

SEQ ID NO: 11601 - DNA, 2181 bp, Homo sapiens
gctcagaggagggcatgccattgcaagagaatgctcagccatgttcatctggggacctgctcctggtagagcaataggatctgtgtgcccagcaccactgcccacctagctgtcctggcctgtgcccaatgctgaccttcacctcagagtgtggctgtaccacattcggtgtatttgatatagtgtttgcaacaaattcgacccaggtgatcaaaatgattctcaactcttctactgaagatggtattaaaagaatccaagatgattgtcccaaagctggaaggcataattacatatttgtcatgattcctactttatacagtatcatctttgtggtgggaatatttggaaacagcttggtggtgatagtcatttacttttatatgaagctgaagactgtggccagtgtttttcttttgaatttagcactggctgacttatgctttttactgactttgccactatgggctgtctacacagctatggaataccgctggccctttggcaattacctatgtaagattgcttcagccagcgtcagtttcaacctgtacgctagtgtgtttctactcacgtgtctcagcattgatcgatacctggctattgttcacccaatgaagtcccgccttcgacgcacaatgcttgtagccaaagtcacctgcatcatcatttggctgctggcaggcttggccagtttgccagctataatccatcgaaatgtatttttcattgagaacaccaatattacagtttgtgctttccattatgagtcccaaaattcaacccttccgatagggctgggcctgaccaaaaatatactgggtttcctgtttccttttctgatcattcttacaagttatactcttatttggaaggccctaaagaaggcttatgaaattcagaagaacaaaccaagaaatgatgatatttttaagataattatggcaattgtgcttttctttttcttttcctggattccccaccaaatattcacttttctggatgtattgattcaactaggcatcatacgtgactgtagaattgcagatattgtggacacggccatgcctatcaccatttgtatagcttattttaacaattgcctgaatcctcttttttatggctttctggggaaaaaatttaaaagatattttctccagcttctaaaatatattcccccaaaagccaaatcccactcaaacctttcaacaaaaatgagcacgctttcctaccgcccctcagataatgtaagctcatccaccaagaagcctgcaccatgttttgaggttgagtgacatgttcgaaacctgtccataaagtaattttgtgaaagaaggagcaagagaacattcctctgcagcacttcactaccaaatgagcattagctacttttcagaattgaaggagaaaatgcattatgtggactgaaccgacttttctaaagctctgaacaaaagcttttctttccttttgcaacaagacaaagcaaagccacattttgcattagacagatgacggctgctcgaagaacaatgtcagaaactcgatgaatgtgttgatttgagaaattttactgacagaaatgcaatctccctagcctgcttttgtcctgttattttttatttccacataaaggtatttagaatatattaaatcgttagaggagcaacaggagatgagagttccagattgttctgtccagtttccaaagggcagtaaagttttcgtgccggttttcagctattagcaactgtgctacacttgcacctggtactgcacattttgtacaaagatatgctaagcagtagtcgtcaagttgcagatctttttgtgaaattcaacctgtgtcttataggtttacactgccaaaacaatgcccgtaagatggcttatttgtataatggtgttactaaagtcacatataaaagttaaactacttgtaaaggtgctgcactggtcccaagtagtagtgtcctcctagtatattagtttgatttaatatctgagaagtgtatatagtttgtggtaaaaagattatatatcataaagtatgccttcctgtttaaaaaaagtatatattctacacatatatatatatgtatatctatatctctaaactgctgttaattgattaaaatctggcaaagttatatttactttaaaataaaataattttattgc

SEQ ID NO: 11602 - DNA, 2205 bp, Homo sapiens
gcgcacgccggccgcgcccacgtgaccggtccgggtgcaaacacgcgggtcagctgatccggcccaactgcggcgtcatcccggctataagcgcacggcctcggcgaccctctccgacccggccgccgccgccatgcagccctccagccttctgccgctcgccctctgcctgctggctgcacccgcctccgcgctcgtcaggatcccgctgcacaagttcacgtccatccgccggaccatgtcggaggttgggggctctgtggaggacctgattgccaaaggccccgtctcaaagtactcccaggcggtgccagccgtgaccgaggggcccattcccgaggtgctcaagaactacatggacgcccagtactacggggagattggcatcgggacgcccccccagtgcttcacagtcgtcttcgacacgggctcctccaacctgtgggtcccctccatccactgcaaactgctggacatcgcttgctggatccaccacaagtacaacagcgacaagtccagcacctacgtgaagaatggtacctcgtttgacatccactatggctcgggcagcctctccgggtacctgagccaggacactgtgtcggtgccctgccagtcagcgtcgtcagcctctgccctgggcggtgtcaaagtggagaggcaggtctttggggaggccaccaagcagccaggcatcaccttcatcgcagccaagttcgatggcatcctgggcatggcctacccccgcatctccgtcaacaacgtgctgcccgtcttcgacaacctgatgcagcagaagctggtggaccagaacatcttctccttctacctgagcagggacccagatgcgcagcctgggggtgagctgatgctgggtggcacagactccaagtattacaagggttctctgtcctacctgaatgtcacccgcaaggcctactggcaggtccacctggaccaggtggaggtggccagcgggctgaccctgtgcaaggagggctgtgaggccattgtggacacaggcacttccctcatggtgggcccggtggatgaggtgcgcgagctgcagaaggccatcggggccgtgccgctgattcagggcgagtacatgatcccctgtgagaaggtgtccaccctgcccgcgatcacactgaagctgggaggcaaaggctacaagctgtccccagaggactacacgctcaaggtgtcgcaggccgggaagaccctctgcctgagcggcttcatgggcatggacatcccgccacccagcgggccactctggatcctgggcgacgtcttcatcggccgctactacactgtgtttgaccgtgacaacaacagggtgggcttcgccgaggctgcccgcctctagttcccaaggcgtccgcgcgccagcacagaaacagaggagagtcccagagcaggaggcccctggcccagcggcccctcccacacacacccacacactcgcccgcccactgtcctgggcgccctggaagccggcggcccaagcccgacttgctgttttgttctgtggttttcccctccctgggttcagaaatgctgcctgcctgtctgtctctccatctgtttggtgggggtagagctgatccagagcacagatctgtttcgtgcattggaagaccccacccaagcttggcagccgagctcgtgtatcctggggctcccttcatctccagggagtcccctccccggccctaccagcgcccgctgggctgagcccctaccccacaccaggccgtcctcccgggccctcccttggaaacctgccctgcctgagggcccctctgcccagcttgggcccagctgggctctgccaccctacctgttcagtgtcccgggcccgttgaggatgaggccgctagaggcctgaggatgagctggaaggagtgagaggggacaaaacccaccttgttggagcctgcagggtggtgctgggactgagccagtcccaggggcatgtattggcctggaggtggggttgggattgggggctggtgccagccttcctctgcagctgacctctgttgtcctccccttgggcggctgagagccccagctgacatggaaatacagttgttggcctccggcctcccctcaaaaaaaaaaaaaaaaaaaaaaaaaaaaaaaaaaaaaaaaaaaaaaaaaaaaaaaaaaaaaaaaaaaaaaaaaaaaaaaaaaaaa

SEQ ID NO: 11603 - DNA, 3913 bp, Homo sapiens
ctttcactggcaagagacggagtcctgggtttcagttccagttgcctgcggtgggctgtgtgagtttgccaaagtcccctgccctctctgggtctcggttccctcgcctgtccacgtgaggttggaggagctgaacgccgacgtcatttttagctaagagggagcagggtccccgagtcgccggcccagggtctgcgcatccgaggccgcgcgccctttcccctcccccacggctcctccgggccccgcactctgcgccccggctgccgcccagcgccctacaccgccctcagggggccctcgcgggctccccccggccgggatgccagtgccccgcgccacgcgcgcctgctcccgcgccgcctgccctgcagcctgcccgcggcgcctttatacccagcgggctcggcgctcactaatgtttaactcggggccgaaacttgccagcggcgagtgactccaccgcccggagcagcggtgcaggacgcgcgtctccgccgcccgcggtgacttctgcctgcgctccttctctgaacgctcacttccgaggagacgccgacgatgaagacaccgtggaaggttcttctgggactgctgggtgctgctgcgcttgtcaccatcatcaccgtgcccgtggttctgctgaacaaaggcacagatgatgctacagctgacagtcgcaaaacttacactctaactgattacttaaaaaatacttatagactgaagttatactccttaagatggatttcagatcatgaatatctctacaaacaagaaaataatatcttggtattcaatgctgaatatggaaacagctcagttttcttggagaacagtacatttgatgagtttggacattctatcaatgattattcaatatctcctgatgggcagtttattctcttagaatacaactacgtgaagcaatggaggcattcctacacagcttcatatgacatttatgatttaaataaaaggcagctgattacagaagagaggattccaaacaacacacagtgggtcacatggtcaccagtgggtcataaattggcatatgtttggaacaatgacatttatgttaaaattgaaccaaatttaccaagttacagaatcacatggacggggaaagaagatataatatataatggaataactgactgggtttatgaagaggaagtcttcagtgcctactctgctctgtggtggtctccaaacggcacttttttagcatatgcccaatttaacgacacagaagtcccacttattgaatactccttctactctgatgagtcactgcagtacccaaagactgtacgggttccatatccaaaggcaggagctgtgaatccaactgtaaagttctttgttgtaaatacagactctctcagctcagtcaccaatgcaacttccatacaaatcactgctcctgcttctatgttgataggggatcactacttgtgtgatgtgacatgggcaacacaagaaagaatttctttgcagtggctcaggaggattcagaactattcggtcatggatatttgtgactatgatgaatccagtggaagatggaactgcttagtggcacggcaacacattgaaatgagtactactggctgggttggaagatttaggccttcagaacctcattttacccttgatggtaatagcttctacaagatcatcagcaatgaagaaggttacagacacatttgctatttccaaatagataaaaaagactgcacatttattacaaaaggcacctgggaagtcatcgggatagaagctctaaccagtgattatctatactacattagtaatgaatataaaggaatgccaggaggaaggaatctttataaaatccaacttagtgactatacaaaagtgacatgcctcagttgtgagctgaatccggaaaggtgtcagtactattctgtgtcattcagtaaagaggcgaagtattatcagctgagatgttccggtcctggtctgcccctctatactctacacagcagcgtgaatgataaagggctgagagtcctggaagacaattcagctttggataaaatgctgcagaatgtccagatgccctccaaaaaactggacttcattattttgaatgaaacaaaattttggtatcagatgatcttgcctcctcattttgataaatccaagaaatatcctctactattagatgtgtatgcaggcccatgtagtcaaaaagcagacactgtcttcagactgaactgggccacttaccttgcaagcacagaaaacattatagtagctagctttgatggcagaggaagtggttaccaaggagataagatcatgcatgcaatcaacagaagactgggaacatttgaagttgaagatcaaattgaagcagccagacaattttcaaaaatgggatttgtggacaacaaacgaattgcaatttggggctggtcatatggagggtacgtaacctcaatggtcctgggatcgggaagtggcgtgttcaagtgtggaatagccgtggcgcctgtatcccggtgggagtactatgactcagtgtacacagaacgttacatgggtctcccaactccagaagacaaccttgaccattacagaaattcaacagtcatgagcagagctgaaaattttaaacaagttgagtacctccttattcatggaacagcagatgataacgttcactttcagcagtcagctcagatctccaaagccctggtcgatgttggagtggatttccaggcaatgtggtatactgatgaagaccatggaatagctagcagcacagcacaccaacatatatatacccacatgagccacttcataaaacaatgtttctctttaccttagcacctcaaaataccatgccatttaaagcttattaaaactcatttttgttttcattatctcaaaactgcactgtcaagatgatgatgatctttaaaatacacactcaaatcaagaaacttaaggttacctttgttcccaaatttcatacctatcatcttaagtagggacttctgtcttcacaacagattattaccttacagaagtttgaattatccggtcgggttttattgtttaaaatcatttctgcatcagctgctgaaacaacaaataggaattgtttttatggaggctttgcatagattccctgagcaggattttaatctttttctaactggactggttcaaatgttgttctcttctttaaagggatggcaagatgtgggcagtgatgtcactagggcagggacaggataagagggattagggagagaagatagcagggcatggctgggaacccaagtccaagcataccaacacgagcaggctactgtcagctcccctcggagaagagctgttcacagccagactggcacagttttctgagaaagactattcaaacagtctcaggaaatcaaatatgcaaagcactgacttctaagtaaaaccacagcagttgaaaagactccaaagaaatgtaagggaaactgccagcaacgcaggcccccaggtgccagttatggctataggtgctacaaaaacacagcaagggtgatgggaaagcattgtaaatgtgcttttaaaaaaaaatactgatgttcctagtgaaagaggcagcttgaaactgagatgtgaacacatcagcttgccctgttaaaagatgaaaatatttgtatcacaaatcttaacttgaaggagtccttgcatcaatttttcttatttcatttctttgagtgtcttaattaaaagaatattttaacttccttggactcattttaaaaaatggaacataaaatacaatgttatgtattattattcccattctacatactatggaatttctcccagtcatttaataaatgtgccttcattttttcagaaaaaaaaaaaaaaa

SEQ ID NO: 11604 - DNA, 2594 bp, Homo sapiens
gccctaaccttcccagggctcagctctttggagctgcccattcctccggctgcgagaaaggacgcgcgccctgcgtcgggcgaagaaaagaagcaaaacttgtcgggagggtttcgtcatcaacctccttcccgcaaacctaaacctcctgccggggccatccctagacagaggaaagttcctgcagagccgaccagccctagtggatctggggcaggcagcggcgctggctgtggaattagatctgttttgaacccagtggagcgcatcgctggggctcggaagtcaccgtccgcgggcaccgggttggcgctgcccgagtggaaccgacagtttgcgagcctcggctgcaagtggcctctcctccccgcggttgttgttcagtgtcgggtgagggctgcgagtgtggcaagttgcaaagagagcctcagaggtccgaagagcgctgcgctcctactcgcgttcgcttcttcctcttctcggttccctactgtgaaatcgcagcgacatttacaaaggcctccgggtcctaccgagaccgatccgcagcgtttggcccggtcgtgcctattgcatcgggagcccccgagcaccggcgaaggactggcgggtggggtagggaggtggcggcggcggcatggcgaggttcccgaaggccgacctggccgctgcaggagttatgttactttgccacttcttcacggaccagtttcagttcgccgatgggaaacccggagaccaaatccttgattggcagtatggagttactcaggccttccctcacacagaggaggaggtggaagttgattcacacgcgtacagccacaggtggaaaagaaacttggactttctcaaggcggtagacacgaaccgagcaagcgtcggccaagactctcctgagcccagaagcttcacagacctgctgctggatgatgggcaggacaataacactcagatcgaggaggatacagaccacaattactatatatctcgaatatatggtccatctgattctgccagccgggatttatgggtgaacatagaccaaatggaaaaagataaagtgaagattcatggaatattgtccaatactcatcggcaagctgcaagagtgaatctgtccttcgattttccattttatggccacttcctacgtgaaatcactgtggcaaccgggggtttcatatacactggagaagtcgtacatcgaatgctaacagccacacagtacatagcacctttaatggcaaatttcgatcccagtgtatccagaaattcaactgtcagatattttgataatggcacagcacttgtggtccagtgggaccatgtacatctccaggataattataacctgggaagcttcacattccaggcaaccctgctcatggatggacgaatcatctttggatacaaagaaattcctgtcttggtcacacagataagttcaaccaatcatccagtgaaagtcggactgtccgatgcatttgtcgttgtccacaggatccaacaaattcccaatgttcgaagaagaacaatttatgaataccaccgagtagagctacaaatgtcaaaaattaccaacatttcggctgtggagatgaccccattacccacatgcctccagtttaacagatgtggcccctgtgtatcttctcagattggcttcaactgcagttggtgtagtaaacttcaaagatgttccagtggatttgatcgtcatcggcaggactgggtggacagtggatgccctgaagagtcaaaagagaagatgtgtgagaatacagaaccagtggaaacttcttctcgaaccaccacaaccgtaggagcgacaaccacccagttcagggtcctaactaccaccagaagagcagtgacttctcagtttcccaccagcctccctacagaagatgataccaagatagcactacatctaaaagataatggagcttctacagatgacagtgcagctgagaagaaagggggaaccctccacgctggcctcatcattggaatcctcatcctggtcctcattgtagccacagccattcttgtgacagtctatatgtatcaccacccaacatcagcagccagcatcttctttattgagagacgcccaagcagatggcctgcgatgaagtttagaagaggctctggacatcctgcctatgctgaagttgaaccagttggagagaaagaaggctttattgtatcagagcagtgctaaaatttctaggacagaacaacaccagtactggtttacaggtgttaagactaaaattttgcctatacctttaagacaaacaaacaaacacacacacaaacaagctctaagctgctgtagcctgaagaagacaagatttctggacaagctcagcccaggaaacaaagggtaaacaaaaaactaaaacttatacaagataccatttacactgaacatagaattccctagtggaatgtcatctatagttcactcggaacatctcccgtggacttatctgaagtatgacaagattataatgcttttggcttaggtgcagggttgcaaagggatcagaaaaaaaaaatcataataaagctttagttcatgaggg

SEQ ID NO: 11605 - DNA, 2312 bp, Homo sapiens
aagcagttgttttgctggaaggagggagtgcgcgggctgccccgggctcctccctgccgcctcctctcagtggatggttccaggcaccctgtctggggcagggagggcacaggcctgcacatcgaaggtggggtgggaccaggctgcccctcgccccagcatccaagtcctcccttgggcgcccgtggccctgcagactctcagggctaaggtcctctgttgctttttggttccaccttagaagaggctccgcttgactaagagtagcttgaaggaggcaccatgcaggagctgcatctgctctggtgggcgcttctcctgggcctggctcaggcctgccctgagccctgcgactgtggggaaaagtatggcttccagatcgccgactgtgcctaccgcgacctagaatccgtgccgcctggcttcccggccaatgtgactacactgagcctgtcagccaaccggctgccaggcttgccggagggtgccttcagggaggtgcccctgctgcagtcgctgtggctggcacacaatgagatccgcacggtggccgccggagccctggcctctctgagccatctcaagagcctggacctcagccacaatctcatctctgactttgcctggagcgacctgcacaacctcagtgccctccaattgctcaagatggacagcaacgagctgaccttcatcccccgcgacgccttccgcagcctccgtgctctgcgctcgctgcaactcaaccacaaccgcttgcacacattggccgagggcaccttcaccccgctcaccgcgctgtcccacctgcagatcaacgagaaccccttcgactgcacctgcggcatcgtgtggctcaagacatgggccctgaccacggccgtgtccatcccggagcaggacaacatcgcctgcacctcaccccatgtgctcaagggtacgccgctgagccgcctgccgccactgccatgctcggcgccctcagtgcagctcagctaccaacccagccaggatggtgccgagctgcggcctggttttgtgctggcactgcactgtgatgtggacgggcagccggcccctcagcttcactggcacatccagatacccagtggcattgtggagatcaccagccccaacgtgggcactgatgggcgtgccctgcctggcacccctgtggccagctcccagccgcgcttccaggcctttgccaatggcagcctgcttatccccgactttggcaagctggaggaaggcacctacagctgcctggccaccaatgagctgggcagtgctgagagctcagtggacgtggcactggccacgcccggtgagggtggtgaggacacactggggcgcaggttccatggcaaagcggttgagggaaagggctgctatacggttgacaacgaggtgcagccatcagggccggaggacaatgtggtcatcatctacctcagccgtgctgggaaccctgaggctgcagtcgcagaaggggtccctgggcagctgcccccaggcctgctcctgctgggccaaagcctcctcctcttcttcttcctcacctccttctagccccacccagggcttccctaactcctccccttgcccctaccaatgcccctttaagtgctgcaggggtctggggttggcaactcctgaggcctgcatgggtgacttcacattttcctacctctccttctaatctcttctagagcacctgctatccccaacttctagacctgctccaaactagtgactaggatagaatttgatcccctaactcactgtctgcggtgctcattgctgctaacagcattgcctgtgctctcctctcaggggcagcatgctaacggggcgacgtcctaatccaactgggagaagcctcagtggtggaattccaggcactgtgactgtcaagctggcaagggccaggattgggggaatggagctggggcttagctgggaggtggtctgaagcagacagggaatgggagaggaggatgggaagtagacagtggctggtatggctctgaggctccctggggcctgctcaagctcctcctgctccttgctgttttctgatgatttgggggcttgggagtccctttgtcctcatctgagactgaaatgtggggatccaggatggccttccttcctcttacccttcctccctcagcctgcaacctctatcctggaacctgtcctccctttctccccaactatgcatctgttgtctgctcctctgcaaaggccagccagcttgggagcagcagagaaataaacagcatttctgatgccaaaaaaaaaaaaaaaaa

SEQ ID NO: 11606 - DNA, 6449 bp, Homo sapiens
gcaagcgcgaagggcccatcggcggcgagagcgactcggaggaggtgcgcaacatccgctgcctcacgcccactcgctccttctacccggcgcccgggccctggcccaagagcttctccgatcggcagcagatgaaggacatccgctcggaggccgagcgcctgggcaagaccatcgaccggctcatcgccgacacgagcaccatcatcaccgaggcgcgcatctacgtggccaacggggacctgttcggactcatggacgaggaggacgacggcagccgcatccgggagcacgagctgctctaccgcatcaacgctcagatgaaggccttccgcaaggagctgcagaccttcatcgaccgcctcgaggtgcccaagtctgcggacgaccgcggcgccgaggagcccatttccatgttccagcctatcattttacttattctcattcttgtattattttcatcactttcttacacaacaatatttaaacttgtcttcctttttacactgttttttgtactgtaaatctttcatcatttaccattcattgtagtattttcagtttgtttattttgttcacccttcaagacaagaagtaaaagaagtataatttctgtagtaaccaatgctataaaaacactgaagactgcttatttctttaaaaagatacaactcatcttaccaagaccaaattcaataagaagcccaaacactaaaatatttcaggctttattttaaaggcaagtgagactgcttcaaataaaacaacttcaagcttccaagaaacagttaagaggaggcagagaagagcagaaacacttctttgctgacacttacactgttgccatggacctacataagcagtgggagaacacagagactaactggcataaggaaaagatggaattactggaccagtttgacaatgaaagaaaggaatgggaaagtcaatggaagattatgcagaagaaaatagaagagctttgccgggaagtaaagctttggaggaaaatcaatatcaatgaaagtgctaagatcattgatctttaccatgagaagaccattccagagaaagtgatagaatcttccccaaattaccccgatttaggacaaagtgaatttataaggacgaatcacaaagatggtctgagaaaagaaaataaaagagagcagagcttagtcagtggaggaaatcaaatgtgtaaggaacaaaaagcaacaaaaaaatcaaaagtagggtttttggatcctttggctacagacaaccaaaaggaatgtgaggcctggcctgacctgaggacttctgaggaagacagcaagagctgttctggcgccctcagtacagctcttgaagaacttgcgaaggtgagtgaagaattatgcagctttcaagaggaaattcgaaagcggtctaaccatagaaggatgaagtcagattcttttctccaggaaatgccaaatgtaactaatatacctcatggggaccccatgatcaacaatgaccagtgcattcttccaatcagtttagaaaaagaaaaacagaaaaacaggaagaatctgagctgtaccaatgtgctccagagcaattctacgaaaaaatgtggaattgatacaatcgatttaaaaagaaatgaaactccaccagttcctcctccaagaagcacctctcgaaattttcccagctcggattctgaacaagcctatgaaagatggaaggaaaggttagaccacaacagctgggtgccccatgagggtcgaagtaaaaggaattacaaccctcacttccctttgagacaacaagagatgtctatgttgtatccaaatgaagggaaaacttcgaaagatggtatcatcttttcctctttggtaccagaagtcaaaatagatagcaagcctccaagtaatgaagatgttggacttagcatgtggtcatgtgacattgggataggtgcaaaaaggagcccctctacttcgtggtttcagaaaacctgctctacccccagtaatccaaaatatgaaatggtgatcccagatcaccctgctaaatctcatcctgatcttcatgtaagtaatgactgtagctcctcagtagcagagagcagtagcccacttagaaatttcagttgtggctttgaaaggactacaaggaatgagaagctggcagcaaagactgatgaatttaacagaactgtatttagaacagatagaaattgtcaggcaatacagcaaaatcacagctgctcaaaatcatcggaggatctcaagccctgtgatacctcatctactcacacaggtagcatatcacaaagtaacgatgtgtccggtatttggaaaaccaatgcccacatgcctgtgcccatggaaaatgtgcctgataatcccaccaagaaatccacaacaggcctagtaagacaaatgcagggacacctaagtcctcgcagttatcgaaatatgctccacgagcatgactggagaccgagtaatttgtctggccgtccgaggtcagctgatcccaggtcaaattatggtgttgtggaaaagctgctgaaaacctatgagacagcaacagagtctgcattgcaaaattctaagtgcttccaggataattggaccaaatgtaattctgatgtcagtggtggtgccacattaagtcagcatttagaaatgctccaaatggaacaacagtttcagcaaaagacagctgtgtgggggggacaggaagtgaagcaaggaatagatccgaaaaagataacagaggaatccatgtcagtgaacgcctcacatggaaaaggattttcccgacctgctagaccagcaaatcgtcgtctcccctccagatgggcatccagatctccatctgcaccccctgccttgcggagaactacccacaactataccatttctctgcgatccgaagcattgatggtttaagtctttggcctggattgctatattacagaagttctagtcccacttgtcaaacagagcattctgagtgtttacaggcggacctgttctcttccgacaagcaatttgaatcttaactttccatcagtcttcagtgtttttaatctaaggaataattatcttcctgcattttgatttcttagatcagaattttttaatgccatcctcattagttttccaatacaatataagttgaaacaatgtacaatattgtatattctttgttgcaagtggcagaaagtaaggttatgtgcatggccatgtgtttgtaggtgcatgtgttgaaataggaagtatcctagtatgtatttagatatgaaaaacttatgtgctagtgttgactttgaaattataacatgtatacctatatattctttgtgtttatttaaaagttttgaaaatatgcagtactgtttatattttgtataccttttaataggtatccacttaaggcatttgcagtacaaatattaattgaccacttccttggcccccagctacaatgaaaaagaagaattatgcacacatctaacattggtagatttctaaagacaactcataaataatttcttaacccatataaggataaaataataccattgatattcttgtttattctttttaaataaaaatgtcacaagtttaatagatcagccttgtaaagcaagcataaaatgttcataaatgttttatatattatttggtagtctagtatggctttaactgaatatttgatcctcagagacagtatcatgagactgcattataaatgacatgattaaatgatgaatttattttgtcagcctcagcaacaaacatttcctaaatgggatgcaaaaagaaactgaatgatgttgaattttagtttttctttaagttgtggtaagcttttagtttagctgctttaacatggagtcatacatacttagaggtaagtcatttattatttttttcctttttctaatcttttccttaaaattaatagataacaaactaagttacttttttactaacaaggaagatcaggaataatatttctttgaaagctgaaattatacttctcacagtttgctaccgaaaaaaggcttaaactaaaccttgacatccacagtagcatcaggaatagaaatgtgtattttggctacagtttgcatacagtgaacacataaaatctatattgaaaactgacagaaatatgaatgtcgaggggcttggaattctaaatggaagattttagaaggaactttgctctctactgtcactatataaaaccaattatgttatgttattagatattaactctatttaagcttttcttttactaagaaattcttatgccaaatgtattccaagagccatctccttatgatgtatttgaaccatttagagaaattcacttcattgtaccccatgacctgaggtaaagaaaataattttcaaattgcagacttccttgaaaggctcaagactgtagcatggtgatgtctagattcatactttactgtaaggacagtttcggtagttaagtggaattaaaggtctagagtgatttgtattggatggtaactaaggtctatacatctactcttttaattcttatttccttcaggaagatccttttccacaggaagctatcaaagaaaagtaaactagacaccaagtaatatcactctcataatatgctttccagctagaggggagaaaacaccaggaaagaggaaccctgggtcataaaatgacggacctgttaggaaaatgctgttgtgtgacaatggagagcctgcccaaggactgtgcaacctatctgttcctctccaccagtgtatcccaagtagtctggtatgatctgtggttccttagaatattgaggatctctttaaaaaatgaaatttctgatctcaccccatattactaaagcaaaatttccaggggtagggactgggactccagaaccattaataaaacaaaacaaaacaaagcaaaatattgatgatcaggcagatttgaaaacagtgacattgcttgatctctgaatggatggatgcccttgggtggtcacttttcttcctaggacttgcctttgttatctgtaaattagaatggctatactttcagacttcacaattttaagccacttttttctattaacagttgaatgaaccagtgggacacattttaacgtcttcttatgttgactaaaattatagttagagctgagaaaaaaaaaatagcatctagtccaactccttgattgtaaaactgaaaaactaaggttatttgaatgttctgttttctctttttaaatattttataacttttaaatggaaaaacctattaggtaaatggaaataatccttgaaaatagtttttgatgttttgtgatttttaactggtaaatttctactttaggtgggcattttcttccctagaatatgccctttattatgctatcattgctagatttaaagggacttgtaagcatttctggaaatatttgatttaaaaacatatattaatagatgttttccctagcagacttttggagcaaaaatattattttagttcagcagaggattactgatattatgggctgatctcagaaaggaataaggatgaggcagagaggagtacttgagtttgtgtgtgtgtgtgtgtgtgtgtgtttgtgtcagtgtcacataagttctccatattgccttatgtcccaaagccaaatataaaaatataaatgatgctttgtataattcattttatcaaaaattacccataactttcatttgtttttatatcgacaatgaagatgatcatatttcattttgcagatgtggccataaaatattatttacttctatataggtgattttaccaggtttagttatcctgagaaaacatctggacttaagagtttctgcttccctacaaagatctttaaagttatttttaggcacatttgtgacaaacaactacttgatattgaaatctccttcagccattagaagctatcaaataaagtaggtgtaaaaacaactgtctgtggcatttgtatacatcgagaacatttttctttccctcattttctgcagtgaactccagtaaagctaagtgtcttatgaaatctaaactcatatatgtacacagttcactctagcttcttccaaaatatctctaggtagtacaactgaagccaaacctgcctgacttcctgctcctggccacccaaaactccatatggcttctcgtacactgacatcctctctctacccatttaactgctaattgagtctgataaaagtcttctttgaaaaaagtttttacttctaagatttgcatttacatcataaaattaaaccattttcaggaaaatcagatttttttattacagtactatttgctttaaattcggcatgtttttcttaagtagcaagtacatgtatcggaacttagaactggtgggcgcggtggctcttgcctgtaatcccagca

SEQ ID NO: 11607 - DNA, 5514 bp, Homo sapiens
aatcccagcactttgggaggccgagatgggcggatcacttgaggccaaccaactcaaacttgaagacatgaaatccccaaggagaaccactttgtgcctcatgtttattgtgatttattcttccaaagctgcactgaactggaattacgagtctactattcatcctttgagtcttcatgaacatgaaccagctggtgaagaggcactgaggcaaaaacgagccgttgccacaaaaagtcctacggctgaagaatacactgttaatattgagatcagttttgaaaatgcatccttcctggatcctatcaaagcctacttgaacagcctcagttttccaattcatgggaataacactgaccaaattaccgacattttgagcataaatgtgacaacagtctgcagacctgctggaaatgaaatctggtgctcctgcgagacaggttatgggtggcctcgggaaaggtgtcttcacaatctcatttgtcaagagcgtgacgtcttcctcccagggcaccattgcagttgccttaaagaactgcctcccaatggacctttttgcctgcttcaggaagatgttaccctgaacatgagagtcagactaaatgtaggctttcaagaagacctcatgaacacttcctccgccctctataggtcctacaagaccgacttggaaacagcgttccggaagggttacggaattttaccaggcttcaagggcgtgactgtgacagggttcaagtctggaagtgtggttgtgacatatgaagtcaagactacaccaccatcacttgagttaatacataaagccaatgaacaagttgtacagagcctcaatcagacctacaaaatggactacaactcctttcaagcagttactatcaatgaaagcaatttctttgtcacaccagaaatcatctttgaaggggacacagtcagtctggtgtgtgaaaaggaagttttgtcctccaatgtgtcttggcgctatgaagaacagcagttggaaatccagaacagcagcagattctcgatttacaccgcacttttcaacaacatgacttcggtgtccaagctcaccatccacaacatcactccaggtgatgcaggtgaatatgtttgcaaactgatattagacatttttgaatatgagtgcaagaagaaaatagatgttatgcccatccaaattttggcaaatgaagaaatgaaggtgatgtgcgacaacaatcctgtatctttgaactgctgcagtcagggtaatgttaattggagcaaagtagaatggaagcaggaaggaaaaataaatattccaggaacccctgagacagacatagattctagctgcagcagatacaccctcaaggctgatggaacccagtgcccaagcgggtcgtctggaacaacagtcatctacacttgtgagttcatcagtgcctatggagccagaggcagtgcaaacataaaagtgacattcatctctgtggccaatctaacaataaccccggacccaatttctgtttctgagggacaaaacttttctataaaatgcatcagtgatgtgagtaactatgatgaggtttattggaacacttctgctggaattaaaatataccaaagattttataccacgaggaggtatcttgatggagcagaatcagtactgacagtcaagacctcgaccagggagtggaatggaacctatcactgcatatttagatataagaattcatacagtattgcaaccaaagacgtcattgttcacccgctgcctctaaagctgaacatcatggttgatcctttggaagctactgtttcatgcagtggttcccatcacatcaagtgctgcatagaggaggatggagactacaaagttactttccatatgggttcctcatcccttcctgctgcaaaagaagttaacaaaaaacaagtgtgctacaaacacaatttcaatgcaagctcagtttcctggtgttcaaaaactgttgatgtgtgttgtcactttaccaatgctgctaataattcagtttggagcccatctatgaagctgaatctggttcctggggaaaacatcacatgccaggatcccgtaataggtgtcggagagccggggaaagtcatccagaagctatgccggttctcaaacgttcccagcagccctgagagtcccattggcgggaccatcacttacaaatgtgtaggctcccagtgggaggagaagagaaatgactgcatctctgccccaataaacagtctgctccagatggctaaggctttgatcaagagcccctctcaggatgagatgctccctacatacctgaaggatctttctattagcatagacaaagcggaacatgaaatcagctcttctcctgggagtctgggagccattattaacatccttgatctgctctcaacagttccaacccaagtaaattcagaaatgatgacgcacgtgctctctacggttaatgtcatccttggcaagcccgtcttgaacacctggaaggttttacaacagcaatggaccaatcagagttcacagctactacattcagtggaaagattttcccaagcattacagtcaggagatagccctcctttgtccttctcccaaactaatgtgcagatgagcagcacggtaatcaagtccagccacccagaaacctatcaacagaggtttgttttcccatactttgacctctggggcaatgtggtcattgacaagagctatctagaaaacttgcagtcggattcgtctattgtcaccatggctttcccaactctccaagccatccttgctcaggatatccaggaaaataactttgcagagagcttagtgatgacaaccactgtcagccacaatacgactatgccattcaggatttcaatgacttttaagaacaatagcccttcaggcggcgaaacgaagtgtgtcttctggaacttcaggcttgccaacaacacaggggggtgggacagcagtgggtgctatgttgaagaaggtgatggggacaatgtcacctgtatctgtgaccacctaacatcattctccatcctcatgtcccctgactccccagatcctagttctctcctgggaatactcctggatattatttcttatgttggggtgggcttttccatcttgagcttggcagcctgtctagttgtggaagctgtggtgtggaaatcggtgaccaagaatcggacttcttatatgcgccacacctgcatagtgaatatcgctgcctcccttctggtcgccaacacctggttcattgtggtcgctgccatccaggacaatcgctacatactctgcaagacagcctgtgtggctgccaccttcttcatccacttcttctacctcagcgtcttcttctggatgctgacactgggcctcatgctgttctatcgcctggttttcattctgcatgaaacaagcaggtccactcagaaagccattgccttctgtcttggctatggctgcccacttgccatctcggtcatcacgctgggagccacccagccccgggaagtctatacgaggaagaatgtctgttggctcaactgggaggacaccaaggccctgctggctttcgccatcccagcactgatcattgtggtggtgaacataaccatcactattgtggtcatcaccaagatcctgaggccttccattggagacaagccatgcaagcaggagaagagcagcctgtttcagatcagcaagagcattggggtcctcacaccactcttgggcctcacttggggttttggtctcaccactgtgttcccagggaccaaccttgtgttccatatcatatttgccatcctcaatgtcttccagggattattcattttactctttggatgcctctgggatctgaaggtacaggaagctttgctgaataagttttcattgtcgagatggtcttcacagcactcaaagtcaacatccctgggttcatccacacctgtgttttctatgagttctccaatatcaaggagatttaacaatttgtttggtaaaacaggaacgtataatgtttccaccccagaagcaaccagctcatccctggaaaactcatccagtgcttcttcgttgctcaactaagaacaggataatccaacctacgtgacctcccggggacagtggctgtgcttttaaaaagagatgcttgcaaagcaatggggaacgtgttctcggggcaggtttccgggagcagatgccaaaaagactttttcatagagaagaggctttcttttgtaaagacagaataaaaataattgttatgtttctgtttgttccctccccctcccccttgtgtgataccacatgtgtatagtatttaagtgaaactcaagccctcaaggcccaacttctctgtctatattgtaatatagaatttcgaagagacattttcactttttacacattgggcacaaagataagctttgattaaagtagtaagtaaaaggctacctaggaaatacttcagtgaattctaagaaggaaggaaggaaggaaggaaggaaagaagggagggaaacagggagaaagggaaaaagaagaaaaagagaaagatgaaaataggaacaaataaagacaaacaacattaagagccatattgtaagatttccatgttaatgatctaatataatcactcagtgcaacattgagaatttttttttaatggctcaaaaatggaaactgaaagcaagtcatggggaatgaatactttgggcagtatcttcctgatgtcttcttagctaagaggaggaaaaaaaggctgaaaaaatagggaggaaattccttcatcagaacgacttcaagtggataacaatatttataagaaatgaatggaaggaaatatgatcctcctgagactaactttgtatgttaaggtttgaactaagtgaatgtatctgcagaggaagtattataaagatatgtcattagatccaagtgctgattaaatttttatagtttatcagaaaagccttatattttagtttgttccacattttgaaagcaaaaaatatatatttgatatacccttcaattgccaaatttgatatgttgcactgaagacagaccctgtcatatatttaatggcttcaagcaggtacttctctgtgcattatagaatagattttaataatcttatagcattgtatattattattgctgttgtcactgttattattattgtggatactggcccttggtgtgttgcatagctccctatgtattctctgtttccatctttaagttcccagaccaatatacattaagagttttgcatggtctaaattgtgtttattccaaccacgtggaaagctcctggaaagaaattttacattcggttgttctgtgctcctaatgacacttgaccttgttgaacaaatggcagagcctttcccaaggatttgattgtttgtgaattatctgcatgtgtgcttttttttggtgtgtatttcattaaaaaatataaatatttatgaaaaaaaaaaaaaaaa

SEQ ID NO: 11608 - DNA, 2482 bp, Homo sapiens
tgcgctgcccggggcggccagagccctgcagaacaaaccgccgcacggaattaggggccgccgtccgcgcctgccaggcttggaagcggactcgcccccagggccaccgccctaggaaacctcccgtcggaagcctcccaagcaagccgctcacccgcggctcccgcgcgaggcggcgtgggcgtgggcgcggccctggcgcggcggcgcgcgcggggtgaagggagcccggcgcgctggctgcggcgacggcggccgttgctgcgccgggtactggggtcgctgcctgaggcgcaggcgccgtggactccacccgccccggggcctgggctcgctgtggactcgtcatggcgaccgagcagaggcctttccacctggtggtgttcggcgcgtctggcttcaccggccagttcgtgaccgaggaggtggcccgggagcaggtggacccggagcggagctcccgcctgccctgggccgtggcgggccgctcccgggagaagctgcagcgggtgctggagaaggcggccctgaagctgggaagaccaacactgtcatctgaagttggaatcatcatctgtgatattgctaatccagcctcgcttgatgaaatggctaaacaggcaacagttgtcctcaattgcgtaggaccatatcggttttatggagaacctgtaataaaagcatgtattgaaaatggagccagttgtatcgacatcagtggagaacctcagtttctggaactaatgcaactgaagtatcatgagaaagctgcagacaaaggggtttatatcattggaagcagcggctttgactccattccagcagatctgggagtaatatataccagaaataaaatgaatggtactttgactgctgtggaaagtttcctgactatacattcaggacctgaggggttgagcattcatgatggtacctggaagtcagcaatttatggttttggagatcagagtaatttgagaaaactaagaaatgtatcaaatctgaaacctgtcccgctcattggtccaaaattgaagagaaggtggccaatttcttattgtcgggaactcaaaggttattccattccttttatgggatctgatgtgtctgttgtaaggaggactcaacgttacttgtatgaaaatttagaggaatcaccagttcagtatgctgcgtatgtaactgtgggaggcatcacctctgttattaagctgatgtttgcaggacttttctttttgttctttgtgaggtttggaattggaaggcaacttctcataaaattcccatggttcttctcctttggctatttttcaaaacaaggcccaacacaaaaacagattgatgctgcctcattcacgctgacattctttggtcaaggatacagccaaggcactggtacagataagaacaaaccaaatatcaaaatttgtactcaggtgaaaggaccagaggctggctatgtggctacccccatagctatggttcaggcagccatgactcttctaagtgatgcttctcatctgcctaaggcgggcggggtcttcacacctggagcagctttttccaaaacaaagttgattgacagactcaacaaacacggtattgagtttagtgttattagcagctctgaagtctaaacactggaagaattaactgaagtcataacgtgcgtgaattaacagcttctctatttgatatttgaaattcttctgtaagcctgtctgagtgtatgtggaaacgattgtcaaatctaaaatatctatatattaaaaagtaggaaattgtcctagcttaccctaaatttcaaatctgagttgattttgtgattttattgcttataacagagaactcatatttgacatatttttttcattgatgtgttcctggtagattttcacgaatgagctggcaggtctaatgggggaggcggcgtcccagtctgtgttgcagcagcattctcatcgggggtgcgcacaccatcgttactgtcgggcagtaactgccgcttgccttgccgcagtaggagggaaatctcaccttccttccacatactgtcttgagcctttgctaaattaaactgcactttttgctatttttgcctagtttttcgccaatctacactgattttggactgttacctaagttgaaaaataaaaggttgtcaatcgaatggtggtttaatgtttggacctgccgatgtatttgtatagtggtagaaacatgctgcttaagtggcctaacctgtttcttgccaataagtaggcttatcattttatctttacgtaattctatatctgtgactaggtttttaaggatacagcttataagttgctatcaattttcactacctaagcagaatttttctctaatttactttttgtattttaactaggttttacatggaagccctaaaataaggcaaaagactttttcttttgtaataagcatataataaacacgtatatacatagcaaaaaaaaaa

SEQ ID NO: 11609 - DNA, 3062 bp, Homo sapiens
gacaagagctcagacctgaggagagtgactagcttctctgtgtcccaggtggccaccttccactgtggaagctcatggactccattgggtcttcagggttgcggcagggggaagaaaccctgagttgctctgaggagggcttgcccgggccctcagacagctcagagctggtgcaggagtgcctgcagcagttcaaggtgacaagggcacagctacagcagatccaagccagcctcttgggttccatggagcaggcgctgaggggacaggccagccctgcccctgcggtccggatgctgcctacatacgtggggtccaccccacatggcactgagcaaggagacttcgtggtgctggagctgggggccacaggggcctcactgcgtgttttgtgggtgactctaactggcattgaggggcatagggtggagcccagaagccaggagtttgtgatcccccaagaggtgatgctgggtgctggccagcagctctttgactttgctgcccactgcctgtctgagttcctggatgcgcagcctgtgaacaaacagggtctgcagcttggcttcagcttctctttcccttgtcaccagacgggcttggacaggagcaccctcatttcctggaccaaaggttttaggtgcagtggtgtggaaggccaggatgtggtccagctgctgagagatgccattcggaggcagggggcctacaacatcgacgtggttgctgtggtgaacgacacagtgggcaccatgatgggctgtgagccgggggtcaggccgtgtgaggttgggctagttgtagacacgggcaccaacgcgtgttacatggaggaggcacggcatgtggcagtgctggacgaagaccggggccgcgtctgcgtcagcgtcgagtggggctccttaagcgatgatggggcgctgggaccagtgctgaccaccttcgaccataccctggaccatgagtccctgaatcctggtgctcagaggtttgagaagatgatcggaggcctgtacctgggtgagctggtgcggctggtgctggctcacttggcccggtgtggggtcctctttggtggctgcacctcccctgccctgctgagccaaggcagcatcctcctggaacacgtggctgagatggaggacccctctactggggcagcccgtgtccatgctatcctgcaggacttgggcctgagccctggggcttcggatgttgagcttgtgcagcacgtctgtgcggccgtgtgcacgcgggctgcccagctctgtgctgccgccctggccgctgttctctcctgcctccagcacagccgggagcaacaaacactccaggttgctgtggccaccggaggccgagtgtgtgagcggcaccccaggttctgcagcgtcctgcaggggacagtgatgctcctggccccggaatgcgatgtctccttaatcccctctgtggatggtggtggccggggagtggcgatggtgactgctgtggctgcccgtctggctgcccaccggcgcctgctggaggagaccctggccccattccggttgaaccatgatcaactggctgcggttcaggcacagatgcggaaggccatggccaaggggctccgaggggaggcctcctcccttcgcatgctgcccactttcgtccgggccacccctgacggcagcgagcgaggggatttcctggccctggacctcgggggcacgaacttccgtgtcctcctggtacgtgtgaccacaggcgtgcagatcaccagcgagatctactccattcccgagactgtggcccagggttctgggcagcagctctttgaccacatcgtggactgcatcgtggacttccagcagaagcagggcctgagcgggcagagcctcccactgggttttaccttctccttcccatgtaggcagcttggcctagaccagggcatcctcctgaactggaccaagggtttcaaggcatcagactgcgagggccaagatgtcgtgagtctgttgcgggaagccatcactcgcagacaggcagtggagctgaatgtggttgccattgtcaatgacacggtggggaccatgatgtcctgtggctatgaggacccccgttgcgagataggcctcattgtcggaaccggcaccaatgcctgctacatggaggagctccggaatgtggcgggcgtgcctggggactcaggccgcatgtgcatcaacatggagtggggcgcctttggggacgatggctctctggccatgctcagcacccgctttgatgcaagtgtggaccaggcgtccatcaaccccggcaagcagaggtttgaaaagatgatcagcggcatgtacctgggggagatcgtccgccacatccttttacatttaaccagccttggcgttctcttccggggccagcagatccagcgccttcagaccagggacatcttcaagaccaagttcctctctgagatcgaaagtgacagcctggccctgcggcaggtccgagccatcctagaggatctggggctacccctgacctcagatgacgccctgatggtgctagaggtgtgccaggctgtgtcccagagggctgcccagctctgtggggcgggtgtagctgccgtggtggagaagatccgggggaaccggggcctggaagagctggcagtgtctgtgggggtggatggaacgctctacaagctgcacccgcgcttctccagcctggtggcggccacagtgcgggagctggcccctcgctgtgtggtcacgttcctgcagtcagaggatgggtccggcaaaggtgcggccctggtcaccgctgttgcctgccgccttgcgcagttgactcgtgtctgaggaaacctccaggctgaggaggtctccgccgcagccttgctggagccgggtcggggtctgcctgtttcccagccaggcccagccacccaggactcctgggacatcccatgtgtgacccctctgcggccatttggccttgctccctggctttccctgagagaagtagcactcaggttagcaatatatatatataatttatttacaaaaaaaaaaaaa

SEQ ID NO: 11610 - DNA, 3828 bp, Homo sapiens
gggggacggtgaaggttgcctcccgcccgtccgggctctgatcctccgtctccccgtcccccggcggccggcccatggcctggcggaggcccgaaccatggacctccgcaccgccgtgtacaacgccgcccgtgatggcaagctgcagctgctccagaagctgctcagcggccggagccgggaggaactggacgagctgacgggcgaggtggccggcgggggaacgccgctactcatcgccgcccgctacggccacctggacgtggtggagtacctggtggaccggtgcggcgcgagcgtggaggccggtggctcggtgcacttcgatggcgagaccatcgagggcgcgccgccgctgtgggccgcctccgcagccggccacctggacgtggtgcggagcctgctgcgccgcggggcctcggtgaaccgcaccacgcgcaccaactccacgcctctccgcgccgcctgcttcgacggccacctggaggtggtgcgctacctggtcggcgagcaccaggccgacctggaggtggccaaccggcacggccacacgtgcctcatgatctcgtgctacaagggccaccgtgagatcgcccgctacctgctggagcagggcgcccaggtgaaccggcgcagcgccaagggcaacacggccctgcatgactgcgccgagtccggcagcctggagatcctgcagctgctgctggggtgcaaggcccgcatggaacgtgacggctacggcatgaccccgctgctcgcggccagcgtgacgggccacaccaacatcgtggagtacctcatccaggagcagcccggccaggagcaggtcgcagggggagaggctcagcctgggctgccccaagaagacccctccaccagccaggggtgtgcgcagcctcagggggctccgtgctgcagctcctccccagaggaaccactgaacggggaatcttacgaaagctgctgtcccaccagccgggaagctgccgtggaagccttggaattgctgggagctacgtatgtggataagaaacgagatctgcttggggcccttaaacactggaggcgggccatggagctgcgtcaccaggggggcgagtacctgcccaaaccggagcccccacagctggtcctggcctatgactattccagggaggtcaacaccaccgaggagctggaggcgctgatcaccgacccggatgagatgcgcatgcaggccctgttgatccgggagcgcatcctcggtccctcgcacccggacacttcctattacatccgttacaggggtgccgtgtacgccgactcgggcaatttcgagcgctgcatccgcttgtggaagtacgccctggacatgcaacagagcaacctggagcctctgagccccatgaccgccagcagcttcctctccttcgcggaactcttctcctacgtgcttcaggaccgggccgccaaaggcagcctgggcacccagatcggctttgcagacctcatgggggttctcaccaaaggggtccgggaagtggaacgggccctgcagctgcccagggagcccggagactcagcccagttcaccaaggcgctggccatcatcctccacctgctctacctgctggagaaagtggagtgcacccccagccaggagcacctgaagcaccagaccgtctaccgcctgctcaagtgcgcgcccaggggcaagaacggcttcacccctctgcacatggctgtggacaaggacaccacaaacgtgggccgctatcccgtgggcagattcccctccctgcacgtggtcaaagtgctgctcgactgcggggccgacccggacagcagggattttgacaacaacaccccgctacacatagcagcccagaacaactgcccggccatcatgaatgccctgatcgaagcaggggcccacatggacgccaccaatgccttcaagaagacggcctacgagctgctggacgagaagctgctggccaggggtaccatgcagcccttcaactacgtgaccctgcagtgccttgcggcccgggccctggataagaacaagatcccttacaagggcttcatcccggaagatctggaggcgttcatcgaactgcactgacctgcccagaacgcctgcaccctcacctctcccctctcctgctgagatgggggaaatccggctgcggcatagcagatgctcgttcttgcctccttcaggcaccaatcaggagaagggttctgcctcccatcccctctacctgcagacagggtcggaggtgttagcgagcctttggtgctagaagcctgcggggtcatgtgctaagaggacagtctttctccgggagcccgctcactcattctgagttaggaaaagacacaagaccttccccacatcctgtctgcctgggttagggaggcctttgccttgttacctagaggcggagggactgaagccattgcgttccttccctgctagaaacacaggaagaagttgaggacggtctgccttccctcgtccctttacctggccagataactccagccgctgaatacagtgttaggactgggggctcctgagatgagagtttgagattcagggaatgagaccacctctcatttcttccagcatgatcgcgccctgctcccgtgccaccgtagtccctggcagacaggcagggctctgcccagggcagcctgccacttgcatagctttcggttggtttggtgttctgtttatttaataagtgggcaggttgcaagcgttgcacagaaattctgagattttactgccttttttttttttttaagaaagttgtttgttggactccataagtgaatttcaagcagtgaggattttgtggtgcctgagatggccgagggcacagggagtgagctgtatgtgtgaggaatttggtgagcgagataaaagtccacggtgtcaacccctaaaacatgggtgaccgtacatttttatacatctccactctacggccttttacaggctttccgattttacaggcctttccaagtttccattctccttagagagagaactgtgcttccaaacagaaatcaggagtgaccacaaagcctgaaaacactttgccacccagcaaagaactggcacaattggtttgggtctgcattgccatagtgcccgagttaaaactgcaggccactctgccttgcaaacctcacgtggcctctgatttcattgtgggtgcatccacaggtggcccgagctgttctttcagctgctccaaggattgagacccaagtcatcatgaaaaaggcccaagtacagtcttaatgcgataaatccactagctaagacgtcgagtgccaagaccagccttccagccgaggtttggacaaagtctcaggttcccgtgactcagggtaaggtgctggggctgccagaggacctgccccagcaagatttttgtcaagagcgagactccatcagcccaggcagacgggagcaggttcttggccagcgtagacagcagcaaacagcagcagggaagccattctcactgcatcctccctgcagtagccacggccaggcccttaggaggagcagtgaccgggggtgtccagaaatatcctgtccctggatggaaactaggtctcgtttggattttttttttttttttttttgccgtgttaggaaattatttattaatttacaagacaggttttaactcagccgaggtgggaaatggtgtccctgtccctcccaaagcacagagcacagaaatgaggccgtttacatggcgagtctccgtgctggtgtttaagtcattaaaaagatactcaaagaaaaaaaaaaaaaaaaaa

SEQ ID NO: 11611 - DNA, 3442 bp, Homo sapiens
gtggtccctgcctggctgaggtggcagcagggggcgggacgcgcagcgctatggcagagggcagcggggaagtggtcgcagtgtctgcgaccggggctgccaacggcctcaacaatggggcaggcgggacctcggcgacgacctgcaacccgctgtcgcgcaagctgcataagatcctggagacgcggctggacaacgacaaggagatgttagaagctctcaaggcactttcaaccttttttgttgaaaatagtctgcggactcgaagaaatttacgtggagatattgaacgtaaaagtttagccatcaatgaagaatttgtaagcattttcaaggaagtgaaggaggaacttgaaagcataagcgaagatgttcaagcaatgagcaactgttgtcaagatatgacaagtcgcctacaggcagcaaaggaacagactcaagatttaatagtaaaaaccactaagcttcaatctgaaagccaaaaattagagataagagctcaagttgcagatgccttcttatccaagttccaactgacttctgatgaaatgagtcttctccgaggtacaagagaaggacccattactgaggattttttcaaggcactgggaagagtaaaacagattcataatgatgtcaaagttctcttgcgtacaaatcaacaaacggcaggtttagaaattatggaacagatggccttacttcaagaaacggcttatgaaagactttaccgatgggctcaaagtgaatgcagaacattgacacaagaatcatgtgacgtatctccggtattgacacaggcaatggaagccctgcaggacagacctgtcttatataaatataccttagatgaatttggaacagccagaagaagtacagttgttcgtggatttattgatgcgctcacaagagggggccccggaggtacacctagaccaattgaaatgcattctcatgaccctttgaggtatgtaggagatatgttggcttggctccatcaagctactgcttctgaaaaggaacaccttgaagctctcttaaagcatgtaactacacaaggtgttgaagaaaatattcaagaagttgttgggcatatcactgaaggtgtgtgcaggcctctaaaggttcgaattgagcaagtaatagttgctgaacctggggcagttttattatataaaatttctaatctcctcaaattttatcaccatacaatcagtggtattgttggaaatagtgcaactgcattattgactaccattgaagaaatgcatttgctaagcaaaaaaatattcttcaatagcttgagtcttcatgcaagtaaattaatggacaaggttgaactcccaccacctgatcttggaccaagttctgcactaaatcagacactcatgttgctgcgtgaagttttagcatctcacgattcttcagttgtaccattagatgctcgtcaagctgattttgtgcaggttttatcatgtgtcttggatcctctcctacagatgtgtactgtatcagccagcaatttaggcacagctgacatggccactttcatggtcaattcactatatatgatgaagacaacattagctctatttgaattcactgacagacgtctggaaatgctacagtttcagatcgaagcacatttggacacacttataaatgagcaagcctcttatgttttaactagggtaggcttgagttacatctataacactgtacagcaacataaacctgaacagggctctttagctaatatgcccaacctagattctgtgacactgaaggctgcaatggttcagtttgatcgttatctgtcagccccagacaacctattgataccacagctgaactttcttctaagtgccacagtgaaagagcagatcgtaaaacaatctacagaattagtctgcagagcctatggtgaagtgtatgcagccgtgatgaatccaatcaatgaatacaaagatccagagaacattcttcaccgatcgccgcagcaagtgcagacgcttctttcctgattatcttatttcattgtgttagcaaaatatgacctccctaaaacactgaaggttattttttattctttgaatttttactctataatttgatagttacagttttctttgtatcataagattgtaagtcccgataatttttttttttttggtctcagtaacagggaagtaagtaacatgttgacctgagctagtattactgtgtatctactctaaatgagatgatctatttttttgctagccatctctccagctctgcagttttcactgtattcaggaagcataaagtagtatgaaaggtttgaagaatttttttttacaagactagttctaaattaacagcttataaaaaatttgtctaaatttaataattagtataaggatatgacctaataaatgtctccttacctaaagattcatttgctttcttttaatatgagtaggcatacttagtagcttttctgaacctagcctatgtctctgtccccaaaatagctgcccttaaagagttgttagcagagagaaaaataacagtgaatgtgctcctggtgtatatggcagtgaatctcctttctgttctactttagcatactatatatatttgactgtgtacattcttatgcaattttaagtatacactcagcaataattagaaaaaaaggagagagaaaagtgatttaaacagggtggattccactctgtgggagccttcgatggaactcaaggtggagctcagcctttccaatgagctctaagcatgtagatagcctgagctgtgtctaagcctggtgtttaaagatgggtatttgtcatacaatatgggtcctaaatccaaccaactacacattttatctggtgttcaaaccaaagaaacaatgatctactcaaacattggagaaaaaaactgccagaggaggagttgccaattggcagtgtgtcttatctccatgttgtaactggactctgactttagaccattacctattaggaagattaaaaatgactgtatttttaaaggaataaatcccagtgtgcctgatttgacattcttgtcggcaaaaaaaaacttaatttctagtaaatctataaaaatgggtaagtccctaaattacaaatgagaaaattgaagcacaaggaaaaaaataactagtttgaaatattttgaaaagtaataacataaaactagtatttgtagaagattatgtgttgtatataacaaattagtatttatagaatatgacctatttatctgaagtttataattgtttatacctaatacagttctttttggagtaagaatgattatataatcgttatccatttgggtataaatctgtatttttagttttttccctttgattagtatgtgttacatataaagacagaaaataaagtataaatcaagaaaaaaaaaaaaaaaa

SEQ ID NO: 11612 - DNA, 1310 bp, Homo sapiens
gctcggagcccggagcgtgcctcggcggcctgtcggttttcaccatggagcagctgagctcagcaaacacccgcttcgccttggacctgttcctggcgttgagtgagaacaatccggctggaaacatcttcatctctcccttcagcatttcatctgctatggccatggtttttctggggaccagaggtaacacggcagcacagctgtccaagactttccatttcaacacggttgaagaggttcattcaagattccagagtctgaatgctgatatcaacaaacgtggagcgtcttatattctgaaacttgctaatagattatatggagagaaaacttacaatttccttcctgagttcttggtttcgactcagaaaacatatggtgctgacctggccagtgtggattttcagcatgcctctgaagatgcaaggaagaccataaaccagtgggtcaaaggacagacagaaggaaaaattccggaactgttggcttcgggcatggttgataacatgaccaaacttgtgctagtaaatgccatctatttcaagggaaactggaaggataaattcatgaaagaagccacgacgaatgcaccattcagattgaataagaaagacagaaaaactgtgaaaatgatgtatcagaagaaaaaatttgcatatggctacatcgaggaccttaagtgccgtgtgctggaactgccttaccaaggcgaggagctcagcatggtcatcctgctgccggatgacattgaggacgagtccacgggcctgaagaagattgaggaacagttgactttggaaaagttgcatgagtggactaaacctgagaatctcgatttcattgaagttaatgtcagcttgcccaggttcaaactggaagagagttacactctcaactccgacctcgcccgcctaggtgtgcaggatctctttaacagtagcaaggctgatctgtctggcatgtcaggagccagagatatttttatatcaaaaattgtccacaagtcatttgtggaagtgaatgaagagggaacagaggcggcagctgccacagcaggcatcgcaactttctgcatgttgatgcccgaagaaaatttcactgccgaccatccattccttttctttattcggcataattcctcaggtagcatcctattcttggggagattttcttccccttagaagaaagagactgtagcaatacaaaaatcaagcttagtgctttattacctgagtttttaatagagccaatatgtcttatatctttaccaataaaaccactgtccagaaaaaaaaaaaaaaaaaaaa

SEQ ID NO: 11613 - DNA, 1087 bp, Homo sapiens
gcggcattgaggcggacgcgtctagaggtccgtctgaccgcggcgtcgggacctggtttccgggcatgagctgagagcaccacgccgaggccacgagtatttcatagacattgatggaagcagaaaccaaaactcttcccctggagaatgcatccatcctttcagagggctctctgcaggaaggacaccgattatggattggcaacctggaccccaaaattaccgaataccacctcctcaagctcctccagaagtttggcaaggtaaagcagtttgacttcctcttccacaagtcaggtgctttggagggacagcctcgaggctactgttttgttaactttgaaactaagcaggaagcagagcaagccatccagtgtctcaatggcaagttggccctgtccaagaagctggtggtgcgatgggcacatgctcaagtaaagagatatgatcataacaagaatgataagattcttccaatcagtctcgagccatcctcaagcactgagcctactcagtctaacctaagtgtcactgcaaagataaaagccattgaagcaaaactgaaaatgatggcggaaaatcctgatgcagagtatccagcagcgcctgtttattcctactttaagccaccagataaaaaaaggactactccatattctagaacagcatggaaatctcgaagatgatggttgtgaattactgtagcagcaaaagcaaattggtctccacacctaaaatcgtctgcctgtgtactttgtagatgtgaatggtactattcaacggagcacaatcacatgttagcatttggtaacataatgtttttggatgttcttatggatgtttcttccctaaactatgtatggaattgagcatcatccagaataaatagcgttgtatcccaaattgtgatttgaaccctgggatgctctaattggctggttggtttggatttgtaactccagaaacattctatagtgtgccagagcaaaaggcaaatacacaaaatattatttaaatcaggaaactaaaaatattaacatctattaaaaaattgagcatttttctaaaaaaaaaaaaaaaaaaaaaa

SEQ ID NO: 11614 - DNA, 3249 bp, Homo sapiens
gcagtgggctctgcggcgcagcttcatctgtcggcacctgcacagctatcccggggctgccctcgaccagctcctcgcgctctccgccgcctggaccaaccacgtcttcctgggctgcaggtacagcccacgcttgatggaaaaaattctccaaatggctgaaggtattgatattggggagatgccttcatatgatctggtgctgtccaaaccttccaaaggtcaaaaacgccacctctcaacatgtgatggtcaaaatcctcctaaaaagcaagccggttccaaattccatgcgagacctcgttttgagcctgtacattttgtagctagtagttcaaaagatgaaagacaggaagatccttatggccctcaaacaaaagaggtaaatgaacaaacacattttgccagcatgccaagagacatctaccaagattatactcaagactctttcagtatacaagatgggaattctcagtattgtgattcatcaggattcattctcacaaaagaccagcctgtaacagccaacatgtattttgacagtgggaaccctgccccaagcaccacatcacagcaggcaaactctcagtcaactcctgagccttcaccatcacagacatttcccgagtctgtggtagccgagaagcagtattttattgaaaaattaacggcgacaatctggaagaacctttctaatccagaaatgacttctggatctgataaaattaattatacatatatgttaactcgttgtattcaggcgtgtaagacaaatcctgagtatatatatgctcctttaaaggaaattcctcctgccgacatccccaaaaataaaaaacttctaactgatggctatgcttgtgaagttagatgccaaaatatctacttaactacaggttatgctggcagcaagaatgggtccagggatcgagctacagagctagctgtaaaactcttgcagaaacgtattgaagttagagttgtccggcggaaattcaagcatacatttggagaggacctcgtggtgtgtcagattggcatgtcctcctatgaatttcctccagctctgaagccaccagaagacctggtggtgctgggtaaagatgcttccgggcagccaatttttaatgcttctgccaaacactggaccaattttgtcattacagaaaatgcaaatgatgcaattggtatccttaacaattctgcctcattcaacaagatgtcaattgaatacaaatatgagatgatgccaaatcgcacatggcgttgtcgagtgtttttacaagatcactgcttagctgaaggttatggaaccaagaaaacaagtaaacatgcagctgccgacgaggctttgaaaattcttcaaaaaacacagcccacttatccatctgtcaaaagttcacaatgccatacaggctcttcacccagaggatctggaaagaagaaagatataaaggatcttgtagtttatgagaattcttcaaatcccgtgtgcacgctgaacgacacagctcagtttaaccgaatgacagttgagtatgtctatgaaaggatgacaggcctccgctggaaatgcaaagtgattctagagagtgaagtaattgcagaagcagttggggtgaagaaaactgtcaaatatgaagctgctggggaagctgtgaaaaccctcaaaaagacccagccaactgtcattaacaacttgaagaaaggagctgttgaagatgtgatttcaagaaatgaaattcagggccgctcagcagaggaggcttacaaacagcaaatcaaagaagataatattggaaatcagctgctgagaaagatgggttggactggtggtggtttaggtaaatctggtgagggcatacgggagcctatctcagtgaaagagcagcataagcgggaagggcttggtctggatgtagagagggtgaataaaattgccaagagagatattgaacagatcatcagaaactacgcccgctccgagagccacacagatttgactttctctagagagctgactaatgatgaacggaagcaaatacatcagattgcccagaagtatggtcttaagagtaagtctcatggggtgggccatgataggtacctagtggtaggtagaaaaagacggaaggaagacctactagatcagctcaaacaggaaggccaagtgggccattacgagcttgttatgcctcaagcaaattgagatcttactaatttattttgtaaatgcctaatgaggcagatttttgaattaaagaaatgctacatgttccggttgcagagtatattcataagatgtctcaccttgttcatttcacatagtggtttattagatattggaacctaaagaattctgtccacttgtattagcttaatccagcagatgatattgtgcagttactgtttgtgtctttgatattgctgtgtccctcagattttagtagtttgacaagcaagaacacatatccaaatggaattttaccctgagaaattatcattttaaagggcatagcacagcaatctgcaacaatatgtaaagttgatattgactacaataaaaatccagtcttaattccagatttactgaaaatgtcagatcattttgtattaatctattttcatctttgtgtgaagccagttatagaatgtttgacaataaattgtgctgtacacgtaaatgtccttaccaactaaatgatgtaaaactttcttaaagtaattttagtgttcatttatttataacttctaccatgtgatttccagactattggaagtgatttactgtatcttgtgatatatgggttttaacaaattctagtcttcacgctgagagagcactacttgagagagcagttgaaagtttcaaaaactttggttcaatctgaagaaaggaagcttgaactgtttgttcttggtgccttgcagagagactcacagcaactctccattatagctttcacacggtttggatgtgcagcacatccaaggcaaccacagctgtggtagagcttggtaaaagactgaagatacattggtgctttgatgaaaaggtcagttggctggtccctctctcaaaaagcttattaagcctgaaaagccaactttgtaacatatttaaaactgctattttcgcttatttctggaatgtaaaaaaaaaaaatgtataaaaagaattagtgtatgcttcctgaataaaaaggagccaaagttgaaaaaaaaaaaaaaaaaaaaaaaaaaaaaaaa

SEQ ID NO: 11615 - DNA, 2838 bp, Homo sapiens
cccgcccccgccccttccgagcaaacttttggcacccaccgcagcccagcgcgcgttcgtgctccgcagggcgcgcctctctccgccaatgccaggcgcgcgggggagccattaggaggcgaggagagaggagggcgcagctcccgcccagcccagccctgcccagccctgcccggaggcagacgcgccggaaccgggacgcgataaatatgcagagcggaggcttcgcgcagcagagcccgcgcgccgcccgctccgggtgctgaatccaggcgtggggacacgagccaggcgccgccgccggagccagcggagccggggccagagccggagcgcgtccgcgtccacgcagccgccggccggccagcacccagggccctgcatgccaggtcgttggaggtggcagcgagacatgcacccggcccggaagctcctcagcctcctcttcctcatcctgatgggcactgaactcactcaagtgctgcccaccaaccctgaggagagctggcaggtgtacagctctgcccaggacagcgagggcaggtgtatctgcacagtggtcgccccacagcagaccatgtgttcacgggatgcccgcacaaaacagctgaggcagctactggagaaggtgcagaacatgtctcaatccatagaggtcttggacaggcggacccagagagacttgcagtacgtggagaagatggagaaccaaatgaaaggactggagtccaagttcaaacaggtggaggagagtcataagcaacacctggccaggcagtttaaggcgataaaagcgaaaatggatgaacttaggcctttgatacctgtgttggaagagtacaaggccgatgccaaattggtattgcagtttaaagaggaggtccagaatctgacgtcagtgcttaacgagctgcaagaggaaattggcgcctatgactacgatgaacttcagagcagagtgtccaatcttgaagaaaggctccgtgcatgcatgcaaaaactagcttgcgggaagttgacgggcatcagtgaccccgtgactgtcaagacctccggctcgaggttcggatcctggatgacagaccctctcgcccctgaaggcgataaccgggtgtggtacatggacggctatcacaacaaccgcttcgtacgtgagtacaagtccatggttgacttcatgaacacggacaatttcacctcccaccgtctcccccacccctggtcgggcacggggcaggtggtctacaacggttctatctacttcaacaagttccagagccacatcatcatcaggtttgacctgaagacagagaccatcctcaagacccgcagcctggactatgccggttacaacaacatgtaccactacgcctggggtggccactcggacatcgacctcatggtggacgagagcgggctgtgggccgtgtacgccaccaaccagaacgctggcaacatcgtggtcagtaggctggaccccgtgtccctgcagaccctgcagacctggaacacgagctaccccaagcgcagcgccggggaggccttcatcatctgcggcacgctgtacgtcaccaacggctactcagggggtaccaaggtccactatgcataccagaccaatgcctccacctatgaatacatcgacatcccattccagaacaaatactcccacatctccatgctggactacaaccccaaggaccgggccctgtatgcctggaacaacggccaccagatcctctacaacgtgaccctcttccacgtcatccgctccgacgagttgtagctccctcctcctggaagccaagggcccacgtcctcaccacaaagggactcctgtgaaactgctgccaaaaagataccaataacactaacaataccgatcttgaaaaatcatcagcagtgcggattctgacatcgagggatggcattacctccgtgtttctccctttcgagccggcgggccacagacgtcggaagaaactcccgtatttgcagctggaactgcagcccacggcgccccggttttcctccccgccctgtccctctctggtcaaacaacatactaaagaggcgaggcaatgactgttggccagttctcaccggggaaaaacccactgttaggatggcatgaacatttccttagatcgtggtcagctccgaggaatgtggcgtccaggctctttgagagccatgggctgcacccggccgtaggctagtgtaactcgcatcccattgcagtgccgtttcttgactgtgttgctgtctcttagattaaccgtgctgaggctccacatagctcctggacctgtgtctagtacatactgaagcgatggtcagagtgtgtagagtgaagttgctgtgcccacattgtttgaactcgcgtaccccgtagatacattgtgcaacgttcttctgttattcccttgaggtggtaacttcgtatgttcagtttatgcgatgattgttgtaaatgcaatgccgtagtttggattaataagtggatggtttttgtttctaaaaagaaaaaaaaaatcagtgttcacccttatagagacatagtcaagttcatgttgataataatcaaaggaattactctcttcttgttaaattagctaaatcatgtaaccgcagataggaagggctcacctggggaaactctggtttccgatgggacaggaaagtcatacgggcaacagtatgcggaaagtacgtttttttaagtaaaaaacaaaggcaaactttgtactatccagttatctaaggaacaataaaaacattaggagaaaaaaaaaaaaaaaaaaaaaaaaaaaaaaaaaaaaaaaaaaaaaaaaaaaa

SEQ ID NO: 11616 - DNA, 2346 bp, Homo sapiens
ccttcgcgccctgggccatctccctcccacctccctccgcggagcagccagacagcgagggccccggccgggggcaggggggacgccccgtccggggcacccccccggctctgagccgcccgcggggccggcctcggcccggagcggaggaaggagtcgccgaggagcagcctgaggccccagagtctgagacgagccgccgccgcccccgccactgcggggaggagggggaggaggagcgggaggagggacgagctggtcgggagaagaggaaaaaaacttttgagacttttccgttgccgctgggagccggaggcgcggggacctcttggcgcgacgctgccccgcgaggaggcaggacttggggaccccagaccgcctccctttgccgccggggacgcttgctccctccctgccccctacacggcgtccctcaggcgcccccattccggaccagccctcgggagtcgccgacccggcctcccgcaaagacttttccccagacctcgggcgcaccccctgcacgccgccttcatccccggcctgtctcctgagcccccgcgcatcctagaccctttctcctccaggagacggatctctctccgacctgccacagatcccctattcaagaccacccaccttctggtaccagatcgcgcccatctaggttatttccgtgggatactgagacacccccggtccaagcctcccctccaccactgcgcccttctccctgaggacctcagctttccctcgaggccctcctaccttttgccgggagacccccagcccctgcaggggcggggcctccccaccacaccagccctgttcgcgctctcggcagtgccggggggcgccgcctcccccatgccgccctccgggctgcggctgctgccgctgctgctaccgctgctgtggctactggtgctgacgcctggccggccggccgcgggactatccacctgcaagactatcgacatggagctggtgaagcggaagcgcatcgaggccatccgcggccagatcctgtccaagctgcggctcgccagccccccgagccagggggaggtgccgcccggcccgctgcccgaggccgtgctcgccctgtacaacagcacccgcgaccgggtggccggggagagtgcagaaccggagcccgagcctgaggccgactactacgccaaggaggtcacccgcgtgctaatggtggaaacccacaacgaaatctatgacaagttcaagcagagtacacacagcatatatatgttcttcaacacatcagagctccgagaagcggtacctgaacccgtgttgctctcccgggcagagctgcgtctgctgaggctcaagttaaaagtggagcagcacgtggagctgtaccagaaatacagcaacaattcctggcgatacctcagcaaccggctgctggcacccagcgactcgccagagtggttatcttttgatgtcaccggagttgtgcggcagtggttgagccgtggaggggaaattgagggctttcgccttagcgcccactgctcctgtgacagcagggataacacactgcaagtggacatcaacgggttcactaccggccgccgaggtgacctggccaccattcatggcatgaaccggcctttcctgcttctcatggccaccccgctggagagggcccagcatctgcaaagctcccggcaccgccgagccctggacaccaactattgcttcagctccacggagaagaactgctgcgtgcggcagctgtacattgacttccgcaaggacctcggctggaagtggatccacgagcccaagggctaccatgccaacttctgcctcgggccctgcccctacatttggagcctggacacgcagtacagcaaggtcctggccctgtacaaccagcataacccgggcgcctcggcggcgccgtgctgcgtgccgcaggcgctggagccgctgcccatcgtgtactacgtgggccgcaagcccaaggtggagcagctgtccaacatgatcgtgcgctcctgcaagtgcagctgaggtcccgccccgccccgccccgccccggcaggcccggccccaccccgccccgcccccgctgccttgcccatgggggctgtatttaaggacacccgtgccccaagcccacctggggccccattaaagatggagagaggactgcggatctctgtgtcattgggcgcctgcctggggtctccatccctgacgttcccccactcccactccctctctctccctctctgcctcctcctgcctgtctgcactattcctttgcccggcatcaaggcacaggggaccagtggggaacactactgtagttagatc

SEQ ID NO: 11617 - DNA, 1477 bp, Homo sapiens
cgctggcggcttccgcagccttcaagtgggtcctccgcccccggccctcccctctcaggcggagccaaactgcggccccgcctttacagtctcggaaaggtccccagactggaggctctgaggaaggggtgtggggagtcgggggcggagacttggggcggggggcgggcaataaactcccaggccccgcccacgccccgccggggccctaatcctggacccgggatcccgtgcgcctggagacagggtccagatctgcctccagcccctcgaaaccaggactccagcacctctggtcccgccctcacccggacccctggccctcacgtctcctccagggatggcgctggcggctttgatgatcgccctcggcagcctcggcctccacacctggcaggcccaggctgttcccatcctgcccctgggcctggctccagacacctttgacgatacctatgtgggttgtgcagaggagatggaggagaaggcagcccccctgctaaaggaggaaatggcccaccatgccctgctgcgggaatcctgggaggcagcccaggagacctgggaggacaagcgtcgagggcttaccttgccccctggcttcaaagcccagaatggaatagccattatggtctacaccaactcatcgaacaccttgtactgggagttgaatcaggccgtgcggacgggcggaggctcccgggagctctacatgaggcactttcccttcaaggccctgcatttctacctgatccgggccctgcagctgctgcgaggcagtgggggctgcagcaggggacctggggaggtggtgttccgaggtgtgggcagccttcgctttgaacccaagaggctgggagactctgtccgcttgggccagtttgcctccagctccctggataaggcagtggcccacagatttggtaatgccaccctcttctctctaacaacttgctttggggcccctatacaggccttctctgtctttcccaaggagcgcgaggtgctgattcccccccatgaagtctttttggttaccagattctctcaggatggagcccagagcttggtgactctctggagctataatcagacctgtagccattttaactgcgcctatctgggtggggagaagaggcggggctgtgtgtctgcgccaggagccctgggaacgggtgaccttcatatgacgaagaggcacctccagcagccttgagaagcaagaacatggttccggacccagccctagcagccttctccccaaccaggatgttggcctggggaggccacagcagggctgagggaactctgctatgtgatggggacttcctgggacaagcaaggaaagtactgaggcagccacttgattgaacggtgttgcaatgtggagacatggagttttattgaggtagctacgtgattaaatggtattgcagtgtggagacatggaaaaaaaaaaaaaaaaaaaaaaaaaaaa

SEQ ID NO: 11618 - DNA, 7745 bp, Homo sapiens
ggaagcggaagtgaagggtgcgcttggcggcggcggcgggagctgcggagtcgggaatcaaaacaaagggcctggggggggcggggggaaggcggcggggccggaatgtgagcggaggtggagccggcggcagagggtggaagaatgaaagaaaagaaagatgaaaggatgttgaatcactttgcatggctgtatgatggaaggaaacggaactgagaactcctgcagtagaacacgtggatggcttcaacaagataatgatgctaagccatggctttggaaattctctaattgcttttctcgtcctgagcagacgctgccacatagtccccaaacgaaagagtacatggagaacaagaaagttgctgtggaactaaaggatgtaccatcaccccttcatgctggctctaagctttttccagcagtcccacttcctgatattcgttctcttcagcagcctaaaatacagctttcttctgtccccaaagtaagctgctgtgctcattgccctaatgaaccctccacttcgccaatgcgttttggtggtggtggtggcggtagcggaggtaccagtagcttgattcacccgggcgcactgttagactcgcaaagcaccaggacaatcacgtgtcaggtagggtcagggtttgctttccagtctgcatcttcactccagaatgcctcagctaggaacaatttggcaggcattgcaagtgactttcccagcatgtgtctagagagtaacctgtcttcctgcaaacacctgccctgttgtggaaaactccacttccagtcatgtcatggtaatgtgcacaagctgcatcagtttccgagtctgcagggctgcacctccgctggctatttcccctgttctgatttcacaagcggggctccagggcatttggaagagcacatttcacagtcggagctaacgcctcacttgtgcaccaactctttgcaccttaatgtggtacctccggtttgtttaaagggctcactttactgcgaagactgtctaaacaagccagcaagaaatagcataatcgatgcggctaaagtctggccaaatataccacctccaaatactcaacctgcacctcttgctgtccctctgtgtaatggctgtggaaccaaaggaacagggaaggagaccacgttgttattggcgaccagtctaggcaaagctgcttcaaaatttgggtcaccagaagttgcagtagctggacaggtgctagaaaacttaccccccattggagttttttgggatattgaaaactgctccgttccctctggccggtcagcaactgctgttgtgcaaagaatccgtgagaagttttttaaaggccacagagaagcagaattcatctgtgtatgtgacatcagtaaagaaaacaaggaagttattcaagagctgaataattgccaggtaaccgttgcccacatcaatgctactgcaaagaatgccgctgatgataaactgcggcagagtctccgcagatttgcaaatacacacactgctccagccacagtggttcttgtgtcaactgatgtcaattttgcattggaacttagtgacctgagacacaggcatggtttccacattattttggtccataaaaaccaggcctcagaagcactgctgcatcatgctaacgagctgatcagatttgaagagttcatttccgacttgccccccaggttaccactaaaaatgccacagtgccacactctgctctatgtttataacctaccagcaaataaggatggcaagagcgtcagcaacaggctcagacgcctgtccgataattgtggtgggaaagtgctgagtatcacaggctgcagtgcaattctccgcttcataaaccaagatagtgcagagcgcgctcagaagcgaatggaaaacgaagatgtctttggtaataggatcattgtgtcatttactccaaaaaatagagaactctgtgaaacaaagagttcaaatgcaattgctgataaagtgaagtctcccaaaaaacttaagaatccaaaattgtgcctcatcaaagatgcaagtgaacaatcttccagtgccaaagccacgcctggaaaagggtcacaggcaaattctggatctgctacaaaaaatacaaatgttaaaagtttacaggagctgtgccgcatggagtcaaaaactggtcatagaaacagtgagcaccagcaaggtcacctgaggctggtcgtacccactcacggtaactcaagtgctgcagtgtcgacgccgaaaaactcgggggtggcagaacccgtttacaaaaccagtcagaaaaaggagaacctcagtgcccgaagtgttaccagttctcctgtagagaaaaaagataaagaggagactgtattccaagtgagttacccgtctgcttttagcaagttagttgcatccaggcaagtcagtcctctgctcgcatctcagtcttggtcttctaggagtatgtctccaaaccttttaaacagagcatccccgcttgctttcaacattgcaaattcgagcagcgaagccgactgcccagacccatttgcaaatggtgctgatgtccaagtcagcaacatagactacagattatcccggaaggagctgcagcagctcctgcaggaagcatttgccaggcatggcaaggtgaagagtgttgagctcagcccccatacagattatcaactcaaggctgttgtgcaaatggaaaacttacaagatgcgatcggtgcagtgaatagcctccacagatacaaaattggcagcaaaaagatcctggtctcacttgccaccggggctgccagcaaatcactctctttactgagtgcagaaacaatgtctgttcttcaggatgcccctgcctgttgcctgcctctgtttaaatttacagatatctatgaaaaaaagtttggacacaagttgaatgtgtcagatctatataaattaacagacacggtcgcaatccgtgaacaaggaaacggacggctggtgtgtctcctacccagcagtcaggcccgccagagccccttggggtcttcccagtcacacgacggctcctccacgaattgcagcccaattatatttgaagagttagaatatcacgagcctgtctgcagacagcattgttccaataaggatttcagcgaacatgaatttgatccagactcttacaagattccttttgtgattctttctttgaagacatttgcgccccaggttcacagtcttctccagacccacgagggcaccgtgcctttattgagctttccagattgttacattgcagagtttggcgatctagaagtagtgcaagaaaaccaaggaggtgttcccttagaacacttcattacctgtgttccaggtgtaaacattgccactgctcagaatggcatcaaagtggttaaatggattcacaacaagcccccgcctcccaacactgacccttggcttctgcgttcgaagagtcctgtaggtaacccccagctgatccagttcagtagagaagtgattgacttgctgaaaagccagccatcttgtgtcatacccatcagtcatttcatcccatcctatcaccatcattttgcaaagcagtgccgagtgtcagactacggatactccaagctgattgagttattagaagcagtgcctcatgtattgcagattcttggaatgggctccaaacgtctgctgacccttacccacagggcccaggtgaagcgctttactcaggatttactaaaacttctcaaatcccaggccagcaaacaggtcattgtgagagaattctcacaggcttatcactggtgtttctcaaaggactgggatgtcactgaatatggtgtttgtgagttgattgacatcgtatcagagattccagacacaaccatctgcttgtcccaacaagataatgaaatggtgatttgtatccccaaaagagaacgcactcaggatgaaatagaaaggacaaaacagttctccaaggatgtcgttgatttgctgcgtcaccaaccccatttccggatgccctttaataaatttatcccttcttaccatcaccactttggccggcagtgcaaacttgcgtactatgggtttaccaaactacttgaactttttgaagccatacctgatactttacaagtattggaatgtggagaagaaaagatccttactctgacagaggtggagcggttcaaagctctagctgcccagtttgttaaactccttcggtcccaaaaagataactgccttatgatgacagatctccttacagaatatgctaaaacttttggttatacatttcgtctccaagactatgatgtcagttccatttcggctttaactcagaaactctgccatgtcgtgaaggttgccgatatagaatctggcagacagattcagctgatcaaccgaaagtctctgcgatctctcactgcccagttgctggtattgttgatgtcttgggaaggaaccacccatctttctgttgaggagctcaagagacattacgaaagtacccacaacactccccttaacccctgtgaatatggattcatgaccttgaccgaactgctgaagagcctgccatacttggttgaggttttcactaatgataagatggaagaatgtgtgaagctcacaagtctgtatttgtttgcaaagaatgtgcggtctttacttcatacttaccactaccagcagattttccttcatgagttttccatggcctataccaagtatgtcggagaaactctgcagcccaagacctacggccacagcagcgtggaggagctcttgggagcaattccacaggtggtctggataaaaggacatggtcataagagaattgtagtgttaaaaaatgacatgaaaagtcgtttgagttcactcagtctctcccctgccaatcatgaaaaccagccctcggagggcgagcgcatcctggaggtgcccgaatcgcacacagcctcggaactcaagcttggagctgacggcagtgggcccagtcacacagagcaggagcttctccgcctgaccgacgactcccccgtcgacctcctgtgtgcgcctgtcccctcgtgcctgccgtcccctcagctgagaccagaccccgttatcctccaatctgctgatctcattcagtttgaggagcgccctcaagagccttctgaaattatgattttaaaccaagaagaaaaaatggagattccaataccaggaaagagcaaaactctgacctctgactccagctcgtcctgcatctcagcagctgtccccgtgcctccctgcccctcctcggaaacctccgagtcactgctcagcaaggaccccgtggaaagcccggccaaaaagcaacccaaaaatagagtcaaattggcagccaacttttccttagcacctataaccaagctttaactcccatttggaatatagaattaggatgggaaaacactgtctgattctgcacacaaaagtgggtttcaaaaatacatccttttctgtgtcatgaaaaccccccgaagccattgacttcatcttacctgtgttctatcatgtttttcttttccattgaacacagctttgagctgaagtctttcttttcttcttcctttttctttcttttttcaattatttgaagaacttgtggcatttgttaaagaatccttaatatattttaccaaatttttagtaactattatgaaatacaatggtgttccaaaagaagaaagcactaaaaactcaactagcaggaagcggttttgcttccattgagccacgtcggtggtgtcatcctacatgtagcataatagagtctctcagcctttgcttactggtgtttccgacagtattaacccagtgcgtggcatgtctttgaagcaaagcctgtcccgctagcctgtgtgttcacacaccaaaggagaagggtaggcgaggggttcggagtgtattttcaggttggaatgtgaaggttcctggcttccatgtgacttgtaagtgtgccttgttttttatttaaactatgtctgtagttgacaaaagtggcttcatcacaaatttttttaaacgtttctactttggggttccatttaggagctttctagaaagttgaggatgtttgaagcttcccttctgtgttccagtttgatatgggttaggttaaggaaaaggagatggtctcgatgtcatggatttaaagtcagcatttggattacaacacacattattgtgtgtcgagaggcagcattggaaagagcctgattttctaaaatatgcatcaagtgcataaattacaaatcagagctgagtggggaggtgcttcagcagcagcgggatcaatacgatttccactgggaagagacaggaattctacctacacataggaaggccaaggttgatccacttaaccttgttattgtaattttaaagctggtatcggtagctgggaagctttatgtgtgtgtatgtcagctcagcatcttttaatcgtgtctgattttactctcgttacttctcgctgttggaagcatctctgggtttcttgtggcgtctggtgtggaatggccttcctctctaggtgcctgaggtgtccgctgacgggtggcctctcacccccctctagagaaacctgacatttacaatggattgtatttgtccggcaaaaaaggcggattcattcatagagcagaaagaacctgttggcgtaaggtcttccactagttagatggtttcttttggggaaatgtttatatttggtaacttctagaaagccagaaaatggactctgatttcatagcattttgataaaatgccacaaaataagggctatagagagatttttacaagtcagattttttgttccccaaatcttttaaatgaagccagtgactcccagttctcaacacatggccccagtcaagacagaacaccatggaaaaaaccctgtaagtattatggcactctccgaatcctcctgaaggcatttcctctacagacatagtgttacaggaagtgaaatgcaaatgtgcaattttttttaaaggagcttttaaacaaagtaataataattggtgttgagaacatcagttgccttattctaagatttcataaggctgagtttgcacgcttggacttcagttctgctagcatgtaaagagtggtggactttaaaaccgtaagaggtatcattacaagtcacctggaacagactcaaagaacaggttctttgggcaacagacaaagaagaatcaagttctgtgctgtcccgtgagtgtgtctgagtaccattcactggagttgctgcttaggtctgggacgtgtgtgtgactcttaacaattgctgtctgaaaatgagagagaagacttcggaagcacattgtgttcataatgtactccacaatggccagtccaattgctatctatttttttatccagaggcttaattaaatgatgtggtaaaatgatgtttgagcattaagacaatgtaattctttatttctgggtggaaagatataccggattaaatttatctgtttaaaaaaatgacaaaagttatcaccaaaaccccctttcccatcttgcactgtttgttttggattgggtttgggggaaagagatgtttttcttagttgtctactttgtttgaacacttttgttgtggttcaagtgctgttttgtgtgttgggaccaaacagttgtcaataaactttacaagcgagcatctaaaaaaaaaaaaaaaaaa

SEQ ID NO: 11619 - DNA, 5723 bp, Homo sapiens
cggcgaacagacgttctttctcctccatgcagttacacaaaaggagggctacggaaactaaaagtttcggggcctctggctcggtgtgtggagaaaagagaaaacctggagacgggatatgaagatcaatgatgcagactgatggttttgatgaagctgggcatttataactagattcattaaggaatacaaagaaaatacttaaagggatcaataatggtgtcttctggttgcagaatgcgaagtctgtggtttatcattgtaatcagcttcttaccaaatacagaaggtttcagcagagcagctttaccatttgggctggtgaggcgagaattatcctgtgaaggttattctatagatctgcgatgcccgggcagtgatgtcatcatgattgagagcgctaactatggtcggacggatgacaagatttgtgatgctgacccatttcagatggagaatacagactgctacctccccgatgccttcaaaattatgactcaaaggtgcaacaatcgaacacagtgtatagtagttactgggtcagatgtgtttcctgatccatgtcctggaacatacaaataccttgaagtccaatatgaatgtgtcccttacatttttgtgtgtcctgggaccttgaaagcaattgtggactcaccatgtatatatgaagctgaacaaaaggcgggtgcttggtgcaaggaccctcttcaggctgcagataaaatttatttcatgccctggactccctatcgtaccgatactttaatagaatatgcttctttagaagatttccaaaatagtcgccaaacaacaacatataaacttccaaatcgagtagatggtactggatttgtggtgtatgatggtgctgtcttctttaacaaagaaagaacgaggaatattgtgaaatttgacttgaggactagaattaagagtggcgaggccataattaactatgccaactaccatgatacctcaccatacagatggggaggaaagactgatatcgacctagcagttgatgaaaatggtttatgggtcatttacgccactgaacagaacaatggaatgatagttattagccagctgaatccatacactcttcgatttgaagcaacgtgggagactgtatacgacaaacgtgccgcatcaaatgcttttatgatatgcggagtcctctatgtggttaggtcagtttatcaagacaatgaaagtgaaacaggcaagaactcaattgattacatttataatacccgattaaaccgaggagaatatgtagatgttcccttccccaaccagtatcagtatattgctgcagtggattacaatccaagagataaccaactttacgtgtggaacaataacttcattttacgatattctctggagtttggtccacctgatcctgcccaagtgcctaccacagctgtgacaataacttcttcagctgagctgttcaaaaccataatatcaaccacaagcactacttcacagaaaggccccatgagcacaactgtagctggatcacaggaaggaagcaaagggacaaaaccacctccagcagtttctacaaccaaaattccacctataacaaatatttttcccctgccagagagattctgtgaagcattagactccaaggggataaagtggcctcagacacaaaggggaatgatggttgaacgaccatgccctaagggaacaagaggaactgcctcatatctctgcatgatttccactggaacatggaaccctaagggccccgatcttagcaactgtacctcacactgggtgaatcagctggctcagaagatcagaagcggagaaaatgctgctagtcttgccaatgaactggctaaacataccaaagggccagtgtttgctggggatgtaagttcttcagtgagattgatggagcagttggtggacatccttgatgcacagctgcaggaactgaaacctagtgaaaaagattcagctggacggagttataacaaggcaattgttgacacagtggacaaccttctgagacctgaagctttggaatcatggaaacatatgaattcttctgaacaagcacatactgcaacaatgttactcgatacattggaagaaggagcttttgtcctagctgacaatcttttagaaccaacaagggtctcaatgcccacagaaaatattgtcctggaagttgccgtactcagtacagaaggacagatccaagactttaaatttcctctgggcatcaaaggagcaggcagctcaatccaactgtccgcaaataccgtcaaacagaacagcaggaatgggcttgcaaagttggtgttcatcatttaccggagcctgggacagttccttagtacagaaaatgcaaccattaaactgggtgctgattttattggtcgtaatagcaccattgcagtgaactctcacgtcatttcagtttcaatcaataaagagtccagccgagtatacctgactgatcctgtgctttttaccctgccacacattgatcctgacaattatttcaatgcaaactgctccttctggaactactcagagagaactatgatgggatattggtctacccagggctgcaagctggttgacactaataaaactcgaacaacgtgtgcatgcagccacctaaccaattttgcaattctcatggcccacagggaaattgcatataaagatggcgttcatgaattacttcttacagtcatcacctgggtgggaattgtcatttcccttgtttgcctggctatctgcatcttcaccttctgctttttccgtggcctacagagtgaccgaaatactattcacaagaacctttgtatcaaccttttcattgctgaatttattttcctaataggcattgataagacaaaatatgcgattgcatgcccaatatttgcaggacttctacactttttctttttggcagcttttgcttggatgtgcctagaaggtgtgcagctctacctaatgttagttgaagtttttgaaagtgaatattcaaggaaaaaatattactatgttgctggttacttgtttcctgccacagtggttggagtttcagctgctattgactataagagctatggaacagaaaaagcttgctggcttcatgttgataactactttatatggagcttcattggacctgttaccttcattattctgctaaatattatcttcttggtgatcacattgtgcaaaatggtgaagcattcaaacactttgaaaccagattctagcaggttggaaaacattaagtcttgggtgcttggcgctttcgctcttctgtgtcttcttggcctcacctggtcctttgggttgctttttattaatgaggagactattgtgatggcatatctcttcactatatttaatgctttccagggagtgttcattttcatctttcactgtgctctccaaaagaaagtacgaaaagaatatggcaagtgcttcagacactcatactgctgtggaggcctcccaactgagagtccccacagttcagtgaaggcatcaaccaccagaaccagtgctcgctattcctctggcacacagagtcgtataagaagaatgtggaatgatactgtgagaaaacaatcagaatcttcttttatctcaggtgacatcaatagcacttcaacacttaatcaaggacattcactgaacaatgccagggatacaagtgccatggatactctaccgctaaatggtaattttaacaacagctactcgctgcacaagggtgactataatgacagcgtgcaagttgtggactgtggactaagtctgaatgatactgcttttgagaaaatgatcatttcagaattagtgcacaacaacttacggggcagcagcaagactcacaacctcgagctcacgctaccagtcaaacctgtgattggaggtagcagcagtgaagatgatgctattgtggcagatgcttcatctttaatgcacagcgacaacccagggctggagctccatcacaaagaactcgaggcaccacttattcctcagcggactcactcccttctgtaccaaccccagaagaaagtgaagtccgagggaactgacagctatgtctcccaactgacagcagaggctgaagatcacctacagtcccccaacagagactctctttatacaagcatgcccaatcttagagactctccctatccggagagcagccctgacatggaagaagacctctctccctccaggaggagtgagaatgaggacatttactataaaagcatgccaaatcttggagctggccatcagcttcagatgtgctaccagatcagcaggggcaatagtgatggttatataatccccattaacaaagaagggtgtattccagaaggagatgttagagaaggacaaatgcagctggttacaagtctttaatcatacagctaaggaattccaagggccacatgcgagtattaataaataaagacaccattggcctgacgcagctccctcaaactctgcttgaagagatgactcttgacctgtggttctctggtgtaaaaaagatgactgaaccttgcagttctgtgaatttttataaaacatacaaaaactttgtatatacacagagtatactaaagtgaattatttgttacaaagaaaagagatgccagccaggtattttaagattctgctgctgtttagagaaattgtgaaacaagcaaaacaaaactttccagccattttactgcagcagtctgtgaactaaatttgtaaatatggctgcaccatttttgtaggcctgcattgtattatatacaagacgtaggctttaaaatcctgtgggacaaatttactgtaccttactattcctgacaagacttggaaaagcaggagagatattctgcatcagtttgcagttcactgcaaatcttttacattaaggcaaagattgaaaacatgcttaaccactagcaatcaagccacaggccttatttcatatgtttcctcaactgtacaatgaactattctcatgaaaaatggctaaagaaattatattttgttctattgctagggtaaaataaatacatttgtgtccaactgaaatataattgtcattaaaataattttaaagagtgaagaaaatattgtgaaaagctcttggttgcacatgttatgaaatgttttttcttacactttgtcatggtaagttctactcattttcacttcttttccactgtatacagtgttctgctttgacaaagttagtctttattacttacatttaaatttcttattgccaaaagaacgtgttttatggggagaaacaaactctttgaagccagttatgtcatgccttgcacaaaagtgatgaaatctagaaaagattgtgtgtcacccctgtttattcttgaacagagggcaaagagggcactgggcacttctcacaaactttctagtgaacaaaaggtgcctattcttttttaaaaaaataaaataaaacataaatattactcttccatattccttctgcctatatttagtaattaatttattttatgataaagttctaatgaaatgtaaattgtttcagcaaaattctgcttttttttcatccctttgtgtaaacctgttaataatgagcccatcactaatatccagtgtaaagtttaacacggtttgacagtaaataaatgtgaattttttcaagtaaaaaaaaaaaaaaaaaa

SEQ ID NO: 11620 - DNA, 2048 bp, Homo sapiens
ggcggggcctgggcgcgccgagctccggctgggtccctgcaggtcttggggcccgggactcttcctggagacaccgccatggccgggctatcccgcgggtccgcgcgcgcactgctcgccgccctgctggcgtcgacgctgttggcgctgctcgtgtcgcccgcgcggggtcgcggcggccgggaccacggggactgggacgaggcctcccggctgccgccgctaccaccccgcgaggacgcggcgcgcgtggcccgcttcgtgacgcacgtctccgactggggcgctctggccaccatctccacgctggaggcggtgcgcggccggcccttcgccgacgtcctctcgctcagcgacgggcccccgggcgcgggcagcggcgtgccctatttctacctgagcccgctgcagctctccgtgagcaacctgcaggagaatccatatgctacactgaccatgactttggcacagaccaacttctgcaagaaacatggatttgatccacaaagtcccctttgtgttcacataatgctgtcaggaactgtgaccaaggtgaatgaaacagaaatggatattgcaaagcattcgttattcattcgacaccctgagatgaaaacctggccttccagccataattggttctttgctaagttgaatataaccaatatctgggtcctggactactttggtggaccaaaaatcgtgacaccagaagaatattataatgtcacagttcagtgaagcagactgtggtgaatttagcaacacttatgaagtttcttaaagtggctcatacacacttaaaaggcttaatgtttctctggaaagcgtcccagaatattagccagttttctgtcacatgctggtttgtttgcttgcttgtttacttgcttgtttaccaatagagttgacctgttattggatttcctggaagatgtggtagctacttttttcctattttgaagccattttcgtagagaaatatccttcactataatcaaataagttttgtcccatcaattccaaagatgtttccagtggtgctcttgaagaggaatgagtaccagttttaaattgcccattggcatttgaaggtagttgagtatgtgttctttattcctagaagccactgtgcttggtagagtgcatcactcaccacagctgcctcctgagctgcctgagcctggtgcaaaaggattggcccccattatggtgcttctgaataaatcttgccaagatagacaaacaatgatgaaactcagatggagcttcctactcacgttgatttatgtctcacaatcctgggtattgttaattcaacatagggtgaaactatttctgataaagaacttttgaaaaactttttatactctaaagtgatactcagaacaaaagaaagtcataaaactcctgaatttaatttccccacctaagtcgaaacagtattatcaaaacacatgtgcacacagattattttttggctccaaaactggattgcaaaagaaagaggagaagaatattttgtgtgttcctggtattcttttataagtaaagtttacccaggcatggaccagcttcagccagggacaaaatcccctcccaaaccactctccacagctttttaaaaatacttctactcttaacaattacctaaggcttcctcaactgccccaaatctcttaatagcttctagtgctgctacaatctaagtcaggtcaccagagggaagagaacatggcattaaaagaatcacatcttcagaagagaagacactaatattattacccatatacatgatttcagaagatgacataagattcctcttaaagaggaaatgtcaggaatcaagccactgaatccttaaagagaaaagttgaatatgagtcattgtgtctgaaaactgcaaagtgaacttaactgagatccagcaaacaggttctgtttaagaaaaataatttatactaaatttagtaaaatggacttcttattcaaagcatcaataattaaaagaattattttaatgaaaaaaaaaaaaaaaaaaaaaaaaa

SEQ ID NO: 11621 - DNA, 4195 bp, Homo sapiens
gccgagcaccgcgcaccgcgtcatgggggccgcctcgggccgccgggggccggggctgctgctgccgctgccgctgctgttgctgctgccgccgcagcccgccctggcgttggaccccgggctgcagcccggcaacttttctgctgacgaggccggggcgcagctcttcgcgcagagctacaactccagcgccgaacaggtgctgttccagagcgtggccgccagctgggcgcacgacaccaacatcaccgcggagaatgcaaggcgccaggaggaagcagccctgctcagccaggagtttgcggaggcctggggccagaaggccaaggagctgtatgaaccgatctggcagaacttcacggacccgcagctgcgcaggatcatcggagctgtgcgcaccctgggctctgccaacctgcccctggctaagcggcagcagtacaacgccctgctaagcaacatgagcaggatctactccaccgccaaggtctgcctccccaacaagactgccacctgctggtccctggacccagatctcaccaacatcctggcttcctcgcgaagctacgccatgctcctgtttgcctgggagggctggcacaacgctgcgggcatcccgctgaaaccgctgtacgaggatttcactgccctcagcaatgaagcctacaagcaggacggcttcacagacacgggggcctactggcgctcctggtacaactcccccaccttcgaggacgatctggaacacctctaccaacagctagagcccctctacctgaacctccatgccttcgtccgccgcgcactgcatcgccgatacggagacagatacatcaacctcaggggacccatccctgctcatctgctgggagacatgtgggcccagagctgggaaaacatctacgacatggtggtgcctttcccagacaagcccaacctcgatgtcaccagtactatgctgcagcagggctggaacgccacgcacatgttccgggtggcagaggagttcttcacctccctggagctctcccccatgcctcccgagttctgggaagggtcgatgctggagaagccggccgacgggcgggaagtggtgtgccacgcctcggcttgggacttctacaacaggaaagacttcaggatcaagcagtgcacacgggtcacgatggaccagctctccacagtgcaccatgagatgggccatatacagtactacctgcagtacaaggatctgcccgtctccctgcgtcggggggccaaccccggcttccatgaggccattggggacgtgctggcgctctcggtctccactcctgaacatctgcacaaaatcggcctgctggaccgtgtcaccaatgacacggaaagtgacatcaattacttgctaaaaatggcactggaaaaaattgccttcctgccctttggctacttggtggaccagtggcgctggggggtctttagtgggcgtacccccccttcccgctacaacttcgactggtggtatcttcgaaccaagtatcaggggatctgtcctcctgttacccgaaacgaaacccactttgatgctggagctaagtttcatgttccaaatgtgacaccatacatcaggtactttgtgagttttgtcctgcagttccagttccatgaagccctgtgcaaggaggcaggctatgagggcccactgcaccagtgtgacatctaccggtccaccaaggcaggggccaagctccggaaggtgctgcaggctggctcctccaggccctggcaggaggtgctgaaggacatggtcggcttagatgccctggatgcccagccgctgctcaagtacttccagccagtcacccagtggctgcaggagcagaaccagcagaacggcgaggtcctgggctggcccgagtaccagtggcacccgccgttgcctgacaactacccggagggcatagacctggtgactgatgaggctgaggccagcaagtttgtggaggaatatgaccggacatcccaggtggtgtggaacgagtatgccgaggccaactggaactacaacaccaacatcaccacagagaccagcaagattctgctgcagaagaacatgcaaatagccaaccacaccctgaagtacggcacccaggccaggaagtttgatgtgaaccagttgcagaacaccactatcaagcggatcataaagaaggttcaggacctagaacgggcagcactgcctgcccaggagctggaggagtacaacaagatcctgttggatatggaaaccacctacagcgtggccactgtgtgccacccgaatggcagctgcctgcagctcgagccagatctgacgaatgtgatggccacgtcccggaaatatgaagacctgttatgggcatgggagggctggcgagacaaggcggggagagccatcctccagttttacccgaaatacgtggaactcatcaaccaggctgcccggctcaatggctatgtagatgcaggggactcgtggaggtctatgtacgagacaccatccctggagcaagacctggagcggctcttccaggagctgcagccactctacctcaacctgcatgcctacgtgcgccgggccctgcaccgtcactacggggcccagcacatcaacctggaggggcccattcctgctcacctgctggggaacatgtgggcgcagacctggtccaacatctatgacttggtggtgcccttcccttcagccccctcgatggacaccacagaggctatgctaaagcagggctggacgcccaggaggatgtttaaggaggctgatgatttcttcacctccctggggctgctgcccgtgcctcctgagttctggaacaagtcgatgctggagaagccaaccgacgggcgggaggtggtctgccacgcctcggcctgggacttctacaacggcaaggacttccggatcaagcagtgcaccaccgtgaacttggaggacctggtggtggcccaccacgaaatgggccacatccagtatttcatgcagtacaaagacttacctgtggccttgagggagggtgccaaccccggcttccatgaggccattggggacgtgctagccctctcagtgtctacgcccaagcacctgcacagtctcaacctgctgagcagtgagggtggcagcgacgagcatgacatcaactttctgatgaagatggcccttgacaagatcgcctttatccccttcagctacctcgtcgatcagtggcgctggagggtatttgatggaagcatcaccaaggagaactataaccaggagtggtggagcctcaggctgaagtaccagggcctctgccccccagtgcccaggactcaaggtgactttgacccaggggccaagttccacattccttctagcgtgccttacatcaggtactttgtcagcttcatcatccagttccagttccacgaggcactgtgccaggcagctggccacacgggccccctgcacaagtgtgacatctaccagtccaaggaggccgggcagcgcctggcgaccgccatgaagctgggcttcagtaggccgtggccggaagccatgcagctgatcacgggccagcccaacatgagcgcctcggccatgttgagctacttcaagccgctgctggactggctccgcacggagaacgagctgcatggggagaagctgggctggccgcagtacaactggacgccgaactccgctcgctcagaagggcccctcccagacagcggccgcgtcagcttcctgggcctggacctggatgcgcagcaggcccgcgtgggccagtggctgctgctcttcctgggcatcgccctgctggtagccaccctgggcctcagccagcggctcttcagcatccgccaccgcagcctccaccggcactcccacgggccccagttcggctccgaggtggagctgagacactcctgaggtgacccggctgggtcggccctgcccaagggcctcccaccagagactgggatgggaacactggtgggcagctgaggacacaccccacaccccagcccaccctgctcctcctgccctgtccctgtccccctcccctcccagtcctccagaccaccagccgccccagccccttctcccagcacacggctgcctgacactgagccccacctctccaagtctctctgtgaatacaattaaaggtcctgccctccc

SEQ ID NO: 11622 - DNA, 14896 bp, Homo sapiens
cagcggtgcgagctccaggcccatgcactgaggaggcggaaacaaggggagcccccagagctccatcaagccccctccaaaggctcccctacccggtccacgccccccaccccccctccccgcctcctcccaattgtgcatttttgcagccggaggcggctccgagatggggctgtgagcttcgcccggggagggggaaagagcagcgaggagtgaagcgggggggtggggtgaagggtttggatttcggggcagggggcgcacccccgtcagcaggccctccccaaggggctcggaactctacctcttcacccacgcccctggtgcgctttgccgaaggaaagaataagaacagagaaggaggagggggaaaggaggaaaagggggaccccccaactggggggggtgaaggagagaagtagcaggaccagaggggaaggggctgctgcttgcatcagcccacaccatgctgaccccgccgttgctcctgctgctgcccctgctctcagctctggtcgcggcggctatcgacgcccctaagacttgcagccccaagcagtttgcctgcagagatcaaataacctgtatctcaaagggctggcggtgcgacggtgagagggactgcccagacggatctgacgaggcccctgagatttgtccacagagtaaggcccagcgatgccagccaaacgagcataactgcctgggtactgagctgtgtgttcccatgtcccgcctctgcaatggggtccaggactgcatggacggctcagatgaggggccccactgccgagagctccaaggcaactgctctcgcctgggctgccagcaccattgtgtccccacactcgatgggcccacctgctactgcaacagcagctttcagcttcaggcagatggcaagacctgcaaagattttgatgagtgctcagtgtacggcacctgcagccagctatgcaccaacacagacggctccttcatatgtggctgtgttgaaggatacctcctgcagccggataaccgctcctgcaaggccaagaacgagccagtagaccggccccctgtgctgttgatagccaactcccagaacatcttggccacgtacctgagtggggcccaggtgtctaccatcacacctacgagcacgcggcagaccacagccatggacttcagctatgccaacgagaccgtatgctgggtgcatgttggggacagtgctgctcagacgcagctcaagtgtgcccgcatgcctggcctaaagggcttcgtggatgagcacaccatcaacatctccctcagtctgcaccacgtggaacagatggccatcgactggctgacaggcaacttctactttgtggatgacatcgatgataggatctttgtctgcaacagaaatggggacacatgtgtcacattgctagacctggaactctacaaccccaagggcattgccctggaccctgccatggggaaggtgtttttcactgactatgggcagatcccaaaggtggaacgctgtgacatggatgggcagaaccgcaccaagctcgtcgacagcaagattgtgtttcctcatggcatcacgctggacctggtcagccgccttgtctactgggcagatgcctatctggactatattgaagtggtggactatgagggcaagggccgccagaccatcatccagggcatcctgattgagcacctgtacggcctgactgtgtttgagaattatctctatgccaccaactcggacaatgccaatgcccagcagaagacgagtgtgatccgtgtgaaccgctttaacagcaccgagtaccaggttgtcacccgggtggacaagggtggtgccctccacatctaccaccagaggcgtcagccccgagtgaggagccatgcctgtgaaaacgaccagtatgggaagccgggtggctgctctgacatctgcctgctggccaacagccacaaggcgcggacctgccgctgccgttccggcttcagcctgggcagtgacgggaagtcatgcaagaagccggagcatgagctgttcctcgtgtatggcaagggccggccaggcatcatccggggcatggatatgggggccaaggtcccggatgagcacatgatccccattgaaaacctcatgaacccccgagccctggacttccacgctgagaccggcttcatctactttgccgacaccaccagctacctcattggccgccagaagattgatggcactgagcgggagaccatcctgaaggacggcatccacaatgtggagggtgtggccgtggactggatgggagacaatctgtactggacggacgatgggcccaaaaagacaatcagcgtggccaggctggagaaagctgctcagacccgcaagactttaatcgagggcaaaatgacacaccccagggctattgtggtggatccactcaatgggtggatgtactggacagactgggaggaggaccccaaggacagtcggcgtgggcggctggagagggcgtggatggatggctcacaccgagacatctttgtcacctccaagacagtgctttggcccaatgggctaagcctggacatcccggctgggcgcctctactgggtggatgccttctacgaccgcatcgagacgatactgctcaatggcacagaccggaagattgtgtatgaaggtcctgagctgaaccacgcctttggcctgtgtcaccatggcaactacctcttctggactgagtatcggagtggcagtgtctaccgcttggaacggggtgtaggaggcgcaccccccactgtgacccttctgcgcagtgagcggccccccatctttgagatccgaatgtatgatgcccagcagcagcaagttggcaccaacaaatgccgggtgaacaatggcggctgcagcagcctgtgcttggccacccctgggagccgccagtgcgcctgtgctgaggaccaggtgttggacgcagacggcgtcacttgcttggcgaacccatcctacgtgcctccaccccagtgccagccaggcgagtttgcctgtgccaacagccgctgcatccaggagcgctggaagtgtgacggagacaacgattgcctggacaacagtgatgaggccccagccctctgccatcagcacacctgcccctcggaccgattcaagtgcgagaacaaccggtgcatccccaaccgctggctctgcgacggggacaatgactgtgggaacagtgaagatgagtccaatgccacttgttcagcccgcacctgcccccccaaccagttctcctgtgccagtggccgctgcatccccatctcctggacgtgtgatctggatgacgactgtggggaccgctctgatgagtctgcttcgtgtgcctatcccacctgcttccccctgactcagtttacctgcaacaatggcagatgtatcaacatcaactggagatgcgacaatgacaatgactgtggggacaacagtgacgaagccggctgcagccactcctgttctagcacccagttcaagtgcaacagcgggcgttgcatccccgagcactggacctgcgatggggacaatgactgcggagactacagtgatgagacacacgccaactgcaccaaccaggccacgaggccccctggtggctgccacactgatgagttccagtgccggctggatggactatgcatccccctgcggtggcgctgcgatggggacactgactgcatggactccagcgatgagaagagctgtgagggagtgacccacgtctgcgatcccagtgtcaagtttggctgcaaggactcagctcggtgcatcagcaaagcgtgggtgtgtgatggcgacaatgactgtgaggataactcggacgaggagaactgcgagtccctggcctgcaggccaccctcgcacccttgtgccaacaacacctcagtctgcctgccccctgacaagctgtgtgatggcaacgacgactgtggcgacggctcagatgagggcgagctctgcgaccagtgctctctgaataacggtggctgcagccacaactgctcagtggcacctggcgaaggcattgtgtgttcctgccctctgggcatggagctggggcccgacaaccacacctgccagatccagagctactgtgccaagcatctcaaatgcagccaaaagtgcgaccagaacaagttcagcgtgaagtgctcctgctacgagggctgggtcctggaacctgacggcgagagctgccgcagcctggaccccttcaagccgttcatcattttctccaaccgccatgaaatccggcgcatcgatcttcacaaaggagactacagcgtcctggtgcccggcctgcgcaacaccatcgccctggacttccacctcagccagagcgccctctactggaccgacgtggtggaggacaagatctaccgcgggaagctgctggacaacggagccctgactagtttcgaggtggtgattcagtatggcctggccacacccgagggcctggctgtagactggattgcaggcaacatctactgggtggagagtaacctggatcagatcgaggtggccaagctggatgggaccctccggaccaccctgctggccggtgacattgagcacccaagggcaatcgcactggatccccgggatgggatcctgttttggacagactgggatgccagcctgccccgcattgaggcagcctccatgagtggggctgggcgccgcaccgtgcaccgggagaccggctctgggggctggcccaacgggctcaccgtggactacctggagaagcgcatcctttggattgacgccaggtcagatgccatttactcagcccgttacgacggctctggccacatggaggtgcttcggggacacgagttcctgtcgcacccgtttgcagtgacgctgtacgggggggaggtctactggactgactggcgaacaaacacactggctaaggccaacaagtggaccggccacaatgtcaccgtggtacagaggaccaacacccagccctttgacctgcaggtgtaccacccctcccgccagcccatggctcccaatccctgtgaggccaatgggggccagggcccctgctcccacctgtgtctcatcaactacaaccggaccgtgtcctgcgcctgcccccacctcatgaagctccacaaggacaacaccacctgctatgagtttaagaagttcctgctgtacgcacgtcagatggagatccgaggtgtggacctggatgctccctactacaactacatcatctccttcacggtgcccgacatcgacaacgtcacagtgctagactacgatgcccgcgagcagcgtgtgtactggtctgacgtgcggacacaggccatcaagcgggccttcatcaacggcacaggcgtggagacagtcgtctctgcagacttgccaaatgcccacgggctggctgtggactgggtctcccgaaacctgttctggacaagctatgacaccaataagaagcagatcaatgtggcccggctggatggctccttcaagaacgcagtggtgcagggcctggagcagccccatggccttgtcgtccaccctctgcgtgggaagctctactggaccgatggtgacaacatcagcatggccaacatggatggcagcaatcgcaccctgctcttcagtggccagaagggccccgtgggcctggctattgacttccctgaaagcaaactctactggatcagctccgggaaccataccatcaaccgctgcaacctggatgggagtgggctggaggtcatcgatgccatgcggagccagctgggcaaggccaccgccctggccatcatgggggacaagctgtggtgggctgatcaggtgtcggaaaagatgggcacatgcagcaaggctgacggctcgggctccgtggtccttcggaacagcaccaccctggtgatgcacatgaaggtctatgacgagagcatccagctggaccataagggcaccaacccctgcagtgtcaacaacggtgactgctcccagctctgcctgcccacgtcagagacgacccgctcctgcatgtgcacagccggctatagcctccggagtggccagcaggcctgcgagggcgtaggttcctttctcctgtactctgtgcatgagggaatcaggggaattcccctggatcccaatgacaagtcagatgccctggtcccagtgtccgggacctcgctggctgtcggcatcgacttccacgctgaaaatgacaccatctactgggtggacatgggcctgagcacgatcagccgggccaagcgggaccagacgtggcgtgaagacgtggtgaccaatggcattggccgtgtggagggcattgcagtggactggatcgcaggcaacatctactggacagaccagggctttgatgtcatcgaggtcgcccggctcaatggctccttccgctacgtggtgatctcccagggtctagacaagccccgggccatcaccgtccacccggagaaagggtacttgttctggactgagtggggtcagtatccgcgtattgagcggtctcggctagatggcacggagcgtgtggtgctggtcaacgtcagcatcagctggcccaacggcatctcagtggactaccaggatgggaagctgtactggtgcgatgcacggacagacaagattgaacggatcgacctggagacaggtgagaaccgcgaggtggttctgtccagcaacaacatggacatgttttcagtgtctgtgtttgaggatttcatctactggagtgacaggactcatgccaacggctctatcaagcgcgggagcaaagacaatgccacagactccgtgcccctgcgaaccggcatcggcgtccagcttaaagacatcaaagtcttcaaccgggaccggcagaaaggcaccaacgtgtgcgcggtggccaatggcgggtgccagcagctgtgcctgtaccggggccgtgggcagcgggcctgcgcctgtgcccacgggatgctggctgaagacggagcatcgtgccgcgagtatgccggctacctgctctactcagagcgcaccattctcaagagtatccacctgtcggatgagcgcaacctcaatgcgcccgtgcagcccttcgaggaccctgagcacatgaagaacgtcatcgccctggcctttgactaccgggcaggcacctctccgggcacccccaatcgcatcttcttcagcgacatccactttgggaacatccaacagatcaacgacgatggctccaggaggatcaccattgtggaaaacgtgggctccgtggaaggcctggcctatcaccgtggctgggacactctctattggacaagctacacgacatccaccatcacgcgccacacagtggaccagacccgcccaggggccttcgagcgtgagaccgtcatcactatgtctggagatgaccacccacgggccttcgttttggacgagtgccagaacctcatgttctggaccaactggaatgagcagcatcccagcatcatgcgggcggcgctctcgggagccaatgtcctgacccttatcgagaaggacatccgtacccccaatggcctggccatcgaccaccgtgccgagaagctctacttctctgacgccaccctggacaagatcgagcggtgcgagtatgacggctcccaccgctatgtgatcctaaagtcagagcctgtccaccccttcgggctggccgtgtatggggagcacattttctggactgactgggtgcggcgggcagtgcagcgggccaacaagcacgtgggcagcaacatgaagctgctgcgcgtggacatcccccagcagcccatgggcatcatcgccgtggccaacgacaccaacagctgtgaactctctccatgccgaatcaacaacggtggctgccaggacctgtgtctgctcactcaccagggccatgtcaactgctcatgccgagggggccgaatcctccaggatgacctcacctgccgagcggtgaattcctcttgccgagcacaagatgagtttgagtgtgccaatggcgagtgcatcaacttcagcctgacctgcgacggcgtcccccactgcaaggacaagtccgatgagaagccatcctactgcaactcccgccgctgcaagaagactttccggcagtgcagcaatgggcgctgtgtgtccaacatgctgtggtgcaacggggccgacgactgtggggatggctctgacgagatcccttgcaacaagacagcctgtggtgtgggcgagttccgctgccgggacgggacctgcatcgggaactccagccgctgcaaccagtttgtggattgtgaggacgcctcagatgagatgaactgcagtgccaccgactgcagcagctacttccgcctgggcgtgaagggcgtgctcttccagccctgcgagcggacctcactctgctacgcacccagctgggtgtgtgatggcgccaatgactgtggggactacagtgatgagcgcgactgcccaggtgtgaaacgccccagatgccctctgaattacttcgcctgccctagtgggcgctgcatccccatgagctggacgtgtgacaaagaggatgactgtgaacatggcgaggacgagacccactgcaacaagttctgctcagaggcccagtttgagtgccagaaccatcgctgcatctccaagcagtggctgtgtgacggcagcgatgactgtggggatggctcagacgaggctgctcactgtgaaggcaagacgtgcggcccctcctccttctcctgccctggcacccacgtgtgcgtccccgagcgctggctctgtgacggtgacaaagactgtgctgatggtgcagacgagagcatcgcagctggttgcttgtacaacagcacttgtgacgaccgtgagttcatgtgccagaaccgccagtgcatccccaagcacttcgtgtgtgaccacgaccgtgactgtgcagatggctctgatgagtcccccgagtgtgagtacccgacctgcggccccagtgagttccgctgtgccaatgggcgctgtctgagctcccgccagtgggagtgtgatggcgagaatgactgccacgaccagagtgacgaggctcccaagaacccacactgcaccagcccagagcacaagtgcaatgcctcgtcacagttcctgtgcagcagtgggcgctgtgtggctgaggcactgctctgcaacggccaggatgactgtggcgacagctcggacgagcgtggctgccacatcaatgagtgtctcagccgcaagctcagtggctgcagccaggactgtgaggacctcaagatcggcttcaagtgccgctgtcgccctggcttccggctgaaggatgacggccggacgtgtgctgatgtggacgagtgcagcaccaccttcccctgcagccagcgctgcatcaacacccatggcagctataagtgtctgtgtgtggagggctatgcaccccgcggcggcgacccccacagctgcaaggctgtgactgacgaggaaccgtttctgatcttcgccaaccggtactacctgcgcaagctcaacctggacgggtccaactacacgttacttaagcagggcctgaacaacgccgttgccttggattttgactaccgagagcagatgatctactggacagatgtgaccacccagggcagcatgatccgaaggatgcaccttaacgggagcaatgtgcaggtcctacaccgtacaggcctcagcaaccccgatgggctggctgtggactgggtgggtggcaacctgtactggtgcgacaaaggccgggacaccatcgaggtgtccaagctcaatggggcctatcggacggtgctggtcagctctggcctccgtgagcccagggctctggtggtggatgtgcagaatgggtacctgtactggacagactggggtgaccattcactgatcggccgcatcggcatggatgggtccagccgcagcgtcatcgtggacaccaagatcacatggcccaatggcctgacgctggactatgtcactgagcgcatctactgggccgacgcccgcgaggactacattgaatttgccagcctggatggctccaatcgccacgttgtgctgagccaggacatcccgcacatctttgcactgaccctgtttgaggactacgtctactggaccgactgggaaacaaagtccattaaccgagcccacaagaccacgggcaccaacaaaacgctcctcatcagcacgctgcaccggcccatggacctgcatgtcttccatgccctgcgccagccagacgtgcccaatcacccctgcaaggtcaacaatggtggctgcagcaacctgtgcctgctgtcccccgggggagggcacaaatgtgcctgccccaccaacttctacctgggcagcgatgggcgcacctgtgtgtccaactgcacggctagccagtttgtatgcaagaacgacaagtgcatccccttctggtggaagtgtgacaccgaggacgactgcggggaccactcagacgagcccccggactgccctgagttcaagtgccggcccggacagttccagtgctccacaggtatctgcacaaaccctgccttcatctgcgatggcgacaatgactgccaggacaacagtgacgaggccaactgtgacatccacgtctgcttgcccagtcagttcaaatgcaccaacaccaaccgctgtattcccggcatcttccgctgcaatgggcaggacaactgcggagatggggaggatgagagggactgccccgaggtgacctgcgcccccaaccagttccagtgctccattaccaaacggtgcatcccccgggtctgggtctgcgaccgggacaatgactgtgtggatggcagtgatgagcccgccaactgcacccagatgacctgtggtgtggacgagttccgctgcaaggattcgggccgctgcatcccagcgcgttggaagtgtgacggagaggatgactgtggggatggctcggatgagcccaaggaagagtgtgatgaacgcacctgtgagccataccagttccgctgcaagaacaaccgctgcgtgcccggccgctggcagtgcgactacgacaacgattgcggtgacaactccgatgaagagagctgcacccctcggccctgctccgagagtgagttctcctgtgccaacggccgctgcatcgcggggcgctggaaatgcgatggagaccacgactgcgcggacggctcggacgagaaagactgcaccccccgctgtgacatggaccagttccagtgcaagagcggccactgcatccccctgcgctggcgctgtgacgcagacgccgactgcatggacggcagcgacgaggaggcctgcggcactggcgtgcggacctgccccctggacgagttccagtgcaacaacaccttgtgcaagccgctggcctggaagtgcgatggcgaggatgactgtggggacaactcagatgagaaccccgaggagtgtgcccggttcgtgtgccctcccaaccggcccttccgttgcaagaatgaccgcgtctgtctgtggatcgggcgccaatgcgatggcacggacaactgtggggatgggactgatgaagaggactgtgagccccccacagcccacaccacccactgcaaagacaagaaggagtttctgtgccggaaccagcgctgcctctcctcctccctgcgctgcaacatgttcgatgactgcggggacggctctgacgaggaggactgcagcatcgaccccaagctgaccagctgcgccaccaatgccagcatctgtggggacgaggcacgctgcgtgcgcaccgagaaagcggcctactgtgcctgccgctcgggcttccacaccgtgcccggccagcccggatgccaagacatcaacgagtgcctgcgcttcggcacctgctcccagctctgcaacaacaccaagggcggccacctctgcagctgcgctcggaacttcatgaagacgcacaacacctgcaaggccgaaggctctgagtaccaggtcctgtacatcgctgatgacaatgagatccgcagcctgttccccggccacccccattcggcttacgagcaggcattccagggtgacgagagtgtccgcattgatgctatggatgtccatgtcaaggctggccgtgtctattggaccaactggcacacgggcaccatctcctaccgcagcctgccacctgctgcgcctcctaccacttccaaccgccaccggcgacagattgaccggggtgtcacccacctcaacatttcagggctgaagatgcccagaggcatcgccatcgactgggtggccggaaacgtgtactggaccgactcgggccgagatgtgattgaggtggcgcagatgaagggcgagaaccgcaagacgctcatctcgggcatgattgacgagccccacgccattgtggtggacccactgagggggaccatgtactggtcagactggggcaaccaccccaagattgagacggcagcgatggatgggacgcttcgggagacactggtgcaggacaacattcagtggcccacaggcctggccgtggattatcacaatgagcggctgtactgggcagacgccaagctttcagtcatcggcagcatccggctcaatggcacggaccccattgtggctgctgacagcaaacgaggcctaagtcaccccttcagcatcgacgtctttgaggattacatctatggtgtcacctacatcaataatcgtgtcttcaagatccataagtttggccacagccccttggtcaacctgacagggggcctgagccacgcctctgacgtggtcctttaccatcagcacaagcagcccgaagtgaccaacccatgtgaccgcaagaaatgcgagtggctctgcctgctgagccccagtgggcctgtctgcacctgtcccaatgggaagcggctggacaacggcacatgcgtgcctgtgccctctccaacgccccccccagatgctccccggcctggaacctgtaacctgcagtgcttcaacggtggcagctgtttcctcaatgcacggaggcagcccaagtgccgctgccaaccccgctacacgggtgacaagtgtgaactggaccagtgctgggagcactgtcgcaatgggggcacctgtgctgcctccccctctggcatgcccacgtgccggtgccccacgggcttcacgggccccaaatgcacccagcaggtgtgtgcgggctactgtgccaacaacagcacctgcactgtcaaccagggcaaccagccccagtgccgatgcctacccggcttcctgggcgaccgctgccagtaccggcagtgctctggctactgtgagaactttggcacatgccagatggctgctgatggctcccgacaatgccgctgcactgcctactttgagggatcgaggtgtgaggtgaacaagtgcagccgctgtctcgaaggggcctgtgtggtcaacaagcagagtggggatgtcacctgcaactgcacggatggccgggtggcccccagctgtctgacctgcgtcggccactgcagcaatggcggctcctgtaccatgaacagcaaaatgatgcctgagtgccagtgcccaccccacatgacagggccccggtgtgaggagcacgtcttcagccagcagcagccaggacatatagcctccatcctaatccctctgctgttgctgctgctgctggttctggtggccggagtggtattctggtataagcggcgagtccaaggggctaagggcttccagcaccaacggatgaccaacggggccatgaacgtggagattggaaaccccacctacaagatgtacgaaggcggagagcctgatgatgtgggaggcctactggacgctgactttgccctggaccctgacaagcccaccaacttcaccaaccccgtgtatgccacactctacatggggggccatggcagtcgccactccctggccagcacggacgagaagcgagaactcctgggccggggccctgaggacgagataggggaccccttggcatagggccctgccccgtcggactgcccccagaaagcctcctgccccctgccggtgaagtccttcagtgagcccctccccagccagcccttccctggccccgccggatgtataaatgtaaaaatgaaggaattacattttatatgtgagcgagcaagccggcaagcgagcacagtattatttctccatcccctccctgcctgctccttggcacccccatgctgccttcagggagacaggcagggagggcttggggctgcacctcctaccctcccaccagaacgcaccccactgggagagctggtggtgcagccttcccctccctgtataagacactttgccaaggctctcccctctcgccccatccctgcttgcccgctcccacagcttcctgagggctaattctgggaagggagagttctttgctgcccctgtctggaagacgtggctctgggtgaggtaggcgggaaaggatggagtgttttagttcttgggggaggccaccccaaaccccagccccaactccaggggcacctatgagatggccatgctcaacccccctcccagacaggccctccctgtctccagggcccccaccgaggttcccagggctggagacttcctctggtaaacattcctccagcctcccctcccctggggacgccaaggaggtgggccacacccaggaagggaaagcgggcagccccgttttggggacgtgaacgttttaataatttttgctgaattctttacaactaaataacacagatattcttataaataaaattgtaaaaaaaaaaa

SEQ ID NO: 11623 - DNA, 4294 bp, Homo sapiens
ctacgctcttccagctgtcggacctgggaaattctcctgtgctaaatcccgtggcgctcgcgggtgtcgccgcggtgcatcctgggagttgtagttttttctactcagagggagaatagctccagacgggagcaggacgctgagagaactacatgcaggaggcggggtccagggcgagggatctacgcagcttgcggtggcgaaggcggctttagtggcagcatgaagcgcaccccgactgccgaggaacgagagcgcgaagctaagaaactgaggcttcttgaagagcttgaagacacttggctcccttatctgacccccaaagatgatgaattctatcagcagtggcagctgaaatatcctaaactaattctccgagaagccagcagtgtatctgaggagctccataaagaggttcaagaagcctttctcacactgcacaagcatggctgcttatttcgggacctggttaggatccaaggcaaagatctgctcactccggtatctcgcatcctcattggtaatccaggctgcacctacaagtacctgaacaccaggctctttacggtcccctggccagtgaaagggtctaatataaaacacaccgaggctgaaatagccgctgcttgtgagaccttcctcaagctcaatgactacctgcagatagaaaccatccaggctttggaagaacttgctgccaaagagaaggctaatgaggatgctgtgccattgtgtatgtctgcagatttccccagggttgggatgggttcatcctacaacggacaagatgaagtggacattaagagcagagcagcatacaacgtaactttgctgaatttcatggatcctcagaaaatgccatacctgaaagaggaaccttattttggcatggggaaaatggcagtgagctggcatcatgatgaaaatctggtggacaggtcagcggtggcagtgtacagttatagctgtgaaggccctgaagaggaaagtgaggatgactctcatctcgaaggcagggatcctgatatttggcatgttggttttaagatctcatgggacatagagacacctggtttggcgataccccttcaccaaggagactgctatttcatgcttgatgatctcaatgccacccaccaacactgtgttttggccggttcacaacctcggtttagttccacccaccgagtggcagagtgctcaacaggaaccttggattatattttacaacgctgtcagttggctctgcagaatgtctgtgacgatgtggacaatgatgatgtctctttgaaatcctttgagcctgcagttttgaaacaaggagaagaaattcataatgaggtcgagtttgagtggctgaggcagttttggtttcaaggcaatcgatacagaaagtgcactgactggtggtgtcaacccatggctcaactggaagcactgtggaagaagatggagggtgtgacaaatgctgtgcttcatgaagttaaaagagaggggctccccgtggaacaaaggaatgaaatcttgactgccatccttgcctcgctcactgcacgccagaacctgaggagagaatggcatgccaggtgccagtcacgaattgcccgaacattacctgctgatcagaagccagaatgtcggccatactgggaaaaggatgatgcttcgatgcctctgccgtttgacctcacagacatcgtttcagaactcagaggtcagcttctggaagcaaaaccctagaaggagcacaagtctcaggcggaggagaaaaagagatcggcttttctcctccaacgttgtcatgggcttaagcaagagcagtggagacttctcttggcccctagattgtagcacccgggtcccaatccaaaacagctaggaaatggtgcccatgaagttttaaatgttttaaaatgaccctgtgttatagtctgatttggtgttaaacaggaccttcttcccccaaaattgttcagattataaaatgtgagccattcagcccccaaggtccagggcaggcgacaggaacgagcccagcgtgtgacaaagcctaacctactttcctctttcccaagctttttcagagactctggagtggacccagccctctggggaaagacagaacttagagacatcccagttactcaccacacccatagtgctgtccaatatggtagccactagctagctgtggctacttcaatttaaattcagttttaattttaattaaaaatgcagctcttcagtcgccctggccacatttcaagtgcttaacagcctcatgtggctagtgactgctgtattggacggtacagatatggaacattttcatcatcgaagaaagtcctattggacaacacttctataaaaagtttgagagcaggaattctcatttccattcgtctgtagcttctatccccaaaggcaaagaaactaaaagagaaatgactcattgaagattggcctctttcctttctctaagacaaacctaagtaaaagcctgagctttgagtcctatgctcagcacacgggaaggagatgttaataattaaaataaagttgatatcctgtctttagggagttcccttgatctcttgaaagagacacagccccatttacattatttcgtggatttcaccagcatagtatagtttttttctgtaagtccctcattcttatgtaataacaggtggaactgaggtttgaagaacctcagtggcccatcctgatgacattggagactcaaagagacaagagagagtagggtttaaaacctgagctttaagactcccactagcttcgtgtcctttggcatgttaacgtgcctcagtttcctcatctgtataatggggatatatgaaaggcaccagtcctaaggtgaacattaagtgagatgattctagttacagacttagaacaatttccagcacatagttaaatatccaggaaattctggtactgttatgtgtgggtgagctgacctggatgtagatgttttcctctctcttgctgacccctccgccagttttgtcttgtgatgccattaacacatctctccctttctgacctggctcctgcccattggtgtcccaagaaatcgtgagaatagttagccccccgtctccccagcctgttgctttctcgtgtagttgttcacagtagttgagaagttgaagagcttttgcctattgaaggtgcactgagaataaactctttcctgccaccagaattgcagtggttcacggcctgcactcattcccatgaatgcagttaatagccacagaaatgtcacattaagcaaagcagccagggtctcatcgtgttgagactcgagtctctcagaccttggattcattccctggtgtctttgagcctcagtttcctcattggtaaaagagaagtgaagcagtgtctcacagggtcattacagagattaaatgaaataaatgaaataacatagaccaggagggcgtggtgtttaaaagtcacagatggggcaccctcgggccatccagcccagtgttttctttagcccctatgatgttcattttttgttatatcccattaggtgcccatatttaaaaattgggagatttcacataaaattaaaaggtctgcattttcttttttcttttctttttttttttttttgagacacagtctcactctgtcaccaggctagagtgcagtggcacgatctcagctcactgcaacctctgcctcccaggttcaagtaattctcctgcctcagcctcccaagtagctgggactacaggcacgtgccaccacgcccagctaatttttgtatttttagcagagatggggtttcaccacattggccaggatggtctcgatctcaacctcgtgatccacccacctcggtctcccaaagcgctgggattacaggcgtgagccaccgcgccaagccaaggtctgcatttttctttagaactcagaacacccaatagtcctaggcccccatcctcgcatggcagcaagctaaataagcatcttcccactgcgagttggggcatgacccagcctatggtttgccatactccctctttttctccgttttttcattaattgtgaacctgacctgcatcaccctttcatgtcagtgctctccaaacctgcttgcttgcacccctctagtcgaaatattttgtgcttaccccaatatatgtgtgtgactattgaactctattcgtagactgcttgtactaatgtcatttgcatcataaaatattcatatccaataaacatattaaaaggatgagataagaaaccgaga

SEQ ID NO: 11624 - DNA, 8765 bp, Homo sapiens
ggacagcgccgaggaggaagaggttgatggcggcggcggagctccgagagacctcggctgggcaggggccggccgtggcgggccggggactgcgcctctagagccgcgagttctcgggaattcgccgcagcggacgcgctcggcgaatttgtgctcttgtgccctcctccgggcttgggcccaggcccggcccctcgcacttgcccttaccttttctatcgagtccgcatccctctccagccactgcgacccggcgaagagaaaaaggaacttcccccaccccctcgggtgccgtcggagccccccagcccacccctgggtgcggcgcggggaccccgggccgaagaagagatttcctgaggattctggttttcctcgcttgtatctccgaaagaattaaaaatggccgagaatgtggtggaaccggggccgccttcagccaagcggcctaaactctcatctccggccctctcggcgtccgccagcgatggcacagattttggctctctatttgacttggagcacgacttaccagatgaattaatcaactctacagaattgggactaaccaatggtggtgatattaatcagcttcagacaagtcttggcatggtacaagatgcagcttctaaacataaacagctgtcagaattgctgcgatctggtagttcccctaacctcaatatgggagttggtggcccaggtcaagtcatggccagccaggcccaacagagcagtcctggattaggtttgataaatagcatggtcaaaagcccaatgacacaggcaggcttgacttctcccaacatggggatgggcactagtggaccaaatcagggtcctacgcagtcaacaggtatgatgaacagtccagtaaatcagcctgccatgggaatgaacacagggatgaatgcgggcatgaatcctggaatgttggctgcaggcaatggacaagggataatgcctaatcaagtcatgaacggttcaattggagcaggccgagggcgacagaatatgcagtacccaaacccaggcatgggaagtgctggcaacttactgactgagcctcttcagcagggctctccccagatgggaggacaaacaggattgagaggcccccagcctcttaagatgggaatgatgaacaaccccaatccttatggttcaccatatactcagaatcctggacagcagattggagccagtggccttggtctccagattcagacaaaaactgtactatcaaataacttatctccatttgctatggacaaaaaggcagttcctggtggaggaatgcccaacatgggtcaacagccagccccgcaggtccagcagccaggcctggtgactccagttgcccaagggatgggttctggagcacatacagctgatccagagaagcgcaagctcatccagcagcagcttgttctccttttgcatgctcacaagtgccagcgccgggaacaggccaatggggaagtgaggcagtgcaaccttccccactgtcgcacaatgaagaatgtcctaaaccacatgacacactgccagtcaggcaagtcttgccaagtggcacactgtgcatcttctcgacaaatcatttcacactggaagaattgtacaagacatgattgtcctgtgtgtctccccctcaaaaatgctggtgataagagaaatcaacagccaattttgactggagcacccgttggacttggaaatcctagctctctaggggtgggtcaacagtctgcccccaacctaagcactgttagtcagattgatcccagctccatagaaagagcctatgcagctcttggactaccctatcaagtaaatcagatgccgacacaaccccaggtgcaagcaaagaaccagcagaatcagcagcctgggcagtctccccaaggcatgcggcccatgagcaacatgagtgctagtcctatgggagtaaatggaggtgtaggagttcaaacgccgagtcttctttctgactcaatgttgcattcagccataaattctcaaaacccaatgatgagtgaaaatgccagtgtgccctccctgggtcctatgccaacagcagctcaaccatccactactggaattcggaaacagtggcacgaagatattactcaggatcttcgaaatcatcttgttcacaaactcgtccaagccatatttcctacgccggatcctgctgctttaaaagacagacggatggaaaacctagttgcatatgctcggaaagttgaaggggacatgtatgaatctgcaaacaatcgagcggaatactaccaccttctagctgagaaaatctataagatccagaaagaactagaagaaaaacgaaggaccagactacagaagcagaacatgctaccaaatgctgcaggcatggttccagtttccatgaatccagggcctaacatgggacagccgcaaccaggaatgacttctaatggccctctacctgacccaagtatgatccgtggcagtgtgccaaaccagatgatgcctcgaataactccacaatctggtttgaatcaatttggccagatgagcatggcccagccccctattgtaccccggcaaacccctcctcttcagcaccatggacagttggctcaacctggagctctcaacccgcctatgggctatgggcctcgtatgcaacagccttccaaccagggccagttccttcctcagactcagttcccatcacagggaatgaatgtaacaaatatccctttggctccgtccagcggtcaagctccagtgtctcaagcacaaatgtctagttcttcctgcccggtgaactctcctataatgcctccagggtctcaggggagccacattcactgtccccagcttcctcaaccagctcttcatcagaattcaccctcgcctgtacctagtcgtacccccacccctcaccatactcccccaagcataggggctcagcagccaccagcaacaacaattccagcccctgttcctacacctcctgccatgccacctgggccacagtcccaggctctacatccccctccaaggcagacacctacaccaccaacaacacaacttccccaacaagtgcagccttcacttcctgctgcaccttctgctgaccagccccagcagcagcctcgctcacagcagagcacagcagcgtctgttcctaccccaacagcaccgctgcttcctccgcagcctgcaactccactttcccagccagctgtaagcattgaaggacaggtatcaaatcctccatctactagtagcacagaagtgaattctcaggccattgctgagaagcagccttcccaggaagtgaagatggaggccaaaatggaagtggatcaaccagaaccagcagatactcagccggaggatatttcagagtctaaagtggaagactgtaaaatggaatctaccgaaacagaagagagaagcactgagttaaaaactgaaataaaagaggaggaagaccagccaagtacttcagctacccagtcatctccggctccaggacagtcaaagaaaaagattttcaaaccagaagaactacgacaggcactgatgccaactttggaggcactttaccgtcaggatccagaatcccttccctttcgtcaacctgtggaccctcagcttttaggaatccctgattactttgatattgtgaagagccccatggatctttctaccattaagaggaagttagacactggacagtatcaggagccctggcagtatgtcgatgatatttggcttatgttcaataatgcctggttatataaccggaaaacatcacgggtatacaaatactgctccaagctctctgaggtctttgaacaagaaattgacccagtgatgcaaagccttggatactgttgtggcagaaagttggagttctctccacagacactgtgttgctacggcaaacagttgtgcacaatacctcgtgatgccacttattacagttaccagaacaggtatcatttctgtgagaagtgtttcaatgagatccaaggggagagcgtttctttgggggatgacccttcccagcctcaaactacaataaataaagaacaattttccaagagaaaaaatgacacactggatcctgaactgtttgttgaatgtacagagtgcggaagaaagatgcatcagatctgtgtccttcaccatgagatcatctggcctgctggattcgtctgtgatggctgtttaaagaaaagtgcacgaactaggaaagaaaataagttttctgctaaaaggttgccatctaccagacttggcacctttctagagaatcgtgtgaatgactttctgaggcgacagaatcaccctgagtcaggagaggtcactgttagagtagttcatgcttctgacaaaaccgtggaagtaaaaccaggcatgaaagcaaggtttgtggacagtggagagatggcagaatcctttccataccgaaccaaagccctctttgcctttgaagaaattgatggtgttgacctgtgcttctttggcatgcatgttcaagagtatggctctgactgccctccacccaaccagaggagagtatacatatcttacctcgatagtgttcatttcttccgtcctaaatgcttgaggactgcagtctatcatgaaatcctaattggatatttagaatatgtcaagaaattaggttacacaacagggcatatttgggcatgtccaccaagtgagggagatgattatatcttccattgccatcctcctgaccagaagatacccaagcccaagcgactgcaggaatggtacaaaaaaatgcttgacaaggctgtatcagagcgtattgtccatgactacaaggatatttttaaacaagctactgaagatagattaacaagtgcaaaggaattgccttatttcgagggtgatttctggcccaatgttctggaagaaagcattaaggaactggaacaggaggaagaagagagaaaacgagaggaaaacaccagcaatgaaagcacagatgtgaccaagggagacagcaaaaatgctaaaaagaagaataataagaaaaccagcaaaaataagagcagcctgagtaggggcaacaagaagaaacccgggatgcccaatgtatctaacgacctctcacagaaactatatgccaccatggagaagcataaagaggtcttctttgtgatccgcctcattgctggccctgctgccaactccctgcctcccattgttgatcctgatcctctcatcccctgcgatctgatggatggtcgggatgcgtttctcacgctggcaagggacaagcacctggagttctcttcactccgaagagcccagtggtccaccatgtgcatgctggtggagctgcacacgcagagccaggaccgctttgtctacacctgcaatgaatgcaagcaccatgtggagacacgctggcactgtactgtctgtgaggattatgacttgtgtatcacctgctataacactaaaaaccatgaccacaaaatggagaaactaggccttggcttagatgatgagagcaacaaccagcaggctgcagccacccagagcccaggcgattctcgccgcctgagtatccagcgctgcatccagtctctggtccatgcttgccagtgtcggaatgccaattgctcactgccatcctgccagaagatgaagcgggttgtgcagcataccaagggttgcaaacggaaaaccaatggcgggtgccccatctgcaagcagctcattgccctctgctgctaccatgccaagcactgccaggagaacaaatgcccggtgccgttctgcctaaacatcaagcagaagctccggcagcaacagctgcagcaccgactacagcaggcccaaatgcttcgcaggaggatggccagcatgcagcggactggtgtggttgggcagcaacagggcctcccttcccccactcctgccactccaacgacaccaactggccaacagccaaccaccccgcagacgccccagcccacttctcagcctcagcctacccctcccaatagcatgccaccctacttgcccaggactcaagctgctggccctgtgtcccagggtaaggcagcaggccaggtgacccctccaacccctcctcagactgctcagccaccccttccagggcccccacctgcagcagtggaaatggcaatgcagattcagagagcagcggagacgcagcgccagatggcccacgtgcaaatttttcaaaggccaatccaacaccagatgcccccgatgactcccatggcccccatgggtatgaacccacctcccatgaccagaggtcccagtgggcatttggagccagggatgggaccgacagggatgcagcaacagccaccctggagccaaggaggattgcctcagccccagcaactacagtctgggatgccaaggccagccatgatgtcagtggcccagcatggtcaacctttgaacatggctccacaaccaggattgggccaggtaggtatcagcccactcaaaccaggcactgtgtctcaacaagccttacaaaaccttttgcggactctcaggtctcccagctctcccctgcagcagcaacaggtgcttagtatccttcacgccaacccccagctgttggctgcattcatcaagcagcgggctgccaagtatgccaactctaatccacaacccatccctgggcagcctggcatgccccaggggcagccagggctacagccacctaccatgccaggtcagcagggggtccactccaatccagccatgcagaacatgaatccaatgcaggcgggcgttcagagggctggcctgccccagcagcaaccacagcagcaactccagccacccatgggagggatgagcccccaggctcagcagatgaacatgaaccacaacaccatgccttcacaattccgagacatcttgagacgacagcaaatgatgcaacagcagcagcaacagggagcagggccaggaataggccctggaatggccaaccataaccagttccagcaaccccaaggagttggctacccaccacagcagcagcagcggatgcagcatcacatgcaacagatgcaacaaggaaatatgggacagataggccagcttccccaggccttgggagcagaggcaggtgccagtctacaggcctatcagcagcgactccttcagcaacagatggggtcccctgttcagcccaaccccatgagcccccagcagcatatgctcccaaatcaggcccagtccccacacctacaaggccagcagatccctaattctctctccaatcaagtgcgctctccccagcctgtcccttctccacggccacagtcccagcccccccactccagtccttccccaaggatgcagcctcagccttctccacaccacgtttccccacagacaagttccccacatcctggactggtagctgcccaggccaaccccatggaacaagggcattttgccagcccggaccagaattcaatgctttctcagcttgctagcaatccaggcatggcaaacctccatggtgcaagcgccacggacctgggactcagcaccgataactcagacttgaattcaaacctctcacagagtacactagacatacactagagacaccttgtagtattttgggagcaaaaaaattattttctcttaacaagactttttgtactgaaaacaatttttttgaatctttcgtagcctaaaagacaattttccttggaacacataagaactgtgcagtagccgtttgtggtttaaagcaaacatgcaagatgaacctgagggatgatagaatacaaagaatatatttttgttatggctggttaccaccagcctttcttcccctttgtgtgtgtggttcaagtgtgcactgggaggaggctgaggcctgtgaagccaaacaatatgctcctgccttgcacctccaataggttttattattttttttaaattaatgaacatatgtaatattaatagttattatttactggtgcagatggttgacatttttccctattttcctcactttatggaagagttaaaacatttctaaaccagaggacaaaaggggttaatgttactttaaaattacattctatatatatataaatatatataaatatatattaaaataccagttttttttctctgggtgcaaagatgttcattcttttaaaaaatgtttaaaaaaaaaaaaaaactgcctttcttcccctcaagtcaacttttgtgctccagaaaattttctattctgtaagtctgagcgtaaaacttcaagtattaaaataatttgtacatgtagagagaaaaatgactttttcaaaaatatacaggggcagctgccaaattgatgtattatatattgtggtttctgtttcttgaaagaatttttttcgttatttttacatctaacaaagtaaaaaaattaaaaagagggtaagaaacgattccggtgggatgattttaacatgcaaaatgtccctgggggtttcttctttgcttgctttcttcctccttaccctaccccccactcacacacacacacacacacacacacacacacacacacacacactttctataaaacttgaaaatagcaaaaaccctcaactgttgtaaatcatgcaattaaagttgattacttataaatatgaactttggatcactgtatagactgttaaatttgatttcttattacctattgttaaataaactgtgtgagacag

SEQ ID NO: 11625 - DNA, 11386 bp, Homo sapiens
gtggcgcgagcttctgaaactaggcggcagaggcggagccgctgtggcactgctgcgcctctgctgcgcctcgggtgtcttttgcggcggtgggtcgccgccgggagaagcgtgaggggacagatttgtgaccggcgcggtttttgtcagcttactccggccaaaaaagaactgcacctctggagcggacttatttaccaagcattggaggaatatcgtaggtaaaaatgcctattggatccaaagagaggccaacattttttgaaatttttaagacacgctgcaacaaagcagatttaggaccaataagtcttaattggtttgaagaactttcttcagaagctccaccctataattctgaacctgcagaagaatctgaacataaaaacaacaattacgaaccaaacctatttaaaactccacaaaggaaaccatcttataatcagctggcttcaactccaataatattcaaagagcaagggctgactctgccgctgtaccaatctcctgtaaaagaattagataaattcaaattagacttaggaaggaatgttcccaatagtagacataaaagtcttcgcacagtgaaaactaaaatggatcaagcagatgatgtttcctgtccacttctaaattcttgtcttagtgaaagtcctgttgttctacaatgtacacatgtaacaccacaaagagataagtcagtggtatgtgggagtttgtttcatacaccaaagtttgtgaagggtcgtcagacaccaaaacatatttctgaaagtctaggagctgaggtggatcctgatatgtcttggtcaagttctttagctacaccacccacccttagttctactgtgctcatagtcagaaatgaagaagcatctgaaactgtatttcctcatgatactactgctaatgtgaaaagctatttttccaatcatgatgaaagtctgaagaaaaatgatagatttatcgcttctgtgacagacagtgaaaacacaaatcaaagagaagctgcaagtcatggatttggaaaaacatcagggaattcatttaaagtaaatagctgcaaagaccacattggaaagtcaatgccaaatgtcctagaagatgaagtatatgaaacagttgtagatacctctgaagaagatagtttttcattatgtttttctaaatgtagaacaaaaaatctacaaaaagtaagaactagcaagactaggaaaaaaattttccatgaagcaaacgctgatgaatgtgaaaaatctaaaaaccaagtgaaagaaaaatactcatttgtatctgaagtggaaccaaatgatactgatccattagattcaaatgtagcacatcagaagccctttgagagtggaagtgacaaaatctccaaggaagttgtaccgtctttggcctgtgaatggtctcaactaaccctttcaggtctaaatggagcccagatggagaaaatacccctattgcatatttcttcatgtgaccaaaatatttcagaaaaagacctattagacacagagaacaaaagaaagaaagattttcttacttcagagaattctttgccacgtatttctagcctaccaaaatcagagaagccattaaatgaggaaacagtggtaaataagagagatgaagagcagcatcttgaatctcatacagactgcattcttgcagtaaagcaggcaatatctggaacttctccagtggcttcttcatttcagggtatcaaaaagtctatattcagaataagagaatcacctaaagagactttcaatgcaagtttttcaggtcatatgactgatccaaactttaaaaaagaaactgaagcctctgaaagtggactggaaatacatactgtttgctcacagaaggaggactccttatgtccaaatttaattgataatggaagctggccagccaccaccacacagaattctgtagctttgaagaatgcaggtttaatatccactttgaaaaagaaaacaaataagtttatttatgctatacatgatgaaacattttataaaggaaaaaaaataccgaaagaccaaaaatcagaactaattaactgttcagcccagtttgaagcaaatgcttttgaagcaccacttacatttgcaaatgctgattcaggtttattgcattcttctgtgaaaagaagctgttcacagaatgattctgaagaaccaactttgtccttaactagctcttttgggacaattctgaggaaatgttctagaaatgaaacatgttctaataatacagtaatctctcaggatcttgattataaagaagcaaaatgtaataaggaaaaactacagttatttattaccccagaagctgattctctgtcatgcctgcaggaaggacagtgtgaaaatgatccaaaaagcaaaaaagtttcagatataaaagaagaggtcttggctgcagcatgtcacccagtacaacattcaaaagtggaatacagtgatactgactttcaatcccagaaaagtcttttatatgatcatgaaaatgccagcactcttattttaactcctacttccaaggatgttctgtcaaacctagtcatgatttctagaggcaaagaatcatacaaaatgtcagacaagctcaaaggtaacaattatgaatctgatgttgaattaaccaaaaatattcccatggaaaagaatcaagatgtatgtgctttaaatgaaaattataaaaacgttgagctgttgccacctgaaaaatacatgagagtagcatcaccttcaagaaaggtacaattcaaccaaaacacaaatctaagagtaatccaaaaaaatcaagaagaaactacttcaatttcaaaaataactgtcaatccagactctgaagaacttttctcagacaatgagaataattttgtcttccaagtagctaatgaaaggaataatcttgctttaggaaatactaaggaacttcatgaaacagacttgacttgtgtaaacgaacccattttcaagaactctaccatggttttatatggagacacaggtgataaacaagcaacccaagtgtcaattaaaaaagatttggtttatgttcttgcagaggagaacaaaaatagtgtaaagcagcatataaaaatgactctaggtcaagatttaaaatcggacatctccttgaatatagataaaataccagaaaaaaataatgattacatgaacaaatgggcaggactcttaggtccaatttcaaatcacagttttggaggtagcttcagaacagcttcaaataaggaaatcaagctctctgaacataacattaagaagagcaaaatgttcttcaaagatattgaagaacaatatcctactagtttagcttgtgttgaaattgtaaataccttggcattagataatcaaaagaaactgagcaagcctcagtcaattaatactgtatctgcacatttacagagtagtgtagttgtttctgattgtaaaaatagtcatataacccctcagatgttattttccaagcaggattttaattcaaaccataatttaacacctagccaaaaggcagaaattacagaactttctactatattagaagaatcaggaagtcagtttgaatttactcagtttagaaaaccaagctacatattgcagaagagtacatttgaagtgcctgaaaaccagatgactatcttaaagaccacttctgaggaatgcagagatgctgatcttcatgtcataatgaatgccccatcgattggtcaggtagacagcagcaagcaatttgaaggtacagttgaaattaaacggaagtttgctggcctgttgaaaaatgactgtaacaaaagtgcttctggttatttaacagatgaaaatgaagtggggtttaggggcttttattctgctcatggcacaaaactgaatgtttctactgaagctctgcaaaaagctgtgaaactgtttagtgatattgagaatattagtgaggaaacttctgcagaggtacatccaataagtttatcttcaagtaaatgtcatgattctgttgtttcaatgtttaagatagaaaatcataatgataaaactgtaagtgaaaaaaataataaatgccaactgatattacaaaataatattgaaatgactactggcacttttgttgaagaaattactgaaaattacaagagaaatactgaaaatgaagataacaaatatactgctgccagtagaaattctcataacttagaatttgatggcagtgattcaagtaaaaatgatactgtttgtattcataaagatgaaacggacttgctatttactgatcagcacaacatatgtcttaaattatctggccagtttatgaaggagggaaacactcagattaaagaagatttgtcagatttaacttttttggaagttgcgaaagctcaagaagcatgtcatggtaatacttcaaataaagaacagttaactgctactaaaacggagcaaaatataaaagattttgagacttctgatacattttttcagactgcaagtgggaaaaatattagtgtcgccaaagagtcatttaataaaattgtaaatttctttgatcagaaaccagaagaattgcataacttttccttaaattctgaattacattctgacataagaaagaacaaaatggacattctaagttatgaggaaacagacatagttaaacacaaaatactgaaagaaagtgtcccagttggtactggaaatcaactagtgaccttccagggacaacccgaacgtgatgaaaagatcaaagaacctactctgttgggttttcatacagctagcgggaaaaaagttaaaattgcaaaggaatctttggacaaagtgaaaaacctttttgatgaaaaagagcaaggtactagtgaaatcaccagttttagccatcaatgggcaaagaccctaaagtacagagaggcctgtaaagaccttgaattagcatgtgagaccattgagatcacagctgccccaaagtgtaaagaaatgcagaattctctcaataatgataaaaaccttgtttctattgagactgtggtgccacctaagctcttaagtgataatttatgtagacaaactgaaaatctcaaaacatcaaaaagtatctttttgaaagttaaagtacatgaaaatgtagaaaaagaaacagcaaaaagtcctgcaacttgttacacaaatcagtccccttattcagtcattgaaaattcagccttagctttttacacaagttgtagtagaaaaacttctgtgagtcagacttcattacttgaagcaaaaaaatggcttagagaaggaatatttgatggtcaaccagaaagaataaatactgcagattatgtaggaaattatttgtatgaaaataattcaaacagtactatagctgaaaatgacaaaaatcatctctccgaaaaacaagatacttatttaagtaacagtagcatgtctaacagctattcctaccattctgatgaggtatataatgattcaggatatctctcaaaaaataaacttgattctggtattgagccagtattgaagaatgttgaagatcaaaaaaacactagtttttccaaagtaatatccaatgtaaaagatgcaaatgcatacccacaaactgtaaatgaagatatttgcgttgaggaacttgtgactagctcttcaccctgcaaaaataaaaatgcagccattaaattgtccatatctaatagtaataattttgaggtagggccacctgcatttaggatagccagtggtaaaatcgtttgtgtttcacatgaaacaattaaaaaagtgaaagacatatttacagacagtttcagtaaagtaattaaggaaaacaacgagaataaatcaaaaatttgccaaacgaaaattatggcaggttgttacgaggcattggatgattcagaggatattcttcataactctctagataatgatgaatgtagcacgcattcacataaggtttttgctgacattcagagtgaagaaattttacaacataaccaaaatatgtctggattggagaaagtttctaaaatatcaccttgtgatgttagtttggaaacttcagatatatgtaaatgtagtatagggaagcttcataagtcagtctcatctgcaaatacttgtgggatttttagcacagcaagtggaaaatctgtccaggtatcagatgcttcattacaaaacgcaagacaagtgttttctgaaatagaagatagtaccaagcaagtcttttccaaagtattgtttaaaagtaacgaacattcagaccagctcacaagagaagaaaatactgctatacgtactccagaacatttaatatcccaaaaaggcttttcatataatgtggtaaattcatctgctttctctggatttagtacagcaagtggaaagcaagtttccattttagaaagttccttacacaaagttaagggagtgttagaggaatttgatttaatcagaactgagcatagtcttcactattcacctacgtctagacaaaatgtatcaaaaatacttcctcgtgttgataagagaaacccagagcactgtgtaaactcagaaatggaaaaaacctgcagtaaagaatttaaattatcaaataacttaaatgttgaaggtggttcttcagaaaataatcactctattaaagtttctccatatctctctcaatttcaacaagacaaacaacagttggtattaggaaccaaagtctcacttgttgagaacattcatgttttgggaaaagaacaggcttcacctaaaaacgtaaaaatggaaattggtaaaactgaaactttttctgatgttcctgtgaaaacaaatatagaagtttgttctacttactccaaagattcagaaaactactttgaaacagaagcagtagaaattgctaaagcttttatggaagatgatgaactgacagattctaaactgccaagtcatgccacacattctctttttacatgtcccgaaaatgaggaaatggttttgtcaaattcaagaattggaaaaagaagaggagagccccttatcttagtgggagaaccctcaatcaaaagaaacttattaaatgaatttgacaggataatagaaaatcaagaaaaatccttaaaggcttcaaaaagcactccagatggcacaataaaagatcgaagattgtttatgcatcatgtttctttagagccgattacctgtgtaccctttcgcacaactaaggaacgtcaagagatacagaatccaaattttaccgcacctggtcaagaatttctgtctaaatctcatttgtatgaacatctgactttggaaaaatcttcaagcaatttagcagtttcaggacatccattttatcaagtttctgctacaagaaatgaaaaaatgagacacttgattactacaggcagaccaaccaaagtctttgttccaccttttaaaactaaatcacattttcacagagttgaacagtgtgttaggaatattaacttggaggaaaacagacaaaagcaaaacattgatggacatggctctgatgatagtaaaaataagattaatgacaatgagattcatcagtttaacaaaaacaactccaatcaagcagcagctgtaactttcacaaagtgtgaagaagaacctttagatttaattacaagtcttcagaatgccagagatatacaggatatgcgaattaagaagaaacaaaggcaacgcgtctttccacagccaggcagtctgtatcttgcaaaaacatccactctgcctcgaatctctctgaaagcagcagtaggaggccaagttccctctgcgtgttctcataaacagctgtatacgtatggcgtttctaaacattgcataaaaattaacagcaaaaatgcagagtcttttcagtttcacactgaagattattttggtaaggaaagtttatggactggaaaaggaatacagttggctgatggtggatggctcataccctccaatgatggaaaggctggaaaagaagaattttatagggctctgtgtgacactccaggtgtggatccaaagcttatttctagaatttgggtttataatcactatagatggatcatatggaaactggcagctatggaatgtgcctttcctaaggaatttgctaatagatgcctaagcccagaaagggtgcttcttcaactaaaatacagatatgatacggaaattgatagaagcagaagatcggctataaaaaagataatggaaagggatgacacagctgcaaaaacacttgttctctgtgtttctgacataatttcattgagcgcaaatatatctgaaacttctagcaataaaactagtagtgcagatacccaaaaagtggccattattgaacttacagatgggtggtatgctgttaaggcccagttagatcctcccctcttagctgtcttaaagaatggcagactgacagttggtcagaagattattcttcatggagcagaactggtgggctctcctgatgcctgtacacctcttgaagccccagaatctcttatgttaaagatttctgctaacagtactcggcctgctcgctggtataccaaacttggattctttcctgaccctagaccttttcctctgcccttatcatcgcttttcagtgatggaggaaatgttggttgtgttgatgtaattattcaaagagcataccctatacagtggatggagaagacatcatctggattatacatatttcgcaatgaaagagaggaagaaaaggaagcagcaaaatatgtggaggcccaacaaaagagactagaagccttattcactaaaattcaggaggaatttgaagaacatgaagaaaacacaacaaaaccatatttaccatcacgtgcactaacaagacagcaagttcgtgctttgcaagatggtgcagagctttatgaagcagtgaagaatgcagcagacccagcttaccttgagggttatttcagtgaagagcagttaagagccttgaataatcacaggcaaatgttgaatgataagaaacaagctcagatccagttggaaattaggaaggccatggaatctgctgaacaaaaggaacaaggtttatcaagggatgtcacaaccgtgtggaagttgcgtattgtaagctattcaaaaaaagaaaaagattcagttatactgagtatttggcgtccatcatcagatttatattctctgttaacagaaggaaagagatacagaatttatcatcttgcaacttcaaaatctaaaagtaaatctgaaagagctaacatacagttagcagcgacaaaaaaaactcagtatcaacaactaccggtttcagatgaaattttatttcagatttaccagccacgggagccccttcacttcagcaaatttttagatccagactttcagccatcttgttctgaggtggacctaataggatttgtcgtttctgttgtgaaaaaaacaggacttgcccctttcgtctatttgtcagacgaatgttacaatttactggcaataaagttttggatagaccttaatgaggacattattaagcctcatatgttaattgctgcaagcaacctccagtggcgaccagaatccaaatcaggccttcttactttatttgctggagatttttctgtgttttctgctagtccaaaagagggccactttcaagagacattcaacaaaatgaaaaatactgttgagaatattgacatactttgcaatgaagcagaaaacaagcttatgcatatactgcatgcaaatgatcccaagtggtccaccccaactaaagactgtacttcagggccgtacactgctcaaatcattcctggtacaggaaacaagcttctgatgtcttctcctaattgtgagatatattatcaaagtcctttatcactttgtatggccaaaaggaagtctgtttccacacctgtctcagcccagatgacttcaaagtcttgtaaaggggagaaagagattgatgaccaaaagaactgcaaaaagagaagagccttggatttcttgagtagactgcctttacctccacctgttagtcccatttgtacatttgtttctccggctgcacagaaggcatttcagccaccaaggagttgtggcaccaaatacgaaacacccataaagaaaaaagaactgaattctcctcagatgactccatttaaaaaattcaatgaaatttctcttttggaaagtaattcaatagctgacgaagaacttgcattgataaatacccaagctcttttgtctggttcaacaggagaaaaacaatttatatctgtcagtgaatccactaggactgctcccaccagttcagaagattatctcagactgaaacgacgttgtactacatctctgatcaaagaacaggagagttcccaggccagtacggaagaatgtgagaaaaataagcaggacacaattacaactaaaaaatatatctaagcatttgcaaaggcgacaataaattattgacgcttaacctttccagtttataagactggaatataatttcaaaccacacattagtacttatgttgcacaatgagaaaagaaattagtttcaaatttacctcagcgtttgtgtatcgggcaaaaatcgttttgcccgattccgtattggtatacttttgcttcagttgcatatcttaaaactaaatgtaatttattaactaatcaagaaaaacatctttggctgagctcggtggctcatgcctgtaatcccaacactttgagaagctgaggtgggaggagtgcttgaggccaggagttcaagaccagcctgggcaacatagggagacccccatctttacaaagaaaaaaaaaaggggaaaagaaaatcttttaaatctttggatttgatcactacaagtattattttacaagtgaaataaacataccattttcttttagattgtgtcattaaatggaatgaggtctcttagtacagttattttgatgcagataattccttttagtttagctactattttaggggattttttttagaggtaactcactatgaaatagttctccttaatgcaaatatgttggttctgctatagttccatcctgttcaaaagtcaggatgaatatgaagagtggtgtttccttttgagcaattcttcatccttaagtcagcatgattataagaaaaatagaaccctcagtgtaactctaattcctttttactattccagtgtgatctctgaaattaaattacttcaactaaaaattcaaatactttaaatcagaagatttcatagttaatttattttttttttcaacaaaatggtcatccaaactcaaacttgagaaaatatcttgctttcaaattggcactgatt

SEQ ID NO: 11626 - DNA, 1228 bp, Homo sapiens
acttcacgtgaccgcgcggcggccgctgcggcgcgatggcggcggggctggcgcggctcctgttgctcctcgggctctcggccggcgggcccgcgccggcaggtgcagcgaagatgaaggtggtggaggagcccaacgcgtttggggtgaacaacccgttcttgcctcaggccagtcgcctccaggccaagagggatccttcacccgtgtctggacccgtgcatctcttccgactctcgggcaagtgcttcagcctggtggagtccacgtacaagtatgagttctgcccgttccacaacgtgacccagcacgagcagaccttccgctggaacgcctacagtgggatcctcggcatctggcacgagtgggagatcgccaacaacaccttcacgggcatgtggatgagggacggtgacgcctgccgttcccggagccggcagagcaaggtggagctggcgtgtggaaaaagcaaccggctggcccatgtgtccgagccgagcacctgcgtctacgcgctgacgttcgagacccccctcgtctgccacccccacgccttgctagtgtacccaaccctgccagaggccctgcagcggcagtgggaccaggtagagcaggacctggccgatgagctgatcaccccccagggccatgagaagttgctgaggacactttttgaggatgctggctacttaaagaccccagaagaaaatgaacccacccagctggagggaggtcctgacagcttggggtttgagaccctggaaaactgcaggaaggctcataaagaactctcaaaggagatcaaaaggctgaaaggtttgctcacccagcacggcatcccctacacgaggcccacagaaacttccaacttggagcacttgggccacgagacgcccagagccaagtctccagagcagctgcggggtgacccaggactgcgtgggagtttgtgaccttgtggtgggagagcagaggtggacgcggccgagagccctacagagaagctggctggtaggacccgcagggaccagctgaccaggcttgtgctcagagaagcagacaaaacaaagattcaaggttttaattaattcccatactgataaaaataactccatgaattctgtaaaccattgcataaatgctatagtgtaaaaaaatttaaacaagtgttaactttaaacagttcgctacaagtaaatgattataaatactaaaaaaaaaaaaaaaa

SEQ ID NO: 11627 - DNA, 19341 bp, Homo sapiens
agtaagaatcagcagcgcgggcaaggagtacggacgggagtcagaggcagagcgagggtgtgtggagggccggcggggaccgccgggagcgcgcggatgtcggtgttcctggggccagggatgccctctgcatctttattagtaaatcttctttcagctttactcatcctatttgtgtttggagaaacagaaataagatttactggacaaactgaatttgttgttaatgaaacaagtacaacagttattcgtcttatcattgaaaggataggagagccagcaaatgttactgcaattgtatcgctgtatggagaggacgctggtgacttttttgacacatatgctgcagcttttatacctgccggagaaacaaacagaacagtgtacatagcagtatgtgatgatgacttaccagggcctgacgaaacttttatttttcacttaacattacagaaaccttcagcaaatgtgaagcttggatggccaaggactgttactgtgacaatattatcaaatgacaatgcatttggaattatttcatttaatatgcttccctcaatcgcagtgagtgagcccaagggcagaaatgagtctatgcctcttactctcatcagggaaaagggaacctatggaatggtcatggtgacttttgaggtagagggtggcccaaatccccctgatgaagatttgagtccagttaaaggaaatatcacctttccccctggcagagcaacagtaatttataacttggcagtactcgatgacgaggtaccagaaaatgatgaaatatttttaattcaactgaaaagtgtagaaggaggagctgagattaacacctctaggaattccattgagatcatcattgagaaaaatgatagtcccgtgagattccttcagagtatttatttggttcctgaggaagaccacatactcataattccagtagttcgtggaaaggacaacaatggaaatctgattggatctgatgaatatgaggtttcaatcagttatgctgtcacaactgggaattccacagcacatgcccagcaaaatctggacttcattgatcttcagccaaacacaactgttgtttttccaccttttattcatgaatctcacttgaaatttcaaatagttgatgacaccataccggagattgctgaatcgtttcacattatgttactaaaagataccttacagggagatgctgtgctaataagcccttctgttgtacaagtcaccattaagccaaatgataaaccttatggagtcctttcattcaacagtgttttgtttgaaaggacagttataattgatgaagatagaatatcaagatatgaagaaatcacagtggttagaaatggaggaacccatgggaatgtctctgcgaattgggtggtgacaccgaacagcactgatccctcaccagtaacagcagatatcagaccgagctctggagttcttcattttgcacaagggcagatgttggcaacaattcctcttactgggggtgatgatgatcttccagaagaggcagaagcttatctacttcaaattctgcctcatacaatacgaggaggtgcagaagtgagcgagccagcggagcttttgttctacattcaggatagtgatgatgtctatggcctaataacattttttcctatggaaaaccagaagattgaaagcagcccaggtggacgatacttatccttgagttttacaagactaggagggactaaaggagatgtgaggttgctttattctgtactttacattcctgctggagctgtggaccccttgcaagcaaaagaaggcatcttaaatatatcaaggagaaatgacctcatttttccagagcaaaaaactcaagtcactacaaaattaccaataagaaatgatgcattccttcaaaatggagctcactttctagtacagttggaaactgtggagttgttaaacataattcctctaatcccacccataagccctagatttggggaaatctgcaatatttctttactggttactccagccattgcaaatggagaaattggctttctcagcaatcttccaattattttgcatgaaccagaagattttgctgctgaagtggtatacattcccttacatcgggatggaactgatggccaggctactgtctactggagtttgaagccctctggctttaattcaaaagcagtgaccccggatgatataggcccctttaatggctctgttttgtttttatctgggcaaagtgacacaacaatcaacattactatcaaaggtgatgacataccggaaatgaatgaaactgtaacactttctctagactgggttaacgtggaaaaccaagtgctgaaatctggatatactagccgtgacctaattattttggaaaatgatgaccctgggggagtttttgaattttctcctgcttccagaggaccctatgttataaaagaaggagaatctgtagagctccacatcatccgatcaagggggtcccttgttaagcagtttctacactaccgagtagagccaagagatagcaatgaattctatggaaacacgggagtactagaatttaaacctggagaaagggagatagtgatcaccttgctagcaagattggatgggataccagagttggatgaacactactgggtggtcctcagcagccacggagaacgggaaagcaagttgggaagtgccaccattgtcaatataacgattctgaaaaatgatgatcctcatggcattatagaatttgtttctgatggtctaattgtgatgataaatgaaagcaaaggagatgctatctatagtgctgtttatgatgtagtaagaaatcgaggcaactttggtgatgttagtgtatcatgggtggttagtccagactttacacaagatgtatttcctgtacaagggactgttgtctttggagatcaggaattttcaaaaaatatcaccatttactcccttccagatgagattccagaagaaatggaagaatttaccgttatcctactgaatggcactggaggagctaaagtgggaaatagaacaactgcaactctgaggattagaagaaatgatgaccccatttattttgcagaacctcgtgtagtgagggttcaagaaggggagactgccaactttacagttctcagaaatggatctgttgatgtgacttgcatggtccagtatgctaccaaggatgggaaggctactgcaagagagagagatttcattcctgttgaaaaaggagaaacgctcatttttgaggttggaagtagacagcagagcatatccatatttgttaatgaagatggtatcccggaaacagatgagcccttttatataatcctcttgaattcaccaggtgatccagtagtatatcaatatggagtagctacagtaataattgaagctaatgatgacccaaatggcattttttctctggagcccatagacaaagcagtggaagaaggaaagactaatgcattttggattttgaggcaccgaggatactttggtagtgtttctgtatcttggcagctctttcagaatgattctgctttgcagcctgggcaggagttctatgaaacttcaggaactgttaacttcatggatggagaagaagcaaaaccaatcattctccatgcttttccagataaaattcctgaattcaatgaattttatttcctaaaacttgtaaacatttcaggtggatccccaggtcctgggggccagctagcagaaaccaacctccaggtgacagtaatggctccattcaatgatgatccctttggagtttttatcttggatccagagtgtttagagagagaagtggcagaagatgtcctgtctgaagatgatatgtcttatattaccaacttcaccattttgaggcagcagggtgtgtttggtgatgtacaactgggctgggaaatactgtccagtgagttccctgctggtctgccaccaatgatagattttttactggttggaattttccccaccaccgtgcatttacaacagcacatgcggggtcaccacagtggaacggatgctttgtactttaccggactagaaggtgcatttgggactggtaattcaaaataccatcccttcaggaataatacaattgccaactttacattttcagcttgggtaatgcccaatgccaatacgaatggattcattatagcgaaggatgacggtaatggaagcatctactacggggtaaaaatacaaacaaacgaatcccatgtgacactttcccttcattataaaaccttgggttccaatgctacatacattgccaagacaacagtcatgaaatatttagaagaaagtgtttggcttcatctactaattatcctggaggatggtataatcgaattctacctggatggaaatgcaatgcccaggggaatcaagagtctgaaaggagaagccattactgacggtcctgggatactgagaattggagcagggataaatggcaatgacagatttacaggtctgatgcaggatgtgaggtcctatgagcggaaactgacgcttgaagaaatttatgaacttcatgccatgcccgcaaaaagtgatttacacccaatttctggatatctggagttcagacagggagaaactaacaaatcattcattatttctgcaagagatgacaatgacgaggaaggagaagaattattcattcttaaactagtttctgtatatggaggagctcgtatttcggaagaaaatactactgcaagattaacaatacaaaaaagtgacaatgcaaatggcttgtttggtttcacaggagcttgtataccagagattgcagaggagggatcaaccatttcttgtgtggttgagagaaccagaggagctctggattatgtgcatgttttttacaccatttcacagattgaaactgatggcattaattaccttgttgatgactttgctaatgccagtggaactattacattccttccttggcagagatcagaggttctgaatatatatgttcttgatgatgatattcctgaacttaatgagtatttccgtgtgacattggtttctgcaattcctggagatgggaagctaggctcaactcctaccagtggtgcaagcatagatcctgaaaaggaaacgactgatatcaccatcaaagctagtgatcatccatatggcttgctgcagttctccacagggctgcctcctcagcctaaggacgcaatgaccctgcctgcaagcagcgttccacatatcactgtggaggaggaagatggagaaatcaggttattggtcatccgtgcacagggacttctgggaagggtgactgcggaatttagaacagtgtccttgacagcattcagtcctgaggattaccagaatgttgctggcacattagaatttcaaccaggagaaagatataaatacattttcataaacatcactgataattctattcctgaactggaaaaatcttttaaagttgagttgttaaacttggaaggaggagtagctgaactctttagggttgatggaagtggtagtggtgatggggacatggaattcttccttccaactattcacaaacgtgccagtctaggagtggcttcccaaattctagtgacaattgcagcctctgaccacgctcatggcgtatttgaatttagccctgagtcactctttgtcagtggaactgaaccagaagatgggtatagcactgttacattaaatgttataagacatcatggaactctgtctccagtgactttgcattggaacatagactctgatcctgatggtgatctcgccttcacctctggcaacatcacatttgagattgggcagacgagcgccaatatcactgtggagatattgcctgacgaagacccagaactggataaggcattctctgtgtcagtcctcagtgtttccagtggttctttgggagctcatattaatgccacgttaacagttttggctagtgatgatccatatgggatattcattttttctgagaaaaacagacctgttaaagttgaggaagcaacccagaacatcacactatcaataataaggttgaaaggcctcatgggaaaagtccttgtctcatatgcaacactagatgatatggaaaaaccaccttattttccacctaatttagcgagagcaactcaaggaagagactatataccagcttctggatttgctctttttggagctaatcagagtgaggcaacaatagctatttcaattttggatgatgatgagccagaaaggtccgaatctgtctttatcgaactactcaactctactttagtagcgaaagtacagagtcgttcaattccaaattctccacgtcttgggcctaaggtagaaactattgcgcaactaattatcattgccaatgatgatgcatttggaactcttcagctctcagcaccaattgtccgagtggcagaaaatcatgttggacccattatcaatgtgactagaacaggaggagcatttgcagatgtctctgtgaagtttaaagctgtgccaataacagcaatagctggtgaagattatagtatagcttcatcagatgtggtcttgctagaaggggaaaccagtaaagccgtgccaatatatgtcattaatgatatctatcctgaactggaagaatcttttcttgtgcaactgatgaatgaaacaacaggaggagccagactaggggctttaacagaggcagtcattattattgaggcctctgatgacccctatggattatttggttttcagattactaaacttattgtagaggaacctgagtttaactcagtgaaggtaaacctgccaataattcgaaattctgggacactcggcaatgttaccgttcagtgggttgccaccattaatggacagcttgctactggcgacctgcgagttgtctcaggtaatgtgacctttgcccctggggaaaccattcaaaccttgttgttagaggtcctggctgacgacgttccggagattgaagaggttatccaagtgcaactaactgatgcctctggtggaggtactattgggttagatcgaattgcaaatattattattcctgccaatgatgatccttatggtacagtagcctttgctcagatggtttatcgtgttcaagagcctctggaaagaagttcctgtgctaatataactgtcaggcgaagcggagggcactttggtcggctgttgttgttctacagtacttccgacattgatgtagtggctctggcaatggaggaaggtcaagatttactgtcctactatgaatctccaattcaaggggtgcctgacccactttggagaacttggatgaatgtctctgccgtgggggagcccctgtatacctgtgccactttgtgccttaaggaacaagcttgctcagcgttttcatttttcagtgcttctgagggtccccagtgtttctggatgacatcatggatcagcccagctgtcaacaattcagacttttggacctacaggaaaaacatgaccagggtagcatctctttttagtggtcaggctgtggctgggagtgactatgagcctgtgacaaggcaatgggccataatgcaggaaggtgatgaattcgcaaatctcacagtgtctattcttcctgatgatttcccagagatggatgagagttttctaatttctctccttgaagttcacctcatgaacatttcagccagtttgaaaaatcagccaaccataggacagccaaatatttctacagttgtcatagcactaaatggtgatgcctttggagtgtttgtgatctacaatattagtcccaatacttccgaagatggcttatttgttgaagttcaggagcagccccaaaccttggtggagctgatgatacacaggacagggggcagcttaggtcaagtggcagtcgaatggcgtgttgttggtggaacagctactgaaggtttagattttataggtgctggagagattttgacctttgctgaaggtgaaaccaaaaagacagtcattttaaccatcttggatgactctgaaccagaggatgacgaaagtatcatagttagtttggtgtacactgaaggtggaagtagaattttgccaagctccgacactgttagagtgaacattttggccaatgacaatgtggcaggaattgttagctttcagacagcttccagatctgtcataggtcatgaaggagaaattttacaattccatgtgataagaactttccctggtcgaggaaatgttactgttaactggaaaattattgggcaaaatctagaactcaattttgctaactttagcggacaacttttctttcctgaggggtcgttgaatacaacattgtttgtgcatttgttggatgacaacattcctgaggagaaagaagtataccaagtcattctgtatgatgtcaggacacaaggagttccaccagccggaatcgccctgcttgatgctcaaggatatgcagctgtcctcacagtagaagccagtgatgaaccacatggagttttaaattttgctctttcatcaagatttgtgttactacaagaggctaacataacaattcagcttttcatcaacagagaatttggatctctaggagctatcaatgtcacatataccacggttcctggaatgctgagtctgaagaaccaaacagtaggaaacctagcagagccagaagttgattttgtccctatcattggctttctgattttagaagaaggggaaacagcagcagccatcaacattaccattcttgaggatgatgtaccagagctagaagaatatttcctggtgaatttaacttacgtgggacttaccatggctgcttcaacttcatttcctcccagactagattcagaaggtttgactgcacaagttattattgatgccaatgatggggcccgaggtgtaattgaatggcaacaaagcaggtttgaagtaaatgaaacccatggaagtttaacattggtagcccagaggagcagagaacctcttggccatgtttccttatttgtgtatgctcagaatttggaagcacaagtggggctggattatatcttcaccccaatgattcttcattttgctgatggagaaaggtataaaaatgtcaatatcatgattcttgatgatgacattccagaaggagatgaaaaatttcagctgattttaacaaatccttctcctggactagagctagggaaaaatacaatagccttaattattgtccttgctaatgatgacggccctggagttctatcatttaacaacagtgagcactttttcctaagagagccaacagctctctacgtccaggagagtgttgcagtattgtacattgttcgggaacctgcacaaggattgtttggaacagtgacagttcagttcattgtgacagaagtgaattcctcaaatgaatctaaagatctgactccttccaaaggctatattgttttagaagaaggtgttcgattcaaggccctacaaatatctgccatattagacacggaaccagaaatggatgagtattttgtttgcaccttgtttaatccaactggaggtgctagactaggggtgcatgttcaaaccctgataacagttttgcaaaaccaggcccctttggggctattcagtatctctgcagttgaaaatagagccacctccatagacatcgaagaagccaataggaccgtgtatttaaatgtatctcgaactaatgacattgatttggctgtgagtgtgcagtgggagacagtatctgaaacagcctttggcatgaggggaatggatgttgtgttttccgtatttcaaagttttttggatgaatcagcttctggctggtgtttctttactttggaaaatttaatatatggtataatgttaagaaaatcatctgttactgtttaccgatggcaggggatttttattccagttgaggatttaaatatagaaaatcctaaaacttgtgaggcctttaatattggtttttctccctactttgtgattactcatgaagaaagaaatgaagaaaagccttctcttaacagtgtgtttacattcacatctggatttaaattattcctggtacaaacaatcattattctggaaagttctcaagtaagatattttacttcagacagccaagattatttaatcattgcaagtcaaagagatgattccgaattaactcaggtcttcaggtggaatggaggaagcttcgtgttgcatcaaaaactccctgtccgaggtgtgctgaccgtggccttgttcaacaagggaggctctgtgttcttagccatttcccaggctaatgccaggctaaactcccttttattcagatggtctggcagtgggtttattaactttcaagaggtgcctgtcagtgggacaacagaagttgaggctttgtcttcagccaatgatatttacctaatatttgccgaaaatgtctttctaggagatcagaattcaattgatattttcatctgggagatgggacagtcttccttcaggtattttcagtctgtagattttgctgctgttaacagaatccactccttcacaccagcctcaggaatagcccacatacttcttattgggccaagatatgtctactcttttactgctggaaattcggagcgtaatcaattctcttttgttctggaagtaccttctgcttatgatgtggtttctgttacagtaaagtcccttaattcaagcaagaatttaatagctctagtgggagctcattcacatatatatgagctagcctacatttccagccattctgactttattcctagttcaggtgaactgatatttgaacctggtgagagagaagctacaatagcagtaaatatccttgatgatacagttccagaaaaagaagaatccttcaaagttcaacttaaaaatcccaaaggaggagcagagattggcattaatgattctgtaacaataaccattctgtctaatgatgatgcctatggaattgttgcatttgctcagaattcattatataagcaagtggaagaaatggagcaagatagcctagtaaccttgaacgttgaacgcttaaaaggaacatatggccgtataaccatagcatgggaagctgatggaagtattagtgatatatttcctacctcaggagtgattttatttactgaaggccaggtactgtcaacaatcactctaactattcttgctgataatataccagagttatcagaggttgtgattgtaaccctcacccgtatcaccacagaaggggttgaggactcatacaaaggtgctactattgatcaggacagaagcaagtctgttataacaactttgcccaatgactcaccttttggcttggtgggctggcgtgctgcgtctgtcttcattagagtagcagagcctaaagaaaacaccaccactcttcagttacaaatagctcgagataaaggactacttggggatattgccattcacttgagagctcaacccaatttcttactgcatgtcgataatcaagctactgagaatgaagattatgtattgcaagaaacaataataataatgaaagaaaacataaaagaagctcatgccgaagtttccattttgccggatgaccttcctgaattggaggaaggatttattgtcactatcactgaggtgaacctggtgaactctgacttctctacaggacagccaagtgtgcggaggcccggaatggaaatagctgagataatgatagaagaaaatgacgatcccagaggaatttttatgtttcatgttactagaggcgctggggaagttattactgcctatgaggtgcctccacccttgaacgttcttcaagttcctgtagtccggctggctggaagctttggggcagtaaatgtttattggaaagcatcaccagacagtgctggcctggaagactttaaaccatctcatgggattcttgaatttgcagataaacaggttactgcaatgatagaaatcaccataattgatgatgctgaatttgaattgacagagacgttcaatatttccttgatcagtgttgctggaggtggcagacttggtgatgatgttgtggtaactgttgttattccacaaaatgattctccatttggagtatttggatttgaagaaaagactgtaatgattgatgaatccctttcatccgatgaccctgattcatatgtgacattgacggttgtccggtccccaggaggaaaaggaaccgtccgacttgagtggaccatagatgagaaggctaaacataaccttagtcctttgaatgggacccttcattttgatgagactgagtcccagaagaccattgtgttgcacacacttcaagacacagtgttggaggaggacaggcgtttcaccattcagctgatatcaattgatgaggtagaaatatctccagtaaaaggtagtgcatcaataattattcggggtgataagcgagcatcaggagaagttgggatagctccgtcatctaggcacatcctcattggggaaccctcagcaaaatataatggtaccgctattatcagccttgttcgaggcccagggattttgggggaggtcacagtgttctggaggatattccctccttccgtgggggaatttgctgaaacatcaggaaaactgacaatgcgagacgaacagtctgcagtcattgtagtaatacaggctttgaacgatgacattcccgaggaaaaaagcttctatgagtttcagctcactgcagtcagtgggggaggagttctgagtgaatccagcagcactgccaacatcacggtggtggccagcgactctccctatggccgatttgccttttcacatgagcaacttcgagtgtcagaagcacagagggttaacatcacaatcatccgttccagtggagattttggccatgtgcgactctggtacaagacgatgagcgggacagcggaagcaggcttggattttgttcctgcagcaggggagctcctctttgaagcaggggagatgaggaaaagtctgcatgttgaaatccttgatgatgactatcctgaaggcccagaggaattttctctaacaattacaaaggtggaactccagggaagagggtatgattttaccattcaagaaaatggacttcagatagatcaacctcctgaaataggaaacatctccattgttcgcatcataataatgaaaaatgataacgcagaaggcatcattgaatttgacccaaagtatactgccttcgaagtggaggaagatgttgggctgatcatgatcccagtggtgaggctacatggaacttatggctatgtgacagctgatttcatctctcagagctcctctgccagtcccggaggtgttgattacattttgcatggcagtacagtcacctttcagcatgggcaaaacttaagttttataaatatctccatcattgatgacaatgaaagtgaatttgaggagcccattgaaattctactcactggagctactggaggagcggtccttgggcgccacctagtgagcagaatcataatagctaagagtgactctccctttggagttataaggtttctcaatcaaagcaaaatttctattgctaatcccaattccacaatgattttatcactggtgctggagcggactggaggactcttgggagagattcaggtgaactgggagacagtaggacccaactctcaagaagccttactgccacagaatagagacattgcagacccagtgagcgggttgttctattttggagaaggagaaggaggagtgagaaccataattctgacaatctatcctcatgaagaaattgaagttgaagagacattcattattaaacttcatcttgtgaaaggagaagctaaattagactccagagctaaagatgttacattaaccatacaagagtttggtgacccaaatggagttgttcagtttgctcctgaaactttgtctaagaagacttattcagagcctctggctctggaagggcccctgctcattaccttctttgtcagaagagtcaagggcacctttggagagattatggtttactgggaattaagtagtgagtttgacattactgaagactttctttccaccagtggatttttcaccattgctgatggagagagtgaagctagctttgatgttcatttgctaccagatgaggtacctgagatagaggaagattatgtgatccagcttgtttctgtagagggaggagccgaactggatctggagaagagtatcacatggttctctgtttatgcaaatgatgacccacatggagtatttgccctgtattcggatcgccagtcaatacttattgggcagaaccttattagatccatccaaattaacataacccggcttgctggaacatttggagatgtggctgttgggcttcgaatatcatcggatcataaagaacagccgattgttaccgaaaatgcagagaggcagctggtggtcaaagatggtgccacatataaagtggacgtggtgccaataaagaatcaggtcttcctatcactgggctctaatttcactttgcaactggtgactgtgatgcttgtcggtggacgtttctatggaatgccaacaattcttcaggaagcaaaatctgctgtccttccagtctctgagaaagctgccaattctcaggtcggatttgaatccactgcttttcaactcatgaacatcactgctggcacaagccacgttatgatttctaggagaggcacatatggagctctctcggttgcctggaccactggatatgctcctgggttagaaattcctgaattcattgttgttggcaacatgaccccaacactggggagcctttcattttcccacggtgaacaaaggaaaggagttttcctgtggacgtttcctagccctggttggccagaggcctttgttcttcacctatcaggagtgcagagcagtgctcctggcggagctcaactccgatcaggtttcattgttgctgaaattgaaccaatgggcgtcttccaattttccactagctcaagaaatatcatagtgtcagaagatacacagatgatcagattacatgtacaaagactatttgggttccacagcgatcttattaaagtttcttatcagaccactgcaggaagcgccaagccactggaagattttgagcctgttcagaatggggaactgttttttcaaaaattccaaactgaggttgattttgaaataaccattattaatgatcagctttctgagatagaagaatttttttacattaaccttacttcagtagaaattaggggattacaaaagtttgatgttaattggagcccacgcctgaatctagatttcagtgttgcagtgattacaatattggataatgatgacctggcaggaatggatatttccttccccgagacaactgtggctgtagcagttgacacaactctcattcctgtagaaactgaatccaccacatacctcagcacaagcaagacgactaccattctgcagccaaccaacgtggttgccattgttactgaggcaactggtgtatctgccatccctgagaaacttgtcacccttcatggcacacctgctgtgtctgaaaagcctgatgtggccactgtaactgccaatgtttccattcatggaacattcagccttgggccatccattgtttatattgaagaggagatgaagaatggcacattcaacactgcagaagttcttatccgaagaactggtgggtttactggcaatgtcagcataacagttaaaactttcggtgaaagatgtgctcagatggaaccaaatgcattgccctttcgtggtatctatgggatttccaacctaacatgggcagttgaagaagaagactttgaagaacaaactcttacccttatattcctagatggagaaagagaacgtaaagtatcagttcaaattttggatgatgatgagcctgaggggcaggaattcttctacgtgtttctcacaaaccctcaagggggagcacagattgtggaggggaaggatgatactggatttgcagcttttgccatggttattattacagggagtgaccttcacaatggcatcataggattcagtgaggagtcccagagtggactagaactcagggaaggagctgttatgagaagattgcaccttattgtcacaagacagccaaacagggcctttgaagatgtcaaggtcttttggcgagtcacacttaacaaaacagtcgtcgtgctccagaaggatggggtaaacctgatggaggaacttcagtctgtgtcagggaccacaacctgtacaatgggtcaaacaaaatgctttatcagcattgaactcaaaccagaaaaggtaccacaggttgaagtgtatttttttgtggaactatatgaagctactgctggagcagcaataaacaacagtgccagattcgcacagattaaaatcttagaaagtgatgaatctcaaagccttgtgtatttttctgtgggttctcggctggcagtggctcacaagaaggccactttaatcagtctgcaggtggccagagattctgggacaggactaatgatgtctgttaactttagtacccaggagttgaggagtgctgaaacaattggtcgtaccatcatatctccagctatttctggaaaggattttgtgataactgaaggcacattggtctttgaacctggccagagaagcactgtattggatgtcatcctaacgccagagacaggatctttaaattcatttcctaaacgcttccagattgtcctttttgacccaaaaggtggtgccagaattgataaagtgtatgggactgccaacatcactcttgtctcagatgcagattcgcaggccatttgggggcttgcagatcagctacatcagcctgtgaatgatgatattctcaacagagtgctccataccatcagcatgaaagtggccacagaaaacacagatgaacaactcagtgccatgatgcatctaatagaaaagataactactgaaggaaaaattcaagctttcagtgttgccagccgaactcttttctatgagattctttgttctcttattaacccaaagcgcaaggacactaggggattcagtcactttgctgaagtgactgagaattttgccttttctctgctgactaatgttacttgcggctctcctggtgaaaaaagcaaaaccatccttgatagttgcccatatttgtcaatattggctcttcactggtatcctcagcaaatcaatggacacaagtttgaaggaaaggaaggagattacattcgaattccagagaggctactggatgtccaggatgcagaaataatggctgggaaaagtacatgtaaattagtccagtttacagagtatagcagccaacagtggtttataagtggaaacaatcttcctaccctaaaaaataaggtattatctttgagtgtgaaaggtcagagttcacaactcctgactaatgacaatgaggttctctacaggatttatgctgctgagcctagaattattcctcagacatctctgtgtctcctttggaatcaggctgctgcaagctggttgtctgacagtcagttttgcaaagtgattgaggaaactgcagactatgtggaatgtgcctgttcacacatgtctgtgtatgctgtctatgctcggactgacaacttgtcttcatacaatgaagccttcttcacttctggatttatatgtatctcaggtctttgcttggctgttctttcccatatcttctgtgccaggtactccatgtttgcagctaaacttctgactcacatgatggcagccagcttaggtacacagattctgtttctggcgtctgcatacgcaagtccccaactcgctgaggagagctgttcagctatggctgctgtcacacattacctgtatctttgccagtttagctggatgctcattcagtctgtgaatttctggtacgtgctggtgatgaatgatgagcacacagagaggcgatatctgctgtttttccttctgagttggggactaccagcttttgtggtgattctcctcatagttattttgaaaggaatctatcatcagagcatgtcacagatctatggactcattcatggtgacctgtgttttattccaaacgtctatgctgctttgttcactgcagctcttgttcctttgacgtgcctcgtggtggtgttcgtggtgttcatccatgcctaccaggtgaagccacagtggaaagcatatgatgatgtcttcagaggaaggacaaatgctgcagaaattccactgattttatatctctttgctctgatttccgtgacatggctttggggaggactacacatggcctacagacacttctggatgttggttctctttgtcattttcaacagtctgcagggactttatgttttcatggtttatttcattttacacaaccaaatgtgttgccctatgaaggccagttacactgtggaaatgaatgggcatcctggacccagcacagcctttttcacgcccgggagtggaatgcctcctgctggaggggaaatcagcaagtccacccagaatctcatcggtgctatggaggaggtgccacctgactgggagagagcatccttccaacagggcagtcaggccagccctgatttaaagccaagtccacaaaatggagccacgttcccgtcctctggaggatatggccaggggtcactgatagccgatgaggagtcccaggagtttgatgatttaatatttgcattaaaaactggtgctggtctcagtgtcagtgataatgaatctggtcaaggcagccaggaggggggcaccttgactgactcccagatcgtggagctcaggaggatacccatcgccgacactcacctgtagcacctcactaaccattcgactgagcacactttcatatttgtatcagcttttgtgctaaaactctctaagtacatccacctgtgtaataggaacctgtgaattgtactggatgattaatacaaacgtgattgttgtatttggagtataaattactgattgtatgtgacctgaaaattcactgctataagaaaggtggagtcagtttgtatcagttaataggatgttcatattccaaggatattagttgtttttttaatcatcctatatggctaacattgtttaatgaaagtaataatcaataaagcaatagaatctaaaaaa

SEQ ID NO: 11628 - DNA, 6585 bp, Homo sapiens
ggagaaagaggcggaggcagtggcggccgcgaggggagggggagtcccgtctgactgagacggcaggcctgggcgggcgggcgggggtgccgcgaagggcggagcgccgggctggggatgagctaagcgggctcagagcgccgcggcattcagcccctcgtgttccgctaccgcgcgtgcgggattccggcgccgctctccgagctcgatccgctgctcgcacgggagccagctgggtgttatttctcaaactctgaggctgcggagttcacacattgaaatctgtcatctttttcagagagaaactttcggtaatgtatgtaaccttctgtaatggaagatgattgaagacaaggggcctcgtgttgctgactactttgttgtagcaggattaactgatgtttcaaagcctctagaagaagaaattcacttcaatgatgcttgtcataaagtagctaaaccaaaagaacctattacagatgtttcagttattatcaaatctcttggggaggaagtcccacaggattatatctgtattgatgttaccccaactggattgtcagctgatcttaataatggaagtcttgtggggccacagatttacctttgctatagaagaggaagagataagcctccacttacagatctgggggttttatatgactggaaagaaagattgaaacagggttgtgaaattattcagagtactccctatgggcgccccgcaaatattagtgggagtacctcatcacaaagaatttatatcacttaccgaagagcctctgaaaacatgactcagaatacgttggctgtcactgacatatgtattattatacccagtaaaggagaaagcccaccacacacgttctgcaaagtcgacaagaatctcaataacagtatgtggggatcagcagtatacttgtgttataaaaaatcggtggcaaagacgaacactgtatcttacaaagctggcctaatttgtagatatcctcaagaagattatgagtcattctcactaccggaatctgttcctctattttgtttaccaatgggtgcaaccattgaatgttggccatcaaatagcaaataccctctgcctgtattttctacttttgttttaactggagcctcagctgaaaaggtttatggtgctgctattcagttttatgaaccatactctgaggagaatctcacagaaaagcagagacttcttttgggtttaacatcagcagatgggaagtctgatagttccaaaacaattcatactaacaaatgcatctgtcttctttctcactggcctttttttgatgcattcaggaagtttctgacttttctgtatcgttattccatctctgggcctcatgtccttccaattgagaagcatatttctcattttatgcataaagttccttttccatctcctcagagaccacggattttagttcagttatcaccacatgataatctgattctcagtcagcctgtgtcttcacctcttccactaagtggtggcaagttttcaacactactgcagaatttaggccctgaaaatgctgtgacactactggtgtttgcagtaacagaacataaaattcttatccattccctacggccatccgtgcttactagtgtgacagaagcattagtgtctatgattttccctttccactggccatgcccgtatgttcctctctgcccactggctttagcagatgtcttgagtgcaccatgtccattcatagtagggattgattcaagatactttgatctctatgatcctccaccagatgtcagttgtgttgatgtagataccaacactatttctcagattggtgacaagaaaaatgtagcctggaagatacttccaaagaagccatgtaaaaatctgatgaacacactgaataatttgcatcagcaattggcaaaattgcagcagagaccgagagatgatggactcatggatttagcaataaatgactatgattttaattctggaaagaggttgcacatgatagatttggaaatccaagaggcatttttgtttttcatggcctctattttaaaaggttacagatcatacttaaggccaataacacaagccccatctgagacagccacagatgcagcctctctctttgccctacaagctttcttaagaagccgggaccggtcacatcaaaaattctataacatgatgaccaaaacacaaatgtttattcgcttcattgaagaatgttcttttgttagtgacaaagatgcaagcctggcattttttgatgattgtgtagataaagtggatatggacaagagcggtgaagtacgacttatagaactggatgaatctttcaaaagtgaacacactgtttttgtaacaccacctgagatcccccacctacccaatggtgaagaaccccctttacagtacagctataatggatttccagttcttaggaacaatttatttgaaagacctgaaggatttctacaagcaaagaagaacaaattgccttcaaaatcaagtagtcctaatagccctttgcccatgttcagaagaacaaaacaggaaattaaatcagcccataaaattgcaaagaggtactcttccatccctcagatgtggtctaggtgtctactgcgccactgttatggactgtggtttatttgtctcccagcttatgtgaaagtctgtcattcaaaagtcagggctctgaaaacagcatatgatgtgcttaaaaaaatgcagtcaaagaagatggatccacctgatgaggtatgctaccgcattcttatgcaactctgtggacaatatgatcagccagtgcttgcagttcgagtgctttttgaaatgcagaaagctggtattgaccccaatgccattacttatggttattataataaggctgttttggaaagtacctggccttcaagaagtcgtagtggctattttctttggacaaaagtaagaaatgttgttttaggagtaacacagttcaaaagagctttaaagaagcatgcacacttatcacaaacaactctctcaggtggccagtctgatcttggatataattcattatctaaagatgaagttagaagaggggatacatctactgaagacattcaagaagaaaaagataaaaaagggagtgattgtagttccttgtcagagagtgagagtacaaaaggaagtgctgattgccttcctaagctcagttatcaaaattcttccagtatcgttcgcctcactggtacaagtaacaacagtgctggtaaaatatcaggagaaagcatgggtaaggaaagcacacctgagctgctcttaatatcatctcttgaagatacaaatgaaacacgaaacattcaaagtagatgcttcaggaaaagacataaaagtgacaatgaaactaatttgcagcagcaagtggtctggggaaatagaaaccgtaatcttagtggaggggtactgatgggatttatgctcaatagaattaaccaggaagcaacccctggagatatagttgaaaaattgggagctgatgcaaaaattctttcaaatgttatctcaaaaagcacgagaccaaatactcttgatattgggaagccacctttaagatcaaaaagagacagtctagaaaaggaatctagtgatgatgatacaccttttgatggttctaactatttggcagataaagtggattctcctgttatttttgacttagaagacttagacagtgaaacagatgtatcaaaagcaggatgtgttgctacacaaaatcccaagaggattcaacgtatgaacagcagcttttcagtaaaaccttttgaaaaaactgatgtcgcaacaggatttgatcccctctctcttttggttgctgagactgaacagcagcaaaaagaagaagaggaggaggatgaagatgatagcaaaagcatttcaacaccatctgctaggcgtgatttagctgaagaaattgtgatgtatatgaataacatgagcagtcctttgacaagtcgtacaccaagcattgatttacaacgggcatgtgatgataaattaaataagaaaagtccaccattggtcaaggcatgcagaagatctagtctgcctcctaattctcctaagccagtgagacttaccaaatctaaaagttacacaaaaagtgaggagaaaccaagggatagactttggtcttctccagccttctcacctacttgcccatttagggaagaatctcaggatacattaacccactcatcaccttcatttaacttagatacactactagtacctaaactagatgttctaagaaacagtatgttcactgctggaaaaggagttgcagagaaagcaagcaaatggtattcaagattcaccatgtacaccacatcatctaaggatcaaagttctgatcgtaccagtctttcttcagtgggagcccaggattctgaatctacctctttaacagatgaagatgtctgccatgagttggaaggacctatctcctctcaagagaccagtgctacttcagggactaagagaattgatctcagccgaataagcctggaaagttctgcatccttggaaggatctctgtcgaagtttgccttacctgggaaatcagaagtgacatcttccttcaacgcgagtaatacaaatatcttccagaactatgcaatggaggttctcatctcaagttgctctcggtgtagaacttgtgattgtcttgtccatgatgaggaaatcatggctggctggacagcagatgattcaaatctcaatactacatgcccattctgtggcaatatcttcttaccctttctgaatatagaaataagagatttaagacgacctggaagatactttctaaagtcaagcccatcaacagaaaatatgcactttccatcctccatttcaagtcagacgaggcagtcttgcatttcaacatcagcctctggtcttgacacatctgctctctctgttcaagggaattttgatctaaatagcaaatctaaactgcaggaaaatttttgcacccgaagtattcagatccctgctaatagatcaaaaacagctatgtctaaatgtccaatatttccaatggccaggagtattagtacttctggccccttggataaggaagatactggaagacagaagctcatttctacaggcagcctgccagctactttacaaggagctacagattctttaggtttagaatggcaccttccaagtcccgatcctgtcactgttccgtatcttagtcctttagtggtatggaaagaacttgaaagcttattggaaaatgaaggtgatcatgcaataacagtagcagactttgtggaccatcatccaattgttttttggaacctggtatggtatttcagacgtcttgacttgcccagtaacttacctggattgattctttcttctgagcactgtaacaagtattcaaagattccccgccactgtatgtctgaagatagcaaatatgttttaatacaaatgttatgggacaatatgaagttacatcaggatccgggacagcccttgtacattctctggaatgcacacacccaaaaatatccaatggtccatttattgcaaaaaagtgataactcatttaaccaggaactgttgaaaagtatggtaaaaagcattaaaatgaatgatgtctatggaccaatgagtcagattttagagacactgaataagtgtccacattttaaaagacagaggagtttatacagagaaatactatttctctcacttgtggcactgggaagagaaaacattgatatagatgcttttgataaagagtacaagatggcatacgatcgtctcacacctagtcaagtcaagagtacacacaactgtgatagaccaccaagtacaggggtgatggaatgtcgaaaaacctttggagaaccttatctttaagatgtatttgtatgtgtaaacattcaatgtatattgtatagtcagtgtataaaataacacttttagactctaaatattttttcttcaatttttgaaaatacaatttgtaaatggttcaaaagactcagacagcttatgtacagaatgtttgaagaagagaatagtgacaagtggggagaaagccactttgtttctcatttcttttttcttcttctttaactcccctgtaataggaaataaagtatttttgtgatgaggaaatccctaaacaaaattagttgccataaaatatgacaactgctttatggtttcttttggaagagacagattgaaaaatcatgaatggaatctaaacagaaatgtcagatgaacgtatttcctgttttcatagactattcaaatgttttgaccatgaagttgtattatacatattttaaattgtttatagtaagttgatatttttttaatttttaaatttaatatagcaaacttaaaatgaatttaaacttaagcaagcaagcgtgtattttccttgtctgctgctatttgaagtaattagtacagctgcagatctctctgtgtatatctatctatatatatattttttattacttgggagaatgaattttaaaatgtcagtgctagtg

SEQ ID NO: 11629 - DNA, 1776 bp, Homo sapiens
gtttttcgcgccatgtcgtttgctgagagcgggtggcggtcggctctgcggcgccgcggtcccggcaccccgggccctgtggctcggccatcgtattcctcctttactcagggggacagctggggtgaaggcgaagtcgacgaggaggagggatgcgaccaagtggcccgcgacctgcgggcggagttctcggctggggcgtggtcagagcccagaaagcgctcggtgctcccgccggacgggaacgggtcgcccgttctgcccgataagcgcaatggtatctttcccgcggccgcgggcagcagagcccagcctcggcggtggccggtccaggtcctctctattctctgctcgctgctcttcgccattcttctcgccttcctcctcgccatcgcctacttgatcgttaaagagttgcatgctgagaatttgaaaaatgaagatgatgtagacactggactattaggattctggactctacttataatatccctaactgctggattctcctgttgcagcttttcttggacagtgacttactttgattcttttgaaccaggaatgtttcctcctactcctctttcacctgccaggttcaagaaactgactggacattctttccacatgggctatagcatggcgattttgaatggcatcgtagctgctcttactgtagcatggtgcctcatgtaaacccacactggagcgatattgttggcaaaacttaatcatgattgttttgtaataacaagaaggagcatcactgtctactcagaagactgagaaacctgctgttcattatgtagttcagatatttatcacaatcatcctcattatggaagaccttttaaagcattgttttagaatgtctgagtattaagatacagattaattgggaatatctgagtattaagtactttcttcagagtataagatgtttacctcatctttttacttttgtgtgtgtagttctttcaagttgtaggaaacattttaatggaatttaaactcaaacttgaatacaggacaatgcttgccttttcatgtatgtactacattttttgctaagaaatactgatatttctgtttagttgagctagaaatacttcttatttatacatttaggaaagcaaataatgcctactactccgacttttatagaagctacttttaaatcagaatatttaatttttgatattcatataattaatagaagttgcatttatattttttatggggcatagttccttatgtgtttttttaatgtattttcatactacatactgaatttgtatgtttttaaaattgttacatctagacaactgtaaacattatttttttagctagtgcaaacctagtacctgccatttttactaatttttgtctttaaaaaaagcaaaaaagcacattgacctaagttgaaaattaagtaagtttatttttaacaaaaaatgcctgaaaaaagctaaattatttaagtcattaagatattgagaaaaaatttgaaatttttactatttctgtttccacaattccaaatatttatcttggtgtatatattgttactttaacagaacttgcattattttgtttttaataaatataaacatgaaatttttgtatgtgagaatgattgaactagtttgttcttaatctcaaaaatttagttaccaaagtagaaaaggtattttgatactagatattaaaaactacatatagttaatataattttataatttttgtaattaaatgtgcttctgcaaaaaaaaaaaaaaa

SEQ ID NO: 11630 - DNA, 7691 bp, Homo sapiens
cgggagcggcgggagcggtggcggcggcagaggcggcggctccagcttcggctccggctcgggctcgggctccggctccggctccggctccggctccagctcgggtggcggtggcgggagcgggaccaggtggaggcggcggcggcagaggagtgggagcagcggccctagcggcttgcggggggacatgcggaccgacggcccctggataggcggaaggagtggaggccctggtgcccggcccttggtgctgagtatccagcaagagtgaccggggtgaagaagcaaagactcggttgattgtcctgggctgtggctggctgtggagctagagccctggatggcccctgagccagccccagggaggacgatggtgccccttgtgcctgcactggtgatgcttggtttggtggcaggcgcccatggtgacagcaaacctgtcttcattaaagtccctgaggaccagactgggctgtcaggaggggtagcctccttcgtgtgccaagctacaggagaacccaagccgcgcatcacatggatgaagaaggggaagaaagtcagctcccagcgcttcgaggtcattgagtttgatgatggggcagggtcagtgcttcggatccagccattgcgggtgcagcgagatgaagccatctatgagtgtacagctactaacagcctgggtgagatcaacactagtgccaagctctcagtgctcgaagaggaacagctgccccctgggttcccttccatcgacatggggcctcagctgaaggtggtggagaaggcacgcacagccaccatgctatgtgccgcaggcggaaatccagaccctgagatttcttggttcaaggacttccttcctgtagaccctgccacgagcaacggccgcatcaagcagctgcgttcaggtgccttgcagatagagagcagtgaggaatccgaccaaggcaagtacgagtgtgtggcgaccaactcggcaggcacacgttactcagcccctgcgaacctgtatgtgcgagtgcgccgcgtggctcctcgtttctccatccctcccagcagccaggaggtgatgccaggcggcagcgtgaacctgacatgcgtggcagtgggtgcacccatgccctacgtgaagtggatgatgggggccgaggagctcaccaaggaggatgagatgccagttggccgcaacgtcctggagctcagcaatgtcgtacgctctgccaactacacctgtgtggccatctcctcgctgggcatgatcgaggccacagcccaggtcacagtgaaagctcttccaaagcctccgattgatcttgtggtgacagagacaactgccaccagtgtcaccctcacctgggactctgggaactcggagcctgtaacctactatggcatccagtaccgcgcagcgggcacggagggcccctttcaggaggtggatggtgtggccaccacccgctacagcattggcggcctcagccctttctcggaatatgccttccgcgtgctggcggtgaacagcatcgggcgagggccgcccagcgaggcagtgcgggcacgcacgggagaacaggcgccctccagcccaccgcgccgcgtgcaggcacgcatgctgagcgccagcaccatgctggtgcagtgggagcctcccgaggagcccaacggcctggtgcggggataccgcgtctactatactccggactcccgccgccccccgaacgcctggcacaagcacaacaccgacgcggggctcctcacgaccgtgggcagcctgctgcctggcatcacctacagcctgcgcgtgcttgccttcaccgccgtgggcgatggccctcccagccccaccatccaggtcaagacgcagcagggagtgcctgcccagcccgcggacttccaggccgaggtggagtcggacaccaggatccagctctcgtggctgctgccccctcaggagcggatcatcatgtatgaactggtgtactgggcggcagaggacgaagaccaacagcacaaggtcaccttcgacccaacctcctcctacacactagaggacctgaagcctgacacactctaccgcttccagctggctgcacgctcggatatgggggtgggcgtcttcacccccaccattgaggcccgcacagcccagtccaccccctccgcccctccccagaaggtgatgtgtgtgagcatgggctccaccacggtccgggtaagttgggtcccgccgcctgccgacagccgcaacggcgttatcacccagtactccgtggcccacgaggcggtggacggcgaggaccgcgggcggcatgtggtggatggcatcagccgtgagcactccagctgggacctggtgggcctggagaagtggacggagtaccgggtgtgggtgcgggcacacacagacgtgggccccggccccgagagcagcccggtgctggtgcgcaccgatgaggacgtgcccagcgggcctccgcggaaggtggaggtggagccactgaactccactgctgtgcatgtctactggaagctgcctgtccccagcaagcagcatggccagatccgcggctaccaggtcacctacgtgcggctggagaatggcgagccccgtggactccccatcatccaagacgtcatgctagccgaggcccaggaaaccactatcagcggcctgaccccggagaccacctactccgttactgttgctgcctataccaccaagggggatggtgcccgcagcaagcccaaaattgtcactacaacaggtgcagtcccaggccggcccaccatgatgatcagcaccacggccatgaacactgcgctgctccagtggcacccacccaaggaactgcctggcgagctgctgggctaccggctgcagtactgccgggccgacgaggcgcggcccaacaccatagatttcggcaaggatgaccagcacttcacagtcaccggcctgcacaaggggaccacctacatcttccggcttgctgccaagaaccgggctggcttgggtgaggagttcgagaaggagatcaggacccccgaggacctgcccagcggcttcccccaaaacctgcatgtgacaggactgaccacgtctaccacagaactggcctgggacccgccagtgctggcggagaggaacgggcgcatcatcagctacaccgtggtgttccgagacatcaacagccaacaggagctgcagaacatcacgacagacacccgctttacccttactggcctcaagccagacaccacttacgacatcaaggtccgcgcatggaccagcaaaggctctggcccactcagccccagcatccagtcccggaccatgccggtggagcaagtgtttgccaagaacttccgggtggcggctgcaatgaagacgtctgtgctgctcagctgggaggttcccgactcctataagtcagctgtgccctttaagattctgtacaatgggcagagtgtggaggtggacgggcactcgatgcggaagctgatcgcagacctgcagcccaacacagagtactcgtttgtgctgatgaaccgtggcagcagcgcagggggcctgcagcacctggtgtccatccgcacagcccccgacctcctgcctcacaagccgctgcctgcctctgcctacatagaggacggccgcttcgatctctccatgccccatgtgcaagacccctcgcttgtcaggtggttctacattgttgtggtacccattgaccgtgtgggcgggagcatgctgacgccaaggtggagcacacccgaggaactggagctggacgagcttctagaagccatcgagcaaggcggagaggagcagcggcggcggcggcggcaggcagaacgtctgaagccatatgtggctgctcaactggatgtgctcccggagacctttaccttgggggacaagaagaactaccggggcttctacaaccggcccctgtctccggacttgagctaccagtgctttgtgcttgcctccttgaaggaacccatggaccagaagcgctatgcctccagcccctactcggatgagatcgtggtccaggtgacaccagcccagcagcaggaggagccggagatgctgtgggtgacgggtcccgtgctggcagtcatcctcatcatcctcattgtcatcgccatcctcttgttcaaaaggaaaaggacccactctccgtcctctaaggatgagcagtcgatcggactgaaggactccttgctggcccactcctctgaccctgtggagatgcggaggctcaactaccagaccccaggtatgcgagaccacccacccatccccatcaccgacctggcggacaacatcgagcgcctcaaagccaacgatggcctcaagttctcccaggagtatgagtccatcgaccctggacagcagttcacgtgggagaattcaaacctggaggtgaacaagcccaagaaccgctatgcgaatgtcatcgcctacgaccactctcgagtcatccttacctctatcgatggcgtccccgggagtgactacatcaatgccaactacatcgatggctaccgcaagcagaatgcctacatcgccacgcagggccccctgcccgagaccatgggcgatttctggagaatggtgtgggaacagcgcacggccactgtggtcatgatgacacggctggaggagaagtcccgggtaaaatgtgatcagtactggccagcccgtggcaccgagacctgtggccttattcaggtgaccctgttggacacagtggagctggccacatacactgtgcgcaccttcgcactccacaagagtggctccagtgagaagcgtgagctgcgtcagtttcagttcatggcctggccagaccatggagttcctgagtacccaactcccatcctggccttcctacgacgggtcaaggcctgcaaccccctagacgcagggcccatggtggtgcactgcagcgcgggcgtgggccgcaccggctgcttcatcgtgattgatgccatgttggagcggatgaagcacgagaagacggtggacatctatggccacgtgacctgcatgcgatcacagaggaactacatggtgcagacggaggaccagtacgtgttcatccatgaggcgctgctggaggctgccacgtgcggccacacagaggtgcctgcccgcaacctgtatgcccacatccagaagctgggccaagtgcctccaggggagagtgtgaccgccatggagctcgagttcaagttgctggccagctccaaggcccacacgtcccgcttcatcagcgccaacctgccctgcaacaagttcaagaaccggctggtgaacatcatgccctacgaattgacccgtgtgtgtctgcagcccatccgtggtgtggagggctctgactacatcaatgccagcttcctggatggttatagacagcagaaggcctacatagctacacaggggcctctggcagagagcaccgaggacttctggcgcatgctatgggagcacaattccaccatcatcgtcatgctgaccaagcttcgggagatgggcagggagaaatgccaccagtactggccagcagagcgctctgctcgctaccagtactttgttgttgacccgatggctgagtacaacatgccccagtatatcctgcgtgagttcaaggtcacggatgcccgggatgggcagtcaaggacaatccggcagttccagttcacagactggccagagcagggcgtgcccaagacaggcgagggattcattgacttcatcgggcaggtgcataagaccaaggagcagtttggacaggatgggcctatcacggtgcactgcagtgctggcgtgggccgcaccggggtgttcatcactctgagcatcgtcctggagcgcatgcgctatgagggcgtggtcgacatgtttcagaccgtgaagaccctgcgtacacagcgtcctgccatggtgcagacagaggaccagtatcagctgtgctaccgtgcggccctggagtacctcggcagctttgaccactatgcaacgtaactaccgctcccctctcctccgccacccccgccgtggggctccggaggggacccagctcctctgagccataccgaccatcgtccagccctcctacgcagatgctgtcactggcagagcacagcccacggggatcacagcgtttcaggaacgttgccacaccaatcagagagcctagaacatccctgggcaagtggatggcccagcaggcaggcactgtggcccttctgtccaccagacccacctggagcccgcttcaagctctctgttgcgctcccgcatttctcatgcttcttctcatggggtggggttggggcaaagcctcctttttaatacattaagtggggtagactgagggattttagcctcttccctctgatttttcctttcgcgaatccgtatctgcagaatgggccactgtaggggttggggtttattttgttttgttttttttttttttttgtatgacttctgctgaaggacagaacattgccttcctcgtgcagagctggggctgccagcctgagcggaggctcggccgtgggccgggaggcagtgctgatccggctgctcctccagcccttcagacgagatcctgtttcagctaaatgcagggaaactcaatgtttttttaagttttgttttccctttaaagcctttttttaggccacattgacagtggtgggcggggagaagatagggaacactcatccctggtcgtctatcccagtgtgtgtttaacattcacagcccagaaccacagatgtgtctgggagagcctggcaaggcattcctcatcaccatcgtgtttgcaaaggttaaaacaaaaacaaaaaaccacaaaaataaaaaacaaaaaaaacaaaaaacccaaaaaaaaaaaaaaaaagagtcagcccttggcttctgcttcaaaccctcaagaggggaagcaactccgtgtgcctggggttcccgagggagctgctggctgacctgggcccacagagcctggctttggtccccagcattgcagtatggtgtggtgtttgtaggctgtggggtctggctgtgtggccaaggtgaatagcacaggttagggtgtgtgccacaccccatgcacctcagggccaagcgggggcgtggctggcctttcaggtccaggccagtgggcctggtagcacatgtctgtcctcagagcaggggccagatgattttcctccctggtttgcagctgttttcaaagcccccgataatcgctcttttccactccaagatgccctcataaaccaatgtggcaagactactggacttctatcaatggtactctaatcagtccttattatcccagcttgctgaggggcagggagagcgcctcttcctctgggcagcgctatctagataggtaagtgggggcggggaagggtgcatagctgttttagctgagggacgtggtgccgacgtccccaaacctagctaggctaagtcaagatcaacattccagggttggtaatgttggatgatgaaacattcatttttaccttgtggatgctagtgctgtagagttcactgttgtacacagtctgttttctatttgttaagaaaaactacagcatcattgcataattcttgatggtaataaatttgaataatcagatttcttacaaaaaaaaaaaaa

SEQ ID NO: 11631 - DNA, 7718 bp, Homo sapiens
cgggagcggcgggagcggtggcggcggcagaggcggcggctccagcttcggctccggctcgggctcgggctccggctccggctccggctccggctccagctcgggtggcggtggcgggagcgggaccaggtggaggcggcggcggcagaggagtgggagcagcggccctagcggcttgcggggggacatgcggaccgacggcccctggataggcggaaggagtggaggccctggtgcccggcccttggtgctgagtatccagcaagagtgaccggggtgaagaagcaaagactcggttgattgtcctgggctgtggctggctgtggagctagagccctggatggcccctgagccagccccagggaggacgatggtgccccttgtgcctgcactggtgatgcttggtttggtggcaggcgcccatggtgacagcaaacctgtcttcattaaagtccctgaggaccagactgggctgtcaggaggggtagcctccttcgtgtgccaagctacaggagaacccaagccgcgcatcacatggatgaagaaggggaagaaagtcagctcccagcgcttcgaggtcattgagtttgatgatggggcagggtcagtgcttcggatccagccattgcgggtgcagcgagatgaagccatctatgagtgtacagctactaacagcctgggtgagatcaacactagtgccaagctctcagtgctcgaagaggaacagctgccccctgggttcccttccatcgacatggggcctcagctgaaggtggtggagaaggcacgcacagccaccatgctatgtgccgcaggcggaaatccagaccctgagatttcttggttcaaggacttccttcctgtagaccctgccacgagcaacggccgcatcaagcagctgcgttcaggtgccttgcagatagagagcagtgaggaatccgaccaaggcaagtacgagtgtgtggcgaccaactcggcaggcacacgttactcagcccctgcgaacctgtatgtgcgagtgcgccgcgtggctcctcgtttctccatccctcccagcagccaggaggtgatgccaggcggcagcgtgaacctgacatgcgtggcagtgggtgcacccatgccctacgtgaagtggatgatgggggccgaggagctcaccaaggaggatgagatgccagttggccgcaacgtcctggagctcagcaatgtcgtacgctctgccaactacacctgtgtggccatctcctcgctgggcatgatcgaggccacagcccaggtcacagtgaaagctcttccaaagcctccgattgatcttgtggtgacagagacaactgccaccagtgtcaccctcacctgggactctgggaactcggagcctgtaacctactatggcatccagtaccgcgcagcgggcacggagggcccctttcaggaggtggatggtgtggccaccacccgctacagcattggcggcctcagccctttctcggaatatgccttccgcgtgctggcggtgaacagcatcgggcgagggccgcccagcgaggcagtgcgggcacgcacgggagaacaggcgccctccagcccaccgcgccgcgtgcaggcacgcatgctgagcgccagcaccatgctggtgcagtgggagcctcccgaggagcccaacggcctggtgcggggataccgcgtctactatactccggactcccgccgccccccgaacgcctggcacaagcacaacaccgacgcggggctcctcacgaccgtgggcagcctgctgcctggcatcacctacagcctgcgcgtgcttgccttcaccgccgtgggcgatggccctcccagccccaccatccaggtcaagacgcagcagggagtgcctgcccagcccgcggacttccaggccgaggtggagtcggacaccaggatccagctctcgtggctgctgccccctcaggagcggatcatcatgtatgaactggtgtactgggcggcagaggacgaagaccaacagcacaaggtcaccttcgacccaacctcctcctacacactagaggacctgaagcctgacacactctaccgcttccagctggctgcacgctcggatatgggggtgggcgtcttcacccccaccattgaggcccgcacagcccagtccaccccctccgcccctccccagaaggtgatgtgtgtgagcatgggctccaccacggtccgggtaagttgggtcccgccgcctgccgacagccgcaacggcgttatcacccagtactccgtggcccacgaggcggtggacggcgaggaccgcgggcggcatgtggtggatggcatcagccgtgagcactccagctgggacctggtgggcctggagaagtggacggagtaccgggtgtgggtgcgggcacacacagacgtgggccccggccccgagagcagcccggtgctggtgcgcaccgatgaggacgtgcccagcgggcctccgcggaaggtggaggtggagccactgaactccactgctgtgcatgtctactggaagctgcctgtccccagcaagcagcatggccagatccgcggctaccaggtcacctacgtgcggctggagaatggcgagccccgtggactccccatcatccaagacgtcatgctagccgaggcccagtggcggccagaggagtccgaggactatgaaaccactatcagcggcctgaccccggagaccacctactccgttactgttgctgcctataccaccaagggggatggtgcccgcagcaagcccaaaattgtcactacaacaggtgcagtcccaggccggcccaccatgatgatcagcaccacggccatgaacactgcgctgctccagtggcacccacccaaggaactgcctggcgagctgctgggctaccggctgcagtactgccgggccgacgaggcgcggcccaacaccatagatttcggcaaggatgaccagcacttcacagtcaccggcctgcacaaggggaccacctacatcttccggcttgctgccaagaaccgggctggcttgggtgaggagttcgagaaggagatcaggacccccgaggacctgcccagcggcttcccccaaaacctgcatgtgacaggactgaccacgtctaccacagaactggcctgggacccgccagtgctggcggagaggaacgggcgcatcatcagctacaccgtggtgttccgagacatcaacagccaacaggagctgcagaacatcacgacagacacccgctttacccttactggcctcaagccagacaccacttacgacatcaaggtccgcgcatggaccagcaaaggctctggcccactcagccccagcatccagtcccggaccatgccggtggagcaagtgtttgccaagaacttccgggtggcggctgcaatgaagacgtctgtgctgctcagctgggaggttcccgactcctataagtcagctgtgccctttaagattctgtacaatgggcagagtgtggaggtggacgggcactcgatgcggaagctgatcgcagacctgcagcccaacacagagtactcgtttgtgctgatgaaccgtggcagcagcgcagggggcctgcagcacctggtgtccatccgcacagcccccgacctcctgcctcacaagccgctgcctgcctctgcctacatagaggacggccgcttcgatctctccatgccccatgtgcaagacccctcgcttgtcaggtggttctacattgttgtggtacccattgaccgtgtgggcgggagcatgctgacgccaaggtggagcacacccgaggaactggagctggacgagcttctagaagccatcgagcaaggcggagaggagcagcggcggcggcggcggcaggcagaacgtctgaagccatatgtggctgctcaactggatgtgctcccggagacctttaccttgggggacaagaagaactaccggggcttctacaaccggcccctgtctccggacttgagctaccagtgctttgtgcttgcctccttgaaggaacccatggaccagaagcgctatgcctccagcccctactcggatgagatcgtggtccaggtgacaccagcccagcagcaggaggagccggagatgctgtgggtgacgggtcccgtgctggcagtcatcctcatcatcctcattgtcatcgccatcctcttgttcaaaaggaaaaggacccactctccgtcctctaaggatgagcagtcgatcggactgaaggactccttgctggcccactcctctgaccctgtggagatgcggaggctcaactaccagaccccaggtatgcgagaccacccacccatccccatcaccgacctggcggacaacatcgagcgcctcaaagccaacgatggcctcaagttctcccaggagtatgagtccatcgaccctggacagcagttcacgtgggagaattcaaacctggaggtgaacaagcccaagaaccgctatgcgaatgtcatcgcctacgaccactctcgagtcatccttacctctatcgatggcgtccccgggagtgactacatcaatgccaactacatcgatggctaccgcaagcagaatgcctacatcgccacgcagggccccctgcccgagaccatgggcgatttctggagaatggtgtgggaacagcgcacggccactgtggtcatgatgacacggctggaggagaagtcccgggtaaaatgtgatcagtactggccagcccgtggcaccgagacctgtggccttattcaggtgaccctgttggacacagtggagctggccacatacactgtgcgcaccttcgcactccacaagagtggctccagtgagaagcgtgagctgcgtcagtttcagttcatggcctggccagaccatggagttcctgagtacccaactcccatcctggccttcctacgacgggtcaaggcctgcaaccccctagacgcagggcccatggtggtgcactgcagcgcgggcgtgggccgcaccggctgcttcatcgtgattgatgccatgttggagcggatgaagcacgagaagacggtggacatctatggccacgtgacctgcatgcgatcacagaggaactacatggtgcagacggaggaccagtacgtgttcatccatgaggcgctgctggaggctgccacgtgcggccacacagaggtgcctgcccgcaacctgtatgcccacatccagaagctgggccaagtgcctccaggggagagtgtgaccgccatggagctcgagttcaagttgctggccagctccaaggcccacacgtcccgcttcatcagcgccaacctgccctgcaacaagttcaagaaccggctggtgaacatcatgccctacgaattgacccgtgtgtgtctgcagcccatccgtggtgtggagggctctgactacatcaatgccagcttcctggatggttatagacagcagaaggcctacatagctacacaggggcctctggcagagagcaccgaggacttctggcgcatgctatgggagcacaattccaccatcatcgtcatgctgaccaagcttcgggagatgggcagggagaaatgccaccagtactggccagcagagcgctctgctcgctaccagtactttgttgttgacccgatggctgagtacaacatgccccagtatatcctgcgtgagttcaaggtcacggatgcccgggatgggcagtcaaggacaatccggcagttccagttcacagactggccagagcagggcgtgcccaagacaggcgagggattcattgacttcatcgggcaggtgcataagaccaaggagcagtttggacaggatgggcctatcacggtgcactgcagtgctggcgtgggccgcaccggggtgttcatcactctgagcatcgtcctggagcgcatgcgctatgagggcgtggtcgacatgtttcagaccgtgaagaccctgcgtacacagcgtcctgccatggtgcagacagaggaccagtatcagctgtgctaccgtgcggccctggagtacctcggcagctttgaccactatgcaacgtaactaccgctcccctctcctccgccacccccgccgtggggctccggaggggacccagctcctctgagccataccgaccatcgtccagccctcctacgcagatgctgtcactggcagagcacagcccacggggatcacagcgtttcaggaacgttgccacaccaatcagagagcctagaacatccctgggcaagtggatggcccagcaggcaggcactgtggcccttctgtccaccagacccacctggagcccgcttcaagctctctgttgcgctcccgcatttctcatgcttcttctcatggggtggggttggggcaaagcctcctttttaatacattaagtggggtagactgagggattttagcctcttccctctgatttttcctttcgcgaatccgtatctgcagaatgggccactgtaggggttggggtttattttgttttgttttttttttttttttgtatgacttctgctgaaggacagaacattgccttcctcgtgcagagctggggctgccagcctgagcggaggctcggccgtgggccgggaggcagtgctgatccggctgctcctccagcccttcagacgagatcctgtttcagctaaatgcagggaaactcaatgtttttttaagttttgttttccctttaaagcctttttttaggccacattgacagtggtgggcggggagaagatagggaacactcatccctggtcgtctatcccagtgtgtgtttaacattcacagcccagaaccacagatgtgtctgggagagcctggcaaggcattcctcatcaccatcgtgtttgcaaaggttaaaacaaaaacaaaaaaccacaaaaataaaaaacaaaaaaaacaaaaaacccaaaaaaaaaaaaaaaaagagtcagcccttggcttctgcttcaaaccctcaagaggggaagcaactccgtgtgcctggggttcccgagggagctgctggctgacctgggcccacagagcctggctttggtccccagcattgcagtatggtgtggtgtttgtaggctgtggggtctggctgtgtggccaaggtgaatagcacaggttagggtgtgtgccacaccccatgcacctcagggccaagcgggggcgtggctggcctttcaggtccaggccagtgggcctggtagcacatgtctgtcctcagagcaggggccagatgattttcctccctggtttgcagctgttttcaaagcccccgataatcgctcttttccactccaagatgccctcataaaccaatgtggcaagactactggacttctatcaatggtactctaatcagtccttattatcccagcttgctgaggggcagggagagcgcctcttcctctgggcagcgctatctagataggtaagtgggggcggggaagggtgcatagctgttttagctgagggacgtggtgccgacgtccccaaacctagctaggctaagtcaagatcaacattccagggttggtaatgttggatgatgaaacattcatttttaccttgtggatgctagtgctgtagagttcactgttgtacacagtctgttttctatttgttaagaaaaactacagcatcattgcataattcttgatggtaataaatttgaataatcagatttcttacaaaaaaaaaaaaa

SEQ ID NO: 11632 - DNA, 2144 bp, Homo sapiens
gctgaagacagagcgatggtagttctggaggcctcgctccggggccgacccgaggccacagtgcctccgcggtagaccggacttgggtgacgggctccgggctcccgaggtgaagagcatcgggggctgagggatggaagggtctaagacgtccaacaacagcaccatgcaggtgagcttcgtgtgccagcgctgcagccagcccctgaaactggacacgagtttcaagatcctggaccgtgtcaccatccaggaactcacagctccattacttaccacagcccaggcgaaaccaggagagacccaggaggaagagactaactcaggagaggagccatttattgaaactcctcgccaggatggtgtctctcgcagattcatccccccagccaggatgatgtccacagaaagtgccaacagcttcactctgattggggaggcatctgatggcggcaccatggagaacctcagccgaagactgaaggtcactggggacctttttgacatcatgtcgggccagacagatgtggatcacccactctgtgaggaatgcacagatactcttttagaccagctggacactcagctcaacgtcactgaaaatgagtgtcagaactacaaacgctgtttggagatcttagagcaaatgaatgaggatgacagtgaacagttacagatggagctaaaggagctggcactagaggaggagaggctgatccaggagctggaagacgtggaaaagaaccgcaagatagtggcagaaaatctcgagaaggtccaggctgaggctgagagactggatcaggaggaagctcagtatcagagagaatacagtgaatttaaacgacagcagctggagctggatgatgagctgaagagtgttgaaaaccagatgcgttatgcccagacgcagctggataagctgaagaaaaccaacgtctttaatgcaaccttccacatctggcacagtggacagtttggcacaatcaataacttcaggctgggtcgcctgcccagtgttcccgtggaatggaatgagattaatgctgcttggggccagactgtgttgctgctccatgctctggccaataagatgggtctgaaatttcagagataccgacttgttccttacggaaaccattcatatctggagtctctgacagacaaatctaaggagctgccgttatactgttctggggggttgcggtttttctgggacaacaagtttgaccatgcaatggtggctttcctggactgtgtgcagcagttcaaagaagaggttgagaaaggcgagacacgtttttgtcttccctacaggatggatgtggagaaaggcaagattgaagacacaggaggcagtggcggctcctattccatcaaaacccagtttaactctgaggagcagtggacaaaagctctcaagttcatgctgacgaatcttaagtggggtcttgcttgggtgtcctcacaattttataacaaatgacttttttccttagggggaggtttgccttaaaggcttttaattttgttttgtttgcaaacatgttttaaattaaattcgggtaatattaaacagtacatgtttacaataccaaaaaagaaaaaatccacaaaagccactttattttaaaatatcatgtgacagatactttccagagctacaacatgccatctatagttgccagccctggtcagttttgattcttaaccccatggactcctttccctttcttctctgaaaaaaactaatttaaatttgcttttcttttttttaactgagttgaattgagattgatgtgttttcactggatttttatctctctcaacttcctgcacttaacaatatgaaatagaaacttttgtctttactgagatgaggatatgtttgagatgcacagttggataatgtgggaaaatgacatctaagctttacctggtcaccatgtgatgtgatcagatgcttgaaatttaacacttttcacttggttcttatactgaatgccgactctgctctgtgttagagatatgaaatggtgtttgatactgtttgagacattatggagagatttaattatttgtaataaaagatttgctgcagtctgaaaactgaaaaaaaaaaaaaaaaaaaaaaaaaaaaaaaa

SEQ ID NO: 11633 - DNA, 2989 bp, Homo sapiens
gaccccctagtaacagaggcggtggctactgctgcggccactgggtttcggcctcttcccagcagcggctctaagaagcgcagcggaactcgaccggatccaacccagttagttacttcctgtctagagttgtagcttccacctgcaccttctagccaccatggcaacctcatctgaagaagttttgctgattgtaaagaaagtgcgtcaaaagaagcaggatggagctctgtacctcatggcagaaagaattgcttgggcacctgaaggcaaagatagatttacaatcagccatatgtatgcagatattaaatgccagaaaattagtccagaaggaaaagctaaaattcagcttcagctggtcctacatgcaggggacacaactaacttccatttttccaatgaaagcacagcagtgaaagagcgagatgcagtaaaagaccttcttcagcagctgctgcccaaattcaagaggaaagcaaataaagaactggaagagaagaacagaatgctgcaagaagatcctgttttgtttcagctttataaagaccttgttgtgagtcaagtgatcagtgctgaggaattctgggccaatcgtttaaatgtgaatgcaacagatagttcttccacatccaatcataagcaggatgttggcatttctgctgcatttctggctgatgtccggccccaaactgatggctgtaacggtctaagatataatttaacttctgatatcattgagtccatatttaggacctatccagcagtaaaaatgaaatatgcagaaaatgttccccacaacatgacagagaaggaattctggacacgttttttccagtcccattattttcacagggatcggctgaatacagggtcaaaggatctctttgcagaatgtgccaaaatagatgaaaaaggcctaaaaacaatggtttcattaggagtgaaaaacccactactagatttaacagctttggaagataaaccattagatgagggctatggcatttcctctgtgccatctgcttccaattctaaatccataaaagagaatagtaatgctgccatcatcaagagatttaaccatcacagtgccatggtcctggcagctggactcagaaaacaagaagcacaaaatgaacaaactagtgagcccagcaacatggatggaaattccggagatgcagactgctttcagccagcagtcaaaagggcgaaattacaagagtccattgaatatgaagacttggggaaaaataattctgtaaaaacgattgcactaaacctcaagaagtcagataggtattatcatggtccaactccaatccagtcactacagtatgcaacaagtcaggacattattaattcttttcaaagtattagacaagaaatggaagcttatacacccaagttaactcaggttctctcaagtagtgctgccagtagtaccatcacagcactgtcacctggaggggcacttatgcagggaggaacacagcaagccataaaccagatggtgccaaatgatattcaatctgaattgaaacacttatatgtagctgttggagaacttctacgacatttctggtcctgctttcctgttaatacgccattcctagaagaaaaggtagtgaaaatgaaaagtaatttggaacgattccaagttacgaagctctgtccattccaagaaaagattcggagacagtatttaagcacaaatttggtaagtcacatagaagagatgctccagacagcctacaacaagctccacacatggcagtcacggcgtctgatgaagaaaacgtgaggtggccatgatgcttacaggttttgtgagattgagagaactatgacctgcagcaactctggaaacctggcctgacagacaagcagatgacctcacaggagtgataagaaacatctgctccacgccaactcccagagctgatgctattgtacttgcacattggagactgaaaggaaagaagggactaaatgctggggaggtaaattaagacagaaccaaatgagctaagttgcaaatatatatatatacacacacacacatatatgtacatgtgtatgtacatatatattttaaaagactgtttactgcagttgctcaggaactgcttttgattcacattaagctgctttcagaaattaaaaaaacactttttaaagggtgcattgataaaatctgaggttttttggttgtcgtttttttctgtgtacatttttttcctaagtttatggcacagggtagaccttaagtattcctcctccatccttcattcttcaccctccattggatcctcaagttttaatgaattccaattataccttacatcagcaagttaaaaaaagtactttaaaataaagcaaagggagactgttgctcaaccatcaggaaacagttgtcagaagacatcattggttctgtgtttcctacggaaataagaaacgataaatattgcactgaatgtttgtggtttggagtccctgaataataaagagggaatatatttgcagaaagtcgcatagggttttttaatgcagaattttgtcagaagacaatggcgctgcatgtttttctttgagtgcaaatgtacattgctaagatttttttaagatggcatgtgctttgaaaagaagatattgcatttttaagagtttaaaaatcttatgagtgagaaatattaaaaaaatcttattttcacctctttagaagaaataaaagatgtttctcctatctccttttctctagtatttgactgttactgtccttggcgaatcgataatcattgcatagtgactgaaaagcctaagtgcaaaaaaaaaaaaaaaaagatgttcttgtttctgaacttcgtgccatattttgttcctgatgggatcaacttaatgtttaagactttagatgtcttgtattaaaaattacacaaaaaaagtaaaactttttatacttaaaaaaaaaaaaaaaaaaaaa

SEQ ID NO: 11634 - DNA, 3447 bp, Homo sapiens
acttactgtcattaaaccagtatgatgatggagtggggaatgcctcagtttctcccaccgccgagggcctataggactacagttcccagggccccgtgctgcaggctagcggcctcccgccaatgctggccagtaacctgagcatccctctccaaaaggtcacttcagggctccttgagggacagcaacagggggagcctagagctgctcagcttcggtgggggtggagtgagggctgtggccctgcctcacacaacctccctcacaccacccctgcaatgcagggtcgtgggcccctttctcaaagacatccagtggcctctgctagttgcacctcttccgtcaggggacactgacttggctcctgcaccacagcctgcagggggtcctggttccttttgccacaacacatggcctcccatcctggttcagccactgacagacagctccccaatccagcactctgcctgctccttcttgtatccaaccctccaaaaggcagggacaagggacagaagaccatgtgcaaggcctggaggaagtgggtcagcacaggcctgtgaacaagccaggccagtcttggcggcccaagtggagctcacctctccctcccctctcctctcctccccttgccctcaaaatagctccctgagctgccaggccaagaccctcccattgcaggggaggcggggcgtgctgcccagagccaggctttaaatccccttgaggctggggagctccactccttggctggaggcagtgctgaggccgccgtcccctctaccatcagtccagtccggcccgccctcctgcagccatgtcccggcccctgtcagaccaagagaaaagaaagcaaatcagtgtgcgtggcctggccggcgtggagaacgtgactgagctgaaaaagaacttcaaccggcacctgcatttcacactcgtaaaggaccgcaatgtggccaccccacgagactactactttgctctggcccataccgtgcgcgaccacctcgtggggcgctggatccgcacgcagcagcactactatgagaaggaccccaagaggatctactacctgtctttagagttctatatgggacggacgctacagaacaccatggtgaacctggccttagagaatgcctgtgacgaggccacctaccagctgggcctggacatggaggagctggaggaaattgaggaggatgcggggctgggcaacgggggcctgggccggctggcagcctgctttcttgactccatggcaacactgggcctggccgcctatggctacgggattcgctatgagtttgggatttttaaccagaagatctccgggggctggcagatggaggaggccgatgactggcttcgctacggcaacccctgggagaaggcccggcccgagttcacgctacctgtgcacttctacggccatgtggagcacaccagccagggtgccaagtgggtggacacacaggtggtactggccatgccctacgatacgcccgtgcctggctatcgcaacaatgttgtcaacaccatgcgcctctggtctgccaaggctcccaatgacttcaacctcaaggacttcaatgtcggtggctacatccaggctgtgttggaccgaaacctggcggagaacatctctcgtgtcctgtaccccaatgataatttcttcgaagggaaggagctgcggctgaagcaggagtatttcgtggtggctgccaccctccaggacatcatccgtcgcttcaagtcttccaagttcggctgccgtgatcccgtgcgcacgaacttcgatgccttcccagataaggtggccatccagctcaatgacacccacccctccctggccatccccgagctgatgaggatcctggtggacctggaacggatggactgggacaaggcgtgggatgtgacagtgaggacctgtgcctacaccaaccacacggtgctgcccgaggccctggagcgctggccggtgcacctcttggagacgctgctgccgcggcacctccagatcatctacgagatcaaccagcgcttcctcaaccgggtggcggccgcattcccaggggacgtagaccggctgcggcgcatgtcgctggtggaggagggcgcagtgaagcgcatcaacatggcacacctgtgcatcgcggggtcgcacgccgtcaacggcgtggcgcgcatccactccgagatcctcaagaagaccatcttcaaagacttctatgagctggagcctcataagttccagaataagaccaacggcatcacccctcggcgctggctggttctgtgtaaccccgggctggcagaggtcattgctgagcgcatcggggaggacttcatctctgacctggaccagctgcgcaaactgctctcctttgtggatgatgaagctttcattcgggatgtggccaaagtgaagcaggaaaacaagttgaagtttgctgcctacctagagagggaatacaaagtccacatcaaccccaactcactcttcgacatccaggtgaagcggattcacgaatataaacgacagctcctcaactgcctccatgtcatcaccctgtacaaccgcatcaagagggagcccaataagttttttgtgcctcggactgtgatgattggagggaaggctgcacctgggtaccacatggccaagatgatcatcagactcgtcacagccatcggggatgtggtcaaccatgacccggcagtgggtgaccgcctccgtgtcatcttcctggagaactaccgagtctcactggccgagaaagtgatcccagctgcagacctctctgagcagatctccactgcgggcactgaagcctcaggcaccggcaacatgaagttcatgctcaacggggctctgaccattggcaccatggacggggccaatgtggagatggcagaagaggcgggagaggaaaacttcttcatctttggcatgcgggtggaggatgtggataagcttgaccaaagagggtacaatgcccaggagtactacgatcgcattcctgagcttcggcaggtcattgagcagctgagcagtggcttcttctcccccaaacagcccgacctgttcaaggacattgtcaatatgctcatgcaccatgaccggtttaaagtcttcgcagattatgaagactacattaaatgccaggagaaagtcagcgccttgtacaagaacccaagagagtggacgcggatggtgatccggaacatagccacctctggcaagttctccagtgaccgcaccattgcccagtatgcccgggagatctggggtgtggagccttcccgccagcgcctgccagccccggatgaggccatctgagcctccagaccagaccccaaaccagcccttgagtctgtcacactctcttgggccagccccagcacctcatgcagagggtggggtactggagttagatctct

SEQ ID NO: 11635 - DNA, 2242 bp, Homo sapiens
cccgcccacttccaactaccgcctccggcctgcccagggagagagagggagtggagcccagggagagggagcgcgagagagggagggaggaggggacggtgctttggctgacttttttttaaaagagggtgggggtggggggtgattgctggtcgtttgttgtggctgttaaattttaaactgccatgcactcggcttccagtatgctgggagcggtgaagatggaagggcacgagccgtccgactggagcagctactatgcagagcccgagggctactcctccgtgagcaacatgaacgccggcctggggatgaacggcatgaacacgtacatgagcatgtcggcggccgccatgggcagcggctcgggcaacatgagcgcgggctccatgaacatgtcgtcgtacgtgggcgctggcatgagcccgtccctggcggggatgtcccccggcgcgggcgccatggcgggcatgggcggctcggccggggcggccggcgtggcgggcatggggccgcacttgagtcccagcctgagcccgctcggggggcaggcggccggggccatgggcggcctggccccctacgccaacatgaactccatgagccccatgtacgggcaggcgggcctgagccgcgcccgcgaccccaagacctacaggcgcagctacacgcacgcaaagccgccctactcgtacatctcgctcatcaccatggccatccagcagagccccaacaagatgctgacgctgagcgagatctaccagtggatcatggacctcttccccttctaccggcagaaccagcagcgctggcagaactccatccgccactcgctctccttcaacgactgtttcctgaaggtgccccgctcgcccgacaagcccggcaagggctccttctggaccctgcaccctgactcgggcaacatgttcgagaacggctgctacctgcgccgccagaagcgcttcaagtgcgagaagcagctggcgctgaaggaggccgcaggcgccgccggcagcggcaagaaggcggccgccggagcccaggcctcacaggctcaactcggggaggccgccgggccggcctccgagactccggcgggcaccgagtcgcctcactcgagcgcctccccgtgccaggagcacaagcgagggggcctgggagagctgaaggggacgccggctgcggcgctgagccccccagagccggcgccctctcccgggcagcagcagcaggccgcggcccacctgctgggcccgccccaccacccgggcctgccgcctgaggcccacctgaagccggaacaccactacgccttcaaccacccgttctccatcaacaacctcatgtcctcggagcagcagcaccaccacagccaccaccaccaccaaccccacaaaatggacctcaaggcctacgaacaggtgatgcactaccccggctacggttcccccatgcctggcagcttggccatgggcccggtcacgaacaaaacgggcctggacgcctcgcccctggccgcagatacctcctactaccagggggtgtactcccggcccattatgaactcctcttaagaagacgacggcttcaggcccggctaactctggcaccccggatcgaggacaagtgagagagcaagtgggggtcgagactttggggagacggtgttgcagagacgcaagggagaagaaatccataacacccccaccccaacacccccaagacagcagtcttcttcacccgctgcagccgttccgtcccaaacagagggccacacagataccccacgttctatataaggaggaaaacgggaaagaatataaagttaaaaaaaagcctccggtttccactactgtgtagactcctgcttcttcaagcacctgcagattctgatttttttgttgttgttgttctcctccattgctgttgttgcagggaagtcttacttaaaaaaaaaaaaaaattttgtgagtgactcggtgtaaaaccatgtagttttaacagaaccagagggttgtactattgtttaaaaacaggaaaaaaaataatgtaagggtctgttgtaaatgaccaagaaaaagaaaaaaaaagcattcccaatcttgacacggtgaaatccaggtctcgggtccgattaatttatggtttctgcgtgctttatttatggcttataaatgtgtattctggctgcaagggccagagttccacaaatctatattaaagtgttatacccggtttt

SEQ ID NO: 11636 - DNA, 2230 bp, Homo sapiens
tcggccgctgctagaggggctgcttgcgccaggcgccggccgccccactgcgggtccctggcggccggtgtctgaggagtcggagagccgaggcggccagaccgtgcgccccgcgcttctcccgaggccgttccgggtctgaactgtaacagggaggggcctcgcaggagcagcagcgggcgagttaaagtatgctgggagcggtgaagatggaagggcacgagccgtccgactggagcagctactatgcagagcccgagggctactcctccgtgagcaacatgaacgccggcctggggatgaacggcatgaacacgtacatgagcatgtcggcggccgccatgggcagcggctcgggcaacatgagcgcgggctccatgaacatgtcgtcgtacgtgggcgctggcatgagcccgtccctggcggggatgtcccccggcgcgggcgccatggcgggcatgggcggctcggccggggcggccggcgtggcgggcatggggccgcacttgagtcccagcctgagcccgctcggggggcaggcggccggggccatgggcggcctggccccctacgccaacatgaactccatgagccccatgtacgggcaggcgggcctgagccgcgcccgcgaccccaagacctacaggcgcagctacacgcacgcaaagccgccctactcgtacatctcgctcatcaccatggccatccagcagagccccaacaagatgctgacgctgagcgagatctaccagtggatcatggacctcttccccttctaccggcagaaccagcagcgctggcagaactccatccgccactcgctctccttcaacgactgtttcctgaaggtgccccgctcgcccgacaagcccggcaagggctccttctggaccctgcaccctgactcgggcaacatgttcgagaacggctgctacctgcgccgccagaagcgcttcaagtgcgagaagcagctggcgctgaaggaggccgcaggcgccgccggcagcggcaagaaggcggccgccggagcccaggcctcacaggctcaactcggggaggccgccgggccggcctccgagactccggcgggcaccgagtcgcctcactcgagcgcctccccgtgccaggagcacaagcgagggggcctgggagagctgaaggggacgccggctgcggcgctgagccccccagagccggcgccctctcccgggcagcagcagcaggccgcggcccacctgctgggcccgccccaccacccgggcctgccgcctgaggcccacctgaagccggaacaccactacgccttcaaccacccgttctccatcaacaacctcatgtcctcggagcagcagcaccaccacagccaccaccaccaccaaccccacaaaatggacctcaaggcctacgaacaggtgatgcactaccccggctacggttcccccatgcctggcagcttggccatgggcccggtcacgaacaaaacgggcctggacgcctcgcccctggccgcagatacctcctactaccagggggtgtactcccggcccattatgaactcctcttaagaagacgacggcttcaggcccggctaactctggcaccccggatcgaggacaagtgagagagcaagtgggggtcgagactttggggagacggtgttgcagagacgcaagggagaagaaatccataacacccccaccccaacacccccaagacagcagtcttcttcacccgctgcagccgttccgtcccaaacagagggccacacagataccccacgttctatataaggaggaaaacgggaaagaatataaagttaaaaaaaagcctccggtttccactactgtgtagactcctgcttcttcaagcacctgcagattctgatttttttgttgttgttgttctcctccattgctgttgttgcagggaagtcttacttaaaaaaaaaaaaaaattttgtgagtgactcggtgtaaaaccatgtagttttaacagaaccagagggttgtactattgtttaaaaacaggaaaaaaaataatgtaagggtctgttgtaaatgaccaagaaaaagaaaaaaaaagcattcccaatcttgacacggtgaaatccaggtctcgggtccgattaatttatggtttctgcgtgctttatttatggcttataaatgtgtattctggctgcaagggccagagttccacaaatctatattaaagtgttatacccggtttt

SEQ ID NO: 11637 - DNA, 2618 bp, Homo sapiens
ctgaggcaggggtctctgggggcgaggagggcgcgtcgccctctgcccccgccggcaccctggccatgacaggcaagtcggtgaaggacgtggatcggtaccaggctgtcctggccaacctgctgctggaggaggataacaagttttgtgcagattgccagtctaaagggccgcgatgggcctcttggaacattggtgtgttcatctgcattcgatgtgctggaatccacaggaatctgggggtgcacatatccagggtaaagtcagttaacctcgaccagtggactcaagaacagattcagtgcatgcaagagatgggaaatggaaaggcaaaccgactttatgaagcctatcttcctgagacctttcggcgacctcagatagacccagctgttgaaggatttattcgagacaaatatgagaagaagaaatacatggaccgaagtctggacatcaatgcctttaggaaagaaaaagatgacaagtggaaaagagggagcgaaccagttccagaaaaaaaattggaacctgttgtttttgagaaggtgaaaatgccacagaaaaaagaagacccacagctacctcggaaaagctccccgaaatccacagcgcctgtcatggatttgttgggccttgatgctcctgtggcctgctccattgcaaatagtaagaccagcaataccctagagaaggatttagatctgttggcctctgttccatccccttcttcttccggttccagaaaggttgtaggttccatgccaactgcagggagtgccggctctgttcctgaaaatctgaacctgtttccggagccagggagcaaatcagaagaaataggcaagaaacagctctctaaagactccattctttcactgtatggatcccagacgcctcaaatgcctactcaagcaatgttcatggctcccgctcagatggcatatcccacagcctaccccagcttccccggggttacacctcctaacagcataatggggagcatgatgcctccaccagtaggcatggttgctcagccaggagcttctgggatggttgcccccatggccatgcctgcaggctatatgggtggcatgcaggcatcaatgatgggtgtgccgaatggaatgatgaccacccagcaggctggctacatggcaggcatggcagctatgccccagactgtgtatggggtccagccagctcagcagctgcaatggaaccttactcagatgacccagcagatggctgggatgaacttctatggagccaatggcatgatgaactatggacagtcaatgagtggcggaaatggacaggcagcaaatcagactctcagtcctcagatgtggaaataaaaacaaaacacctgtatggctgccattctcttcagccctcgctctcccctttccacagcctccacccctgacccccatcctcttttcctacctctctgtttggtttagaaattgctcaataagtcatttggggtttggcatcctgcccagccacttcccaaacatgaagacctctctgttgctttatgttgtacatgccccatagccatcccaacgtcctccccagtcctctcctggcaccagcaccttagaagttgttggcagaaggcacttaaactgtgggagaagtgtgcacacctttgagtcccttccctcaaggttaaagctcctgtcagactctcagaagggtctgtgggtgttgtatattaggcaaacaggggaaagcttagaggtccttctatatgtgttaataagctgtttctaagtgtttaaatttgaaaagcatcatgttctcatgatttatgggaatgaagcaagtactgaaatcaaattaaatactccctgggtcctgggtcagtttgaccctagccctggggtgaggcaagccccctcctatgaggatgagcaaaaatactactctcttcgccctgagttgctttctggatctggggcttcaggacttgctgcttcagtcagcttttattagcaccaaagactttatgaagatcccacacacagacacacatcccttcccgcctcccccctgccttcagtaggatctggctccgtggctggaggaccaacccctatagtgggaatgcagagcttaacgtgtactgcttgtgtgtgtgcgtgagtgtgtgtgtgtgtatgagtgtgtgttccgcctcccaccctctccccatctgctctgggtatttttgtttttgtttagttttaggtttacaacagagaggaattaatttatcagcagcctaaaactgttgtgtttttcttatggtttaaaaaacgccatgtcattgataactccctttctcccttcccttctcccggtctgctgatcactctttcatgcctgtgtatccagggtgctctgtttccccaccgttcccaggtgtacgaggcagagggccgggacagctttcctctcagtcattgttcaccccacttgaaaattcagacaagaaaactttgcttaaaagatttcatgtgtgggaaccacagttcctggctgcctttctcctgtgtatgtgtaaattccttaataaatattgcagggaaaaaaaaaaaaaaaaaaaaaaaaaaaaaaaaaaaaaaaaaaaa

SEQ ID NO: 11638 - DNA, 4563 bp, Homo sapiens
gtgaaaaaggcgagccaccaaaacccatctccagtctcctcccgggggcccccagcccgcctctgtgccactttgcatcccacgccggaggaggcattaacgagaccgggtaaggctttttaaacggtccaaggtgtagagccatacttcaggaggatcctcagaagttttggacaagcctccccaaatgtggcaggtgctgtgctggccattggtgacccaaagatgatgaaaaatatgttcctgcccacaaggagttagcgacctactgggctttcctcttgctgatgacatgattcctgtttgaatctgttgacaagattctgaaagctgaacagagaattctggcactgcactgggtaggaaaaaggatgtcttccaagcgaccagcctctccgtatggggaagcagatggagaggtagccatggtgacaagcagacagaaagtggaagaagaggagagtgacgggctcccagcctttcaccttcccttgcatgtgagttttcccaacaagcctcactctgaggaatttcagccagtttctctgctgacgcaagagacttgtggccataggactcccacttctcagcacaatacaatggaagttgatggcaataaagttatgtcttcatttgccccacacaactcatctacctcacctcagaaggcagaagaaggtgggcgacagagtggcgagtccttgtctagtacagccctgggaactcctgaacggcgcaagggcagtttagctgatgttgttgacaccttgaagcagaggaaaatggaagagctcatcaaaaacgagccggaagaaacccccagtattgaaaaactactctcaaaggactggaaagacaagcttcttgcaatgggatcggggaactttggcgaaataaaagggactcccgagagcttagctgagaaagaaaggcaactcatgggtatgatcaaccagctgaccagcctccgagagcagctgttggctgcccacgatgagcagaagaaactagctgcctctcagattgagaaacagcgtcagcaaatggagctggccaagcagcaacaagaacaaattgcaagacagcagcagcagcttctacagcaacaacacaaaatcaatttgctccagcaacagatccaggttcaaggtcagctgccgccattaatgattcccgtattccctcctgatcaacggacactggctgcagctgcccagcaaggattcctcctccctccaggcttcagctataaggctggatgtagtgacccttaccctgttcagctgatcccaactaccatggcagctgctgccgcagcaacaccaggcttaggcccactccaactgcagcagttatatgctgcccagctagctgcaatgcaggtatctccaggagggaagctgccaggcataccccaaggcaaccttggtgctgctgtatctcctaccagcattcacacagacaagagcacaaacagcccaccacccaaaagcaaggatgaagtggcacagccactgaacctatcagctaaacccaagacctctgatggcaaatcacccacatcacccacctctccccatatgccagctctgagaataaacagtggggcaggccccctcaaagcctctgtcccagcagcgttagctagtccttcagccagagttagcacaataggttacttaaatgaccatgatgctgtcaccaaggcaatccaagaagctcggcaaatgaaggagcaactccgacgggaacaacaggtgcttgatgggaaggtggctgttgtgaatagtctgggtctcaataactgccgaacagaaaaggaaaaaacaacactggagagtctgactcagcaactggcagttaaacagaatgaagaaggaaaatttagccatgcaatgatggatttcaatctgagtggagattctgatggaagtgctggagtctcagagtcaagaatttatagggaatcccgagggcgtggtagcaatgaaccccacataaagcgtccaatgaatgccttcatggtgtgggctaaagatgaacggagaaagatccttcaagcctttcctgacatgcacaactccaacatcagcaagatattgggatctcgctggaaagctatgacaaacctagagaaacagccatattatgaggagcaagcccgtctcagcaagcagcacctggagaagtaccctgactataagtacaagcccaggccaaagcgcacctgcctggtggatggcaaaaagctgcgcattggtgaatacaaggcaatcatgcgcaacaggcggcaggaaatgcggcagtacttcaatgttgggcaacaagcacagatccccattgccactgctggtgttgtgtaccctggagccatcgccatggctgggatgccctcccctcacctgccctcggagcactcaagcgtgtctagcagcccagagcctgggatgcctgttatccagagcacttacggtgtgaaaggagaggagccacatatcaaagaagagatacaggccgaggacatcaatggagaaatttatgatgagtacgacgaggaagaggatgatccagatgtagattatgggagtgacagtgaaaaccatattgcaggacaagccaactgataagggtcaaaagattgttgtgaccttaggacttaaagaagccctaactggttcatccttaccagtggccaagcacattaactttctcatacactgactgttactttaactgttagtcttaaatagttgggacatcagctgactaatagacctcagcctcaaaaggcttggaaagaaaaaacaaatacaacaagcaaacaacaatatcaacaacaagagattgaaataagctatgggtaaaataatgccagtaattcagctgctacatccaagcactgaagtcttacccgtcaacttttttttttttttaaataaactttatggctgtttgttctacaatgttctagaaattctcactcaggtacacagtgccaacaagtggcttgtgaatgtgttttgttgttttgtgctacaatttttaaaaagaaaaaagttttgttttgttttttggggtttctgggttttttccttttctttttctttcctttcattttttttctttgtaatgcacctgacagaaaaaaaagaaaaatgaatttctctttacttctctccaccttctccatctctctactttaaagatggaagtctgtgcatgaggggaaagagggaaaaagagcctgtttttaacttccttgctatccaccacaaaataagcaattattttctttagaggactttatctattgcacaccacactacatctttgagcaagtgccaaatttgtactgaagtgttgaccaagttcattttttctctttactttttccttttccttcttaagttaggacagtgttaaatcttagacaatcccttgaaaaacctgaaataccagcagctggtgagatttgacttttttttttaatggaaactgtaggtgctgttctcaggtgaaaagagagagagagagagagacataagaaatttagagaaaaatattttctgatcttggatttttgtgtgtatgtatgtatgtgattatggtactaataataggaataacgttggaccattgtgagttaaacccacatctggggatgaaatcccacatcctcccaagtgactggtctagaaataatcttgaccttgactttgcacttcaaatgacaacttaaccaagtatagggctcagaaattatatttttaaatgtctgattattattggatggatcaggtggccctgtgtaatagaggtgtgcatgtataacatggaagctactagcaaactgctcccagatgtcctttctccctggtcagttggttccattaacgtttgctacttagtgatttttgtttttcctgttgatattttgagcaaaacaatcattgttttcattgaatatatttggccattttttcagacaaatagaattagcttatttcttcaacattccatcctttcccgatcaggaaatgaaactgatgattttataaggtatttttcacccctccatgaagtgaggtggaggcctttagcatttcagaagtgtgggccatatgtagttcatgccataaaaagtaggatttaattaaaagtcattgcagcccaataaaatggagcctggctgcacccagggatccttgccactgctcttcccttgctgtcagattaatccactgaagtccaactttggttcaagcagagtatttgcaaagagcaacaactgaatgtgatgggactgcttatgtagattttgccagccaaatgccaaggcagttgtagggcctgtacaaataaatgcaaaatcatttcaagtcaattgccattatttgtattgaagtatcagatagatagtaaatactgcaactagtagcttgatgtgctatagttttcactccagtcatcattttcctatctcaccccccgaaacaccaccctaaagttggatttttacatataaataaaaaaagaatcccttttaaaaaaaaaaaaaaaaaa

SEQ ID NO: 11639 - DNA, 4333 bp, Homo sapiens
gagaaaatcaattggtttagaaggtttggactcacttgacaggttcagttggagacgatcataggtggctgctgtgacaaagggaaattgtgcttttccagcatgcttactgaccctgatttacctcaggagtttgaaaggatgtcttccaagcgaccagcctctccgtatggggaagcagatggagaggtagccatggtgacaagcagacagaaagtggaagaagaggagagtgacgggctcccagcctttcaccttcccttgcatgtgagttttcccaacaagcctcactctgaggaatttcagccagtttctctgctgacgcaagagacttgtggccataggactcccacttctcagcacaatacaatggaagttgatggcaataaagttatgtcttcatttgccccacacaactcatctacctcacctcagaaggcagaagaaggtgggcgacagagtggcgagtccttgtctagtacagccctgggaactcctgaacggcgcaagggcagtttagctgatgttgttgacaccttgaagcagaggaaaatggaagagctcatcaaaaacgagccggaagaaacccccagtattgaaaaactactctcaaaggactggaaagacaagcttcttgcaatgggatcggggaactttggcgaaataaaagggactcccgagagcttagctgagaaagaaaggcaactcatgggtatgatcaaccagctgaccagcctccgagagcagctgttggctgcccacgatgagcagaagaaactagctgcctctcagattgagaaacagcgtcagcaaatggagctggccaagcagcaacaagaacaaattgcaagacagcagcagcagcttctacagcaacaacacaaaatcaatttgctccagcaacagatccaggttcaaggtcagctgccgccattaatgattcccgtattccctcctgatcaacggacactggctgcagctgcccagcaaggattcctcctccctccaggcttcagctataaggctggatgtagtgacccttaccctgttcagctgatcccaactaccatggcagctgctgccgcagcaacaccaggcttaggcccactccaactgcagcagttatatgctgcccagctagctgcaatgcaggtatctccaggagggaagctgccaggcataccccaaggcaaccttggtgctgctgtatctcctaccagcattcacacagacaagagcacaaacagcccaccacccaaaagcaaggatgaagtggcacagccactgaacctatcagctaaacccaagacctctgatggcaaatcacccacatcacccacctctccccatatgccagctctgagaataaacagtggggcaggccccctcaaagcctctgtcccagcagcgttagctagtccttcagccagagttagcacaataggttacttaaatgaccatgatgctgtcaccaaggcaatccaagaagctcggcaaatgaaggagcaactccgacgggaacaacaggtgcttgatgggaaggtggctgttgtgaatagtctgggtctcaataactgccgaacagaaaaggaaaaaacaacactggagagtctgactcagcaactggcagttaaacagaatgaagaaggaaaatttagccatgcaatgatggatttcaatctgagtggagattctgatggaagtgctggagtctcagagtcaagaatttatagggaatcccgagggcgtggtagcaatgaaccccacataaagcgtccaatgaatgccttcatggtgtgggctaaagatgaacggagaaagatccttcaagcctttcctgacatgcacaactccaacatcagcaagatattgggatctcgctggaaagctatgacaaacctagagaaacagccatattatgaggagcaagcccgtctcagcaagcagcacctggagaagtaccctgactataagtacaagcccaggccaaagcgcacctgcctggtggatggcaaaaagctgcgcattggtgaatacaaggcaatcatgcgcaacaggcggcaggaaatgcggcagtacttcaatgttgggcaacaagcacagatccccattgccactgctggtgttgtgtaccctggagccatcgccatggctgggatgccctcccctcacctgccctcggagcactcaagcgtgtctagcagcccagagcctgggatgcctgttatccagagcacttacggtgtgaaaggagaggagccacatatcaaagaagagatacaggccgaggacatcaatggagaaatttatgatgagtacgacgaggaagaggatgatccagatgtagattatgggagtgacagtgaaaaccatattgcaggacaagccaactgataagggtcaaaagattgttgtgaccttaggacttaaagaagccctaactggttcatccttaccagtggccaagcacattaactttctcatacactgactgttactttaactgttagtcttaaatagttgggacatcagctgactaatagacctcagcctcaaaaggcttggaaagaaaaaacaaatacaacaagcaaacaacaatatcaacaacaagagattgaaataagctatgggtaaaataatgccagtaattcagctgctacatccaagcactgaagtcttacccgtcaacttttttttttttttaaataaactttatggctgtttgttctacaatgttctagaaattctcactcaggtacacagtgccaacaagtggcttgtgaatgtgttttgttgttttgtgctacaatttttaaaaagaaaaaagttttgttttgttttttggggtttctgggttttttccttttctttttctttcctttcattttttttctttgtaatgcacctgacagaaaaaaaagaaaaatgaatttctctttacttctctccaccttctccatctctctactttaaagatggaagtctgtgcatgaggggaaagagggaaaaagagcctgtttttaacttccttgctatccaccacaaaataagcaattattttctttagaggactttatctattgcacaccacactacatctttgagcaagtgccaaatttgtactgaagtgttgaccaagttcattttttctctttactttttccttttccttcttaagttaggacagtgttaaatcttagacaatcccttgaaaaacctgaaataccagcagctggtgagatttgacttttttttttaatggaaactgtaggtgctgttctcaggtgaaaagagagagagagagagagacataagaaatttagagaaaaatattttctgatcttggatttttgtgtgtatgtatgtatgtgattatggtactaataataggaataacgttggaccattgtgagttaaacccacatctggggatgaaatcccacatcctcccaagtgactggtctagaaataatcttgaccttgactttgcacttcaaatgacaacttaaccaagtatagggctcagaaattatatttttaaatgtctgattattattggatggatcaggtggccctgtgtaatagaggtgtgcatgtataacatggaagctactagcaaactgctcccagatgtcctttctccctggtcagttggttccattaacgtttgctacttagtgatttttgtttttcctgttgatattttgagcaaaacaatcattgttttcattgaatatatttggccattttttcagacaaatagaattagcttatttcttcaacattccatcctttcccgatcaggaaatgaaactgatgattttataaggtatttttcacccctccatgaagtgaggtggaggcctttagcatttcagaagtgtgggccatatgtagttcatgccataaaaagtaggatttaattaaaagtcattgcagcccaataaaatggagcctggctgcacccagggatccttgccactgctcttcccttgctgtcagattaatccactgaagtccaactttggttcaagcagagtatttgcaaagagcaacaactgaatgtgatgggactgcttatgtagattttgccagccaaatgccaaggcagttgtagggcctgtacaaataaatgcaaaatcatttcaagtcaattgccattatttgtattgaagtatcagatagatagtaaatactgcaactagtagcttgatgtgctatagttttcactccagtcatcattttcctatctcaccccccgaaacaccaccctaaagttggatttttacatataaataaaaaaagaatcccttttaaaaaaaaaaaaaaaaaa

SEQ ID NO: 11640 - DNA, 3095 bp, Homo sapiens
atttgtgccataggagctgtgcatgcatgatgaagtggcacagccactgaacctatcagctaaacccaagacctctgatggcaaatcacccacatcacccacctctccccatatgccagctctgagaataaacagtggggcaggccccctcaaagcctctgtcccagcagcgttagctagtccttcagccagagttagcacaataggttacttaaatgaccatgatgctgtcaccaaggcaatccaagaagctcggcaaatgaaggagcaactccgacgggaacaacaggtgcttgatgggaaggtggctgttgtgaatagtctgggtctcaataactgccgaacagaaaaggaaaaaacaacactggagagtctgactcagcaactggcagttaaacagaatgaagaaggaaaatttagccatgcaatgatggatttcaatctgagtggagattctgatggaagtgctggagtctcagagtcaagaatttatagggaatcccgagggcgtggtagcaatgaaccccacataaagcgtccaatgaatgccttcatggtgtgggctaaagatgaacggagaaagatccttcaagcctttcctgacatgcacaactccaacatcagcaagatattgggatctcgctggaaagctatgacaaacctagagaaacagccatattatgaggagcaagcccgtctcagcaagcagcacctggagaagtaccctgactataagtacaagcccaggccaaagcgcacctgcctggtggatggcaaaaagctgcgcattggtgaatacaaggcaatcatgcgcaacaggcggcaggaaatgcggcagtacttcaatgttgggcaacaagcacagatccccattgccactgctggtgttgtgtaccctggagccatcgccatggctgggatgccctcccctcacctgccctcggagcactcaagcgtgtctagcagcccagagcctgggatgcctgttatccagagcacttacggtgtgaaaggagaggagccacatatcaaagaagagatacaggccgaggacatcaatggagaaatttatgatgagtacgacgaggaagaggatgatccagatgtagattatgggagtgacagtgaaaaccatattgcaggacaagccaactgataagggtcaaaagattgttgtgaccttaggacttaaagaagccctaactggttcatccttaccagtggccaagcacattaactttctcatacactgactgttactttaactgttagtcttaaatagttgggacatcagctgactaatagacctcagcctcaaaaggcttggaaagaaaaaacaaatacaacaagcaaacaacaatatcaacaacaagagattgaaataagctatgggtaaaataatgccagtaattcagctgctacatccaagcactgaagtcttacccgtcaacttttttttttttttaaataaactttatggctgtttgttctacaatgttctagaaattctcactcaggtacacagtgccaacaagtggcttgtgaatgtgttttgttgttttgtgctacaatttttaaaaagaaaaaagttttgttttgttttttggggtttctgggttttttccttttctttttctttcctttcattttttttctttgtaatgcacctgacagaaaaaaaagaaaaatgaatttctctttacttctctccaccttctccatctctctactttaaagatggaagtctgtgcatgaggggaaagagggaaaaagagcctgtttttaacttccttgctatccaccacaaaataagcaattattttctttagaggactttatctattgcacaccacactacatctttgagcaagtgccaaatttgtactgaagtgttgaccaagttcattttttctctttactttttccttttccttcttaagttaggacagtgttaaatcttagacaatcccttgaaaaacctgaaataccagcagctggtgagatttgacttttttttttaatggaaactgtaggtgctgttctcaggtgaaaagagagagagagagagagacataagaaatttagagaaaaatattttctgatcttggatttttgtgtgtatgtatgtatgtgattatggtactaataataggaataacgttggaccattgtgagttaaacccacatctggggatgaaatcccacatcctcccaagtgactggtctagaaataatcttgaccttgactttgcacttcaaatgacaacttaaccaagtatagggctcagaaattatatttttaaatgtctgattattattggatggatcaggtggccctgtgtaatagaggtgtgcatgtataacatggaagctactagcaaactgctcccagatgtcctttctccctggtcagttggttccattaacgtttgctacttagtgatttttgtttttcctgttgatattttgagcaaaacaatcattgttttcattgaatatatttggccattttttcagacaaatagaattagcttatttcttcaacattccatcctttcccgatcaggaaatgaaactgatgattttataaggtatttttcacccctccatgaagtgaggtggaggcctttagcatttcagaagtgtgggccatatgtagttcatgccataaaaagtaggatttaattaaaagtcattgcagcccaataaaatggagcctggctgcacccagggatccttgccactgctcttcccttgctgtcagattaatccactgaagtccaactttggttcaagcagagtatttgcaaagagcaacaactgaatgtgatgggactgcttatgtagattttgccagccaaatgccaaggcagttgtagggcctgtacaaataaatgcaaaatcatttcaagtcaattgccattatttgtattgaagtatcagatagatagtaaatactgcaactagtagcttgatgtgctatagttttcactccagtcatcattttcctatctcaccccccgaaacaccaccctaaagttggatttttacatataaataaaaaaagaatcccttttaaaaaaaaaaaaaaaaaa

SEQ ID NO: 11641 - DNA, 1345 bp, Homo sapiens
aaaacagccggggctccagcgggagaacgataatgcaaagtgctatgttcttggctgttcaacacgactgcagacccatggacaagagcgcaggcagtggccacaagagcgaggagaagcgagaaaagatgaaacggacccttttaaaagattggaagacccgtttgagctacttcttacaaaattcctctactcctgggaagcccaaaaccggcaaaaaaagcaaacagcaagctttcatcaagccttctcctgaggaagcacagctgtggtcagaagcatttgacgagctgctagccagcaaatatggtcttgctgcattcagggcttttttaaagtcggaattctgtgaagaaaatattgaattctggctggcctgtgaagacttcaaaaaaaccaaatcaccccaaaagctgtcctcaaaagcaaggaaaatatatactgacttcatagaaaaggaagctccaaaagagataaacatagattttcaaaccaaaactctgattgcccagaatatacaagaagctacaagtggctgctttacaactgcccagaaaagggtatacagcttgatggagaacaactcttatcctcgtttcttggagtcagaattctaccaggacttgtgtaaaaagccacaaatcaccacagagcctcatgctacatgaaatgtaaaagggagcccagaaatggaggacatttcattctttttcctgaggggaaggactgtgacctgccataaagactgaccttgaattcagcctgggtgttcaggaaacatcactcagaactattgattcaaagttgggtagtgaatcaggaagccagtaactgactaggagaagctggtatcagaacagcttccctcactgtgtacagaacgcaagaagggaataggtggtctgaacgtggtgtctcactctgaaaagcaggaatgtaagatgatgaaagagacaatgtaatactgttggtccaaaagcatttaaaatcaatagatctgggattatgtggccttaggtagctggttgtacatctttccctaaatcgatccatgttaccacatagtagttttagtttaggattcagtaacagtgaagtgtttactatgtgcaagggtattgaagttcttatgaccacagatcatcagtactgttgtctcatgtaatgctaaaactgaaatggtccgtgtttgcattgttaaaaatgatgtgtgaaatagaatgagtgctatggtgttgaaaactgcagtgtccgttatgagtgccaaaaatctgtcttgaaggcagctacactttgaagtggtctttgaatacttttaataaatttattttgataaataatattg

SEQ ID NO: 11642 - DNA, 2287 bp, Homo sapiens
ccctgcacttgggagccggtagcactcctatcactgcttctcaacccgtgagctaccagctgtgtcatgagctgcagacagttctcctcgtcctacttgagccgcagcggcgggggtggcgggggcggcctgggcagcgggggcagcataaggtcttcctacagccgcttcagctcctcagggggcggtggaggagggggccgattcagctcttctagtggctatggtgggggaagctctcgtgtctgtgggaggggaggcggtggcagttttggctacagctacggcggaggatctgggggtggttttagtgccagtagtttaggcggtggctttgggggtggttccagaggttttggtggtgcttctggaggaggctatagtagttctgggggttttggaggtggctttggtggtggttctggaggtggctttggtggtggctatgggagtgggtttggggggtttgggggctttggaggtggtgctggaggaggtgatggtggtattctgactgctaatgagaagagcaccatgcaggaactcaattctcggctggcctcttacttggataaggtgcaggctctagaggaggccaacaacgacctggagaataagatccaggattggtacgacaagaagggacctgctgctatccagaagaactactccccttattataacactattgatgatctcaaggaccagattgtggacctgacagtgggcaacaacaaaactctcctggacattgacaacactcgcatgacactggatgacttcaggataaagtttgagatggagcaaaacctgcggcaaggagtggatgctgacatcaatggcctgcggcaggtgctggacaatctgaccatggagaagtctgacctggagatgcagtatgagactctgcaggaggagctgatggccctcaagaagaatcataaggaggagatgagtcagctgactgggcagaacagtggagatgtcaatgtggagataaacgttgctcctggcaaagatctcaccaagaccctcaatgacatgcgtcaggagtatgagcagctcattgctaagaacagaaaggacatcgagaatcaatatgagactcagataacccagatcgagcatgaggtatccagtagtggtcaggaggtgcagtccagtgccaaggaggtgacccagctccggcacggtgtccaggagttggagattgagctgcagtctcagctcagcaagaaagcagctctggagaagagcttggaagacacgaagaaccgctactgtggccagctgcagatgatccaggagcagatcagtaacttggaggcccagatcactgacgtccggcaagagatcgagtgccagaatcaggaatacagccttctgctcagcattaagatgcggctggagaaggaaatcgagacctaccacaacctccttgagggaggccaggaagactttgaatcctccggagctggaaaaattggccttggaggtcgaggaggaagtggaggcagttatggaagaggatccaggggaggaagtggaggcagctatggtggaggaggaagtggaggtggctatggtggaggaagtgggtccaggggaggaagtggaggcagctacggtggaggaagtggttctggaggaggtagtggaggtggctatggtggaggaagtggaggtggccatagcggaggaagtggaggtggtcatagtggaggaagtgggggcaactatggaggaggaagtggctctggaggaggaagtgggggtggctatggtggaggaagtgggtccaggggaggaagtggaggcagccatggtggaggaagtggttttggaggtgaaagtggaggcagctacggaggcggtgaagaagcgagtggaagtggtggcggctacggaggaggaagcggaaaatcatcccattcctagtcttcttcctcaaaatctggtgaccaagatgagacaaaaggcttcctttcgcgatactagagcctctgtaaacttctcctgcccagccccagctgagcatccccagatgggcagactcccgatgaagcctgcttattggatcctgacatcaggaatagctggcaacaagcccctgtgcccgtttgggactgaactgacttggcatatgtgcctctggctttccattggcttccaaccctgcttggctttgatgccttcagggttggggagacagacctctttcctctctctggcctggggtgctctcacaccctgcacgatcttgactataataaagcttccctactgc

SEQ ID NO: 11643 - DNA, 4269 bp, Homo sapiens
gtttgcggtttagaccccaaagattcctgttggtggtctgggtcacaggaggcaggtttcgggagctggaaatgtgagcgggtacgacaggcaccgcgggtaaccgacgccccgggtccttgctgcagccgggtacgcgggataccggcaccccgccttctccgcccgagtgctgccaggcgtgggcctggaatctcttcacaccttctctttggagcccttaatgatacgacgaaccccaagtgtttcagaacatgaagtaaacaatggagaactgttctgctgcatcgacgttcctgactgacagcttagagctggagctggggacggaatggtgcaaacctccttacttttcttgtgctgttgacaacagaggaggaggaaaacatttttctggagaatcctacctctgcagcggagcccttaagcgattgattttgaatcttgaccctttaccaactaattttgaagaagataccttggaaatatttggcattcagtgggttactgaaacagcattagtgaattcatctagagaactctttcatttattcaggcaacaactgtacaacttggaaaccttgttacagtccagttgtgattttgggaaggtatcaactctacactgcaaagcagacaatattaggcagcagtgtgtactatttctccattatgttaaagttttcatcttcaggtatctgaaagtacagaatgctgagagtcatgttcctgtccatccttatgaggctttggaggctcagcttccctcagtgttgattgatgagcttcatggattactcttgtatattggacacctatctgaacttcccagtgttaatataggagcatttgtaaatcaaaaccagattaagctttttccaccgtcatggcatttattacatctccacttggatatacattggctggtgctagaaattctttacatgctgggtgaaaaattgaaacaagttgtatatggtcatcagtttatgaatctggcaagtgacaatttaaccaacatcagcctatttgaagaacattgtgaaactctcctttgtgatttaataagcctgtcactcaacaggtacgacaaggttaggtcttctgaatcattaatgagtgaccagtgtccatgtttacgcattaaagaattatgggttctacttattcatcttctagaccacagaagtaaatggtttgtctcggaatcattttggaactggttgaataaactacttaaaacactgcttgaaaaatcaagtgaccgaagaagatcctctatgcctgtaatccagtccagggatccattaggttttagttggtggattattactcatgtagcatcattttacaagtttgatcgccatggagtaccagatgaaatgagaaaagtggaatcaaattggaactttgtagaagaactgctgaaaaagtccatcagtgttcagggtgtcattctagaagaacaattacgaatgtatcttcactgttgtttgacactttgtgatttctgggagccaaacattgcaattgttaccattttatgggaatattatagtaagaacctgaatagttccttcagtatttcttggcttccttttaaaggccttgctaataccatgaagtcacccttgtctatgcttgaaatggtgaagacttgctgttgcgataaacaagatcaggaactatataaatccagcagtagttatactatttttctttgtattctggcaaaagttgttaaaaaagcaatgaagagcaatggccctcatccttggaaacaagtcaaaggaagaatatattcaaaattccatcaaaaaagaatggaagaactaactgaagttggtctacagaacttttttagcctttttctactgttagcagctgttgcagaggtagaagatgttgcaagtcatgttttagacctcctgaatttcctcaagcctgctttcgtaatgtctcagagagccctcatttggaagggtcacatggccttcctcttgatgtatgcccagaaaaatctggacattggtgttttggctgagaaattttcatgtgctttccgggagaaagcaaaggaattcttggtgtctaagaatgaggaaatggtacagagacagactatctggacccttctttccatatacattgatggtgttcaagaagtgtttgagaccagctattgcttgtatccttcccatgaaaaactgcttaatgatggatttagtatgcttctgcgagcatgtcgagaatctgaacttaggacagtattgagcttcctacaagctgttctggccagaatcaggagtatgcatcaacaattgtgtcaggaacttcaaagggacaatgtggacctatttgtacagtcttcattatcggctaaagagcgccaccttgctgcagttgccagtgcactgtggagacatttcttttcatttttgaagagtcagagaatgtcacaggtagtgcctttctcacaacttgcggatgcagctgcagactttactttgctagcaatggacatgccaagcacagctccatcagattttcagcctcagccagttatatcaattattcaactttttggttgggatgatatcatctgccctcaagttgtagcaagatatttaagtcatgtcctacaaaatagcacattatgtgaagcactttctcattcaggctatgtatcttttcaagccttaaccgtaagatcatggattcgttgtgttttgcaaatgtatattaaaaacctctctgggcctgatgatttgctcatagataaaaatctggaagaggcagttgaaaaagagtacatgaaacagttggtcaaactgacaagattactatttaatctctcagaagtaaagagtattttctcaaaggcccaagctgaatatttatccatctcagaagaccctaaaaaagcacttgttcgattctttgaggctgttggtgtaacttacgggaacgtccagacactttctgataaatctgccatggtcacaaagtccttggaataccttggtgaagtattaaaatatattaagccttatttgggaaaaaaagttttcagtgcagggctgcagctgacttatggaatgatgggaattcttgtgaaatcatgggcacaaatctttgccacttctaaagcccaaaaattactattccggatcatagattgtttactgctgccacatgcagtattacagcaagagaaggaactgcctgcacctatgttgtcagcaattcagaaaagtcttcctttgtatctccagggcatgtgtatcgtgtgttgtcaatctcaaaatccgaatgcctatttgaatcaattgctagggaatgttattgagcagtatattgggcgatttcttccagcttcaccatatgtttcagatcttggacaacatcctgttttgctggcattgagaaacacagccactattccgccaatatcatctctaaagaaatgcattgtgcaagtcataaggaaatcctaccttgagtataaggggtcctcacctcctcctcgcttagcatccattctggccttcatcctccaactcttcaaggaaactaacacagacatttatgaagttgaactactcctccctggcattttaaaatgcttggtgttagtcagtgaaccacaagttaaaaggctggccacagagaacctgcaatacatggtaaaagcctgccaagtggggtcagaagaagaaccttcctcccagctgacttctgtgtttaggcagtttatccaggattatggtatgaggtactattaccaggtttacagcattttagaaacagtagcaacattggaccagcaggttgtcatccacttgatttctacccttactcagtctctgaaggattcagagcagaaatggggccttggcaggaatatagcacaaagggaagcctatagcaaacttttgtctcaccttggacagatgggacaagatgagatgcagagactggaaaatgataatacttaatatattttgtgattcatcctgtctattaattatcagtatctaaagccacattgttccactctaattcctacttttaattaattgtataatgttctgtttaaaataatttctaggattttttttccttttatatctgtaagtaaaaaatgtataaataaggaactgaaggttaattagcaactgtgtaataggatccttggaactttttacaaaactgcattctaccttgatgaaattttagttaaactaaattaaagaaacattttctgag

SEQ ID NO: 11644 - DNA, 2996 bp, Homo sapiens
aaaactcttctcagacccgggagcgtccgggacgcggagcccggagctggggcgacgaggcgattgcgggggcctgggctagctgctggctaccaatattctactttctgtctctatgtatgtgactaccctggttacctcatataatctccctggaaaaggagacatgaatgtctgcaatgatacttcctgacaagaagttgatacaagaaaaggaaaggagattaacagctagtgagcagaatttcgaacagcaggatttcgtattttttgcttccaactgcacacttccgtttcccacttttaaatcagagatacctacactcaaaacccagacaaggcaaaaggatacctttcttgtatattttttgagatcgaagaaacgacaatgtccaggaaacagaaccagaaggattcatcaggattcatttttgatttgcagtccaataccgtactggcccagggaggagcttttgagaacatgaaagagaagataaatgcggtacgtgcaatagttcctaataagagcaacaatgaaattatcctggttttgcagcactttgataactgtgtggacaaaacagtacaagcattcatggaaggtagtgccagtgaagtactcaaagaatggacagtaacaggcaagaaaaagaacaaaaagaagaaaaacaaaccgaaacctgccgcagaaccaagtaacggcatcccagattccagtaaatcagtttccattcaagaggaacagtctgcgccttcctcagagaaaggtggtatgaatggctaccatgtcaatggtgccatcaatgacactgagtctgtggactcactcagtgaaggtttggagacactttcaatagatgccagagaattggaggatcccgagtctgccatgctagatacgctggacagaacaggatccatgctgcagaatggtgtctctgattttgagaccaagtctttgactatgcactctattcacaattctcaacaacccaggaatgctgccaaatctctctcaagacctaccacagaaactcagttttcaaatatggggatggaagatgttcccctcgccaccagtaaaaagctaagttccaatattgaaaaatctgtaaaagacctccagcgctgcacagtgtctcttgcacggtatcgagttgtagttaaagaagagatggatgcctccattaagaaaatgaaacaagcctttgctgaattggagagctgtttaatggatcgagaagtggcgttgcttgctgaaatggacaaagtgaaagctgaagcaatggaaattttgctcagccgacaaaagaaggctgaacttctaaagaagatgactcatgtggctgttcaaatgtcagagcagcaattggttgagctcagagctgatatcaagcactttgttagtgaacgtaaatatgatgaggatctgggacgagtagcccggttcacctgtgatgtagagaccctaaagaagagcattgattcatttggacaagtgtctcatccaaagaacagctattcgaccagatcccgatgtagctcagttacatctgtgtccttgagtagcccaagtgatgcctctgctgcttcctcttccacctgtgcctctcctcccagccttacaagtgctaacaagaaaaactttgcaccgggagagactcctgcagccatagcaaactccagtggccagccctaccagccacttcgggaggtattgccagggaacagacgaggaggacagggctataggccacaaggccaaaagtccaatgaccccatgaaccaagggcggcatgacagtatgggtcgttacagaaacagctcgtggtattcatctggttccaggtatcagagtgctccatctcaggcaccaggaaacaccattgaaagaggccagactcactctgcagggaccaatggaactagagtcagcatggagcccagccctcccacgccttcattcaaaaaggggctcccccagcgcaaacccaggacctctcagactgaagccgtgaactcttgagagaaaatccagttggcctctctcctctatccacacaattcaacttgataactggactttaggaaacttacagttagatgtaataacaaaaagaagtttatgcgtatcactttttgtgccattctaagtatttttggttcttgtctccttatttcctctttaccatttttggaggggaagctattttttttccttgatctttcccagtgatatggattgaatctggttggtcatttccaccaggaatcagaggcagctgttaccaggtttcggccttccagttgatccctccactgtccaggctgtctcaggaggaggtgaatcagagctagtctgtcacctttccaatctaagccgaagccacaggtgcctgacaggttcccttctaacaactatttgaccaagagaggcaatcagggggttgtatactgcactggattcgccagagaagggaaaatttaattagtgaagaggaaagaacactaggaaacatttgagaacctgcctctatcccagaacgtgctggagatttgacactcaaatcagtgtttagtcttctgcttggcaccatagcttaacctgcagtttcttcaaaatgcccaatgccttgtttcctattaccttagattgcaaaccagtctagggaagtctatgagaaagtagcatttaattaaagtttaaaaaaaaaaaggttgggcgttgtggctcatgcctgtaatcccagcactttgggaggctgaggcgggtggatcactaggtcaggagttcaagaccagcctggccaacatggtgaaaccctgtctgtactaaaaatacaaaagttagctgagcatggtggcgtgtgcctgtaatctcagctactcaggaggctgaggcaggagaatcgcttgaacccaggaggcggaggctgcagtgagctgagattgtgccactgcactccagcctgggagacagagcaagactcagtctc

SEQ ID NO: 11645 - DNA, 4449 bp, Homo sapiens
ctcctccgctccctgcgctcccgccacctcggcaactccgcgcccgcctcccgcctccgtcggaagcctccgccgcagtaaggctcccggtctcgctgctgtctctttaaatggtggggctacgagccgcccctgcagctgctccctgggtggccccgcgcgccgcttttgaggggcgaaccaagatggcggcggttttggctgtgtgaggaagacggaagagacggcggcggagggaaaccgacttccactagtccgggtcgcttgggcggccgggggccctcagagtctcccgggcagtggtagcagttgcagcaggatcaggcgcctgtcggcttctgacgtttaaaacagggggagcggaagggagccactggccgcggtggcagggccaggtataaggaaggaaaatatggcggcggcggcggcggcctgaggaggcggcggcggcgcgggaagctgcttcgcggagatcatggcggaggcgggagcagggcagtgacgggagccccgagttcctagcgctgcggggcgggaggctacgaagcgctgcgcggccccctcggggctgccgggcgccgggctcgccaggcctggacaatagcgccggggagccggaggcgaggaaaggcggcggcccagagctcggtccctggagcgggccatgcaggcggcggcgcggccccgcggcgcccagcggcggcagtgaggccggggagccctccgctcgcgggcgccctcacgcctcgcccctcgcctctccagggcccctttcctgggcgtctactggcggggcccccgccccggttcccgggcggcacgatgaccgacacccggcggcgggtgaaggtgtacacgctcaacgaggaccggcagtgggacgaccggggcaccgggcatgtgtcgtctggctacgtggagcggctgaagggcatgtccctgcttgtcagggctgagagcgacggttctctacttttagagtcgaaaataaatcctaacactgcataccagaaacaacaggacactctgattgtgtggtctgaagcagaaaattatgacttggcccttagctttcaagaaaaagctggatgtgatgaaatttgggagaaaatatgtcaggttcaaggaaaggacccttccgtggacatcactcaggaccttgtggatgaatctgaagaggagcgttttgatgatatgtcatcgccaggcttagaattgccatcttgtgaattaagtcgccttgaagaaattgcagaacttgtggcatcatctttaccttcacctcttcgtcgtgaaaaacttgcactggcactagaaaatgagggttatattaaaaagctcctggagctttttcatgtgtgtgaagatttggaaaatattgaaggactgcaccacttgtatgaaattatcaaaggcatctttctcttgaatcgaactgctctttttgaagttatgttctctgaagaatgtataatggacgtcattggatgtttagaatatgatcctgctttatcacaaccacgaaaacacagggaatttctaacaaaaacagccaagtttaaagaagtgattcccatatcagatcctgagctgaaacaaaaaattcatcagacatacagagttcagtatatacaagatatggttctaccaactccttcggtctttgaagaaaacatgttatcaacacttcactcttttatctttttcaataaggtagagattgttggcatgttgcaggaagatgaaaaatttctgacagatttgtttgcacaactaacagatgaagcaacagatgaggaaaaaagacaggaattggttaactttttaaaagaattttgtgcgttttcccaaacgctacagcctcaaaacagagatgcttttttcaagactttgtcaaacatgggcatattaccagctttagaagtcatccttggcatggatgatacacaggtgcgaagtgctgctactgatatattctcatacttggttgaatataatccatccatggtacgagagtttgtcatgcaggaggcacaacagaatgatgatgatattttgctcatcaacctcattatagaacatatgatttgtgatacagatcctgaacttggaggagcagtccagcttatgggcctgctacgaactttagttgacccagagaacatgctagccactgccaataaaacagaaaagactgaatttctgggtttcttctacaagcactgtatgcatgttctcactgctcctttactagcaaatacaacagaagacaaacctagtaaagatgattttcagactgcccaactattggcacttgtattggaattgttaacattttgtgtggagcaccatacctaccacataaagaactacattattaataaggatatcctccggagagtgctagttcttatggcctcgaagcatgctttcttggcattatgtgcccttcgttttaaaagaaagattattggattaaaagatgagttttacaaccgctacataatgaaaagttttttgtttgaaccagtagtgaaagcatttctcaacaatggatcccgctacaatctgatgaactctgccataatagagatgtttgaatttattagggtggaagatataaaatcattaactgctcatgtaattgaaaattactggaaagcactggaagatgtagattatgtacagacatttaaaggattaaaactgagatttgaacaacaaagagaaaggcaagataatcccaaacttgacagtatgcgttccattttgaggaatcacagatatcgaagagatgccagaacactagaagatgaagaagagatgtggtttaacacagatgaagatgacatggaagatggagaagctgtagtgtctccatctgacaaaactaaaaatgatgatgatattatggatccaataagtaaattcatggaaaggaagaaattaaaagaaagtgaggaaaaggaagtgcttctgaaaacaaacctttctggacggcagagcccaagtttcaagctttccctgtccagtggaacgaagactaacctcaccagccagtcatctacaacaaatctgcctggttctccgggatcacctggatccccaggatctccaggctctcctggatccgtacctaaaaatacatctcagacggcagctattactacaaagggaggcctcgtgggtctggtagattatcctgacgatgatgaagatgatgatgaggatgaagataaggaagatacgttaccattgtcaaagaaagcaaaatttgattcataataatggcaacggcctaggatcagtacctgttgaaaaaaactggttctccacccctcccccatacaaaatccacaaaaaagcgcagtggtctcttgtgaatgactgacacagatcagcctcttacacttgacttctgctcatcaagtgccaattcaatggagcaggaggaggggatatcatatatttaggggaaagacttaagcctttgagctctccagcttggaccacacattgcccttttctcagggaaggaaatggaaacaaaaagccaacagggcaggggttttgtaagtggaactctggattgactggtcagttgctacaatcagaatatgctttcttggaccatgtttgagactcagaagaatgggcctttctgccataattcttcactagtcaagaatgccagcagtttctttgtataaagagacctgcctttaaaatcatacattctgaacattttagtcaagctacaacaggtttggaaaacctctgtgggggaggggcgagtataaagttttcctcttttttaactgttccctttgcccttcaaactgcagatatttttttttttaagtggggacttctccctacttgattaaagattgagtggaattctagatgtggtcatttgtgtcataatttttttgttttattttgtttttgattttttttttcctcccctgagtgtatgcttagttgttgagtatatatatttgggaccattaaaactttttttgatgtaatataacctaacgttgtgctggtacctgttttaccatgtgtaatttttgttctacatcacagttcttaatttgtttagagttttatgaaagatggtatagtttttattgacaaaagcaaagtaatcttacaactatgtgcatacaaaagcaatactattttgtgactaaatattttatattaaaatttacatcagcaactgtcttgagaattcagggaaatagaatggaatttaaaacttcaacagttttgttaaatctagaaacatgaaattagtattccaaagagattctgaaatttcttttcttggggaaatgacggtacattaaatcaaaattgaggatggatgatttaaaaacatttgactttttaataataaaaagaaaagtgaagagtaagagaaaaaaaaaaaaaaaaaaa

SEQ ID NO: 11646 - DNA, 6371 bp, Homo sapiens
gtttgggaggcgcgggagatgtccaccctgggctggtggcgccgccgggcgccgggcgccatgagggtgcgctaggcggctgttcgtgcccgaggctgcgcagcactgaggtgagctttgccttcttgatcttccgtccttcttggagacgactggcgagaggaagagggactaggtccaaacgctaggtggctgggtccagatacctgtgttttgactctgttcctgtggatagctgcttggtctgaagttccagaaaggatcctgttcccagacaggtccctgagtactgacggtcacaggctgccgcgtctttcctgttgactcatgtttggttcctccagtgaaaattttacttagagaaatgctgcctccaaagcacttgtctgccaccaaacctaagaagtcctgggccccaaatctgtatgagctagacagtgacttgactaaggagccggatgtcatcataggagaaggtccaactgactctgagttttttcatcagaggtttcggaacctaatctatgtggaatttgttgggcctcggaagaccctgatcaaactccgaaacctctgcctcgattggttgcagccggagacccgcaccaaggaggagatcatcgagctcttggtccttgagcagtacctgaccatcatccctgaaaagctcaagccttgggtgcgagcaaaaaagccggagaactgtgagaagctcgtcactctgctggagaattacaaggagatgtaccaaccagaagacgacaacaacagtgacgtgaccagcgacgacgacatgacccggaacagaagagagtcctcaccacctcactcagtccattctttcagtgaccgggactgggaccggaggggcagaagcagagacatggagccacgagaccgctggtcccacaccaggaacccaagaagcaggatgcctccgcgggatctttcccttcctgtggtggcgaaaacaagctttgaaatggacagagaggacgacagggactccagggcttatgagtcccgatctcaggatgctgaatcataccaaaatgtggtggacctcgctgaggacaggaaacctcacaacacaatccaggacaacatggaaaactacaggaagctgctctccctcgtgcagcttgctgaagacgatggccactcccacatgacgcagggccactcatcaagatccaagagaagtgcctacccaagcaccagtcgaggtctaaaaactatgcctgaagccaaaaaatcaacccaccggcgggggatttgtgaagatgaatcttcccacggagtgataatggaaaaattcatcaaggatgtgtcacgcagttccaaatcgggaagagcaagggagtcaagcgaccggtcacagagattccccagaatgtcagatgataactggaaggacatttcattgaacaagagggagtcagtgatccagcagcgggtttatgaagggaatgcatttaggggaggctttaggtttaattcaacccttgtttccagaaagagagttcttgaaagaaagaggcgctatcattttgacacagatgggaagggctcgattcacgatcaaaaaggctgtcccaggaagaagccctttgaatgtggtagtgagatgagaaaagccatgagcgtgagcagcctgagcagcctcagctccccctcctttaccgagtcacagccaattgattttggggcaatgccatatgtatgtgatgagtgtgggaggtcgttcagtgtcatctcagaatttgttgagcaccagatcatgcatactagagagaacctctatgagtatggtgagtcctttatccacagtgtggctgtcagtgaagttcagaaaagtcaggttggagggaaacgttttgaatgtaaggactgtggagagaccttcaataagagtgccgccttggctgaacatcggaagattcatgctagaggttatcttgtggaatgtaagaatcaggaatgtgaggaagccttcatgcctagccccacctttagtgagcttcagaaaatatatggcaaagacaaattctacgagtgcagggtgtgtaaggaaaccttccttcatagttctgccctgattgagcaccagaaaatccactttggggatgacaaagataatgagcgtgaacatgaacgtgaacgtgaacgtgagcgcggggaaacctttaggcccagcccagcccttaatgagtttcagaaaatgtatggtaaagagaaaatgtacgaatgtaaggtgtgtggggagactttccttcatagctcatccctgaaagaacatcagaaaatccatactagagggaacccatttgaaaacaagggtaaagtgtgtgaggaaacctttattcctggtcagtcccttaaaaggcgtcagaaaacttacaataaggagaagctctgtgactttacagatggccgggatgccttcatgcaaagctcagagctcagtgagcatcagaaaattcattctcgaaagaacctctttgaaggcagagggtatgagaaatctgtcattcatagtgggccattcactgaatctcagaagagtcatactataacaagacctcttgaaagtgatgaggacgaaaaggcgttcaccattagctctaacccctatgaaaaccagaagattcccactaaggaaaatgtctatgaggcaaaatcatatgagaggtctgttattcatagcttagcctctgtggaagctcagaaaagtcacagtgtagcagggcccagtaaaccaaaagtaatggcagagtctaccattcagagcttcgatgctatcaaccatcagagagttcgtgctggagggaacacctctgaaggaagggaatacagtaggtctgttatccatagcttagtggcttccaaacctccaagaagtcacaatggaaatgaattggtggaatctaatgagaagggagaatcctccatttatatctcagaccttaatgataagcgacagaagattcctgccagagagaacccttgtgaagggggcagtaagaatcgcaactatgaagactctgtcatacagagtgtattccgtgccaaacctcagaaaagtgttcctggagagggatctggtgagtttaagaaggatggcgaattctctgttcccagctcaaatgtccgtgaataccagaaggctcgtgctaaaaagaaatacattgagcataggagcaatgagacctctgtaattcactctctgccttttggtgaacaaacatttcgccctcgagggatgctctatgaatgtcaggagtgtggggagtgctttgctcatagctctgacctcactgagcaccagaagattcatgatagggagaagccctctggaagcagaaactatgaatggtctgtcattcgcagcttggcccctactgaccctcaaacaagttacgcccaagagcagtatgctaaagagcaagcgcggaacaaatgtaaggacttcagacaattttttgctaccagcgaagacctcaacacaaaccagaaaatctatgaccaagagaagtctcatggcgaggagtctcaaggcgagaatactgatggggaggagacccacagcgaggagacccatggtcaggagacaattgaagaccctgtcattcaaggctcagacatggaagaccctcagaaggatgaccctgatgacaaaatctatgaatgtgaggactgtggcctgggctttgtggatctcacagacctcacagaccatcagaaagtccacagcaggaagtgcctggttgacagtcgggagtacacacattctgtaattcacacccattccatcagcgagtatcagagagattacactggagagcagctgtatgaatgtccaaagtgtggggaatcttttattcatagctcattccttttcgagcatcagagaatccatgaacaagaccagttgtattccatgaaggggtgtgatgatggttttattgccctcttgcccatgaagccacggaggaatcgtgctgcagagaggaatcctgctcttgctgggtcggccattcgatgccttttgtgtggacaaggcttcattcatagctctgcccttaatgagcatatgagacttcatagggaagatgatttactggagcagagccagatggctgaggaagctatcattccaggcttagccctcactgagtttcagagaagtcagaccgaagagagactctttgaatgtgcagtctgtggagaatctttcgtcaacccagcagaacttgcagatcacgtaactgttcataagaatgagccctatgagtacgggtcctcctatactcacacctcatttcttactgagcccctcaaaggagctataccattctatgaatgcaaggattgtggtaagtcctttattcatagcacagtcctcactaaacataaggagcttcatctggaagaagaagaagaagatgaagcagcagcagctgcagcagcagcagcccaggaagttgaagccaatgtccatgttccacaagtagttctgaggattcagggcttaaacgtagaggctgctgagccagaagtggaggctgccgagccagaagtggaggctgctgagccagaagtggaggctgctgagccaaacggagaggctgaagggccagatggagaggctgcagagcccattggagaggctggacagccaaatggagaggccgagcagccaaatggggatgctgatgagccagatggtgcaggtattgaagacccagaagaaagagctgaagagccagagggaaaagctgaagagccagagggagatgccgacgagcctgacggtgtgggaattgaagacccagaagaaggtgaagatcaagagattcaggtagaagaaccatactatgactgccatgaatgcacagaaaccttcacttccagcacagcattcagtgaacacctgaaaactcatgccagcatgatcatatttgagcctgcaaatgcctttggggagtgctcaggctacatcgaacgtgccagcaccagcacaggtggtgccaatcaagctgatgagaagtacttcaaatgtgacgtctgtgggcagctcttcaatgaccgcctgtccctcgccagacaccagaatacccacactggctgagggcatggggtaaaggttagaaaaccttcacctaggacttgacccttaccaaaccacagagaatccaaaccaatccatgataatgtcagtaggagacttaaccttagtgtgttacacacctgacttaacatctctaaactcagattgaaaagagaccgaatgtgcagattccacagtcttaagctttccccttcagatgtcagtgtctgcatgtgggaaagccatagcacacatcttacctttccaagtaatcagattgagaaaaccctatgagtattccagactacagagtttgcccaaatcaactgtaaatgacacttgtgtaacgtatatatagtgtttcatgaggtgtatataaaatagcaaattatgacagaacagtgatcacatatatttggatttatatgatatacagttacagtttactctgcagaggtaccttacctggtattctttgaattttttttttttttggaggaggaagagagcaacaaatttgattatatttttaagtgtcttagatcctgagaaagatttattgtgcattatttgaaccctgtcaatatctttttgagtaattgttttgtttcttacccttaaatagtcttgtgaagctgtaggcatgatagataacatggcttttactccttactgtttgaaaagataagtactttagcttctttctgcagccatttcatctgcgccaacactttggaacctaatactgtgtaaggctttacaatatacggattggctttttgtgacccagattgattggttgccacatgttatgtttgttgaagtggttctcatgcaaaaatattacacatttgtgttctgggttttttttttttttaaccaactcaatatgtgtttgatgatagtgaattgataaaacccgaagcttttccctgtaaatcttacatctttgcctttaaagaatgggttacaaccatcactagatcacagtagtgcctaatgaaggttgagaaccgtaggagaggctctcatgctgtaaataatgttgcaggctaataacctttcatcacttcctttgtgcgcttcctgccttaagtgacaagtagcaacatggcttgggtcccctgtgcagcatcagcttatgctgccacaagtcagtttgcaccctaggtgcccaggagctagtatccttagatctttctatcgctaacttaattctcttcgttatttatctgaccctctaactccatgtctaacttgc

SEQ ID NO: 11647 - DNA, 2083 bp, Homo sapiens
cgggaggagaggtttgggaggcgcgggagatgtccaccctgggctggtggcgccgccgggcgccgggcgccatgagggtgcgctaggcggctgttcgtgcccgaggctgcgcagcactgaggtgagctttgccttcttgatcttccgtccttcttggagacgactggcgagaggaagagggactaggtccaaacgctaggtggctgggtccagccggagacccgcaccaaggaggagatcatcgagctcttggtccttgagcagtacctgaccatcatccctgaaaagctcaagccttgggtgcgagcaaaaaagccggagaactgtgagaagctcgtcactctgctggagaattacaaggagatgtaccaaccagaagacgacaacaacagtgacgtgaccagcgacgacgacatgacccggaacagaagagagtcctcaccacctcactcagtccattctttcagtggtgaccgggactgggaccggaggggcagaagcagagacatggagccacgagaccgctggtcccacaccaggaacccaagaagcaggatgcctccgcgggatctttcccttcctgtggtggcgaaaacaagctttgaaatggacagagaggacgacagggactccagggcttatgagtcccgatctcaggatgctgaatcataccaaaatgtggtggacctcgctgaggacaggaaacctcacaacacaatccaggacaacatggaaaactacaggaagctgctctccctcggtttccttgctcaggactctgtccctgcagaaaagaggaacacagagatgttagacaatctgccatctgctgggtcccagttcccggacttcaaacacttaggaacatttctggtgtttgaggagttggtgaccttcgaggatgtgcttgtggacttcagcccagaggaacttagttcccttagtgctgctcagagaaacctctacagggaggtgatgctggagaattaccggaacctggtctccctggggcaccagttctctaaacctgacattatctcacgcctggaagaggaggaatcatatgcaatggagacagacagcagacatacagtgatttgtcaaggagagtctcatgatgatccattggaaccacaccagggcaaccaagagaaacttttgactcctataacaatgaatgaccccaagaccctcactccggaaagaagctatggcagtgatgaatttgagagaagctctaatcttagtaaacaatcaaaggatcctctaggaaaggatccccaggaaggcactgctcctggaatatgtacgagtccccagtcagcatcccaagagaacaaacacaacagatgtgaattttgcaaacgaacctttagtacgcaagtagcccttaggagacacgaacggatccatactgggaagaaaccctatgaatgtaaacagtgtgctgaagccttctatctcatgccacacctcaacagacatcagaagacccattctggtaggaagacttctggctgcaatgaaggtagaaagccttccgtccagtgtgcgaatctctgtgaacgtgtaagaattcacagtcaggaggactactttgaatgttttcagtgcggcaaagcttttctccagaatgtgcatcttcttcaacatctcaaagcccatgaggcagcaagagtccttcctcctgggttgtcccacagcaagacatacttaattcgttatcagcggaaacatgactacgttggagagagagcctgccagtgttgtgactgtggcagagtcttcagtcggaattcatatctcattcagcattatagaactcacactcaagagaggccttaccagtgtcagctatgtgggaaatgtttcggccgaccctcatacctcactcaacattatcaactccattctcaagagaaaactgttgagtgcgatcactgttgagaaacctttagtcacagcacacacttttctcaacattattggcttcctcctagagtgttgtgagtgtgagaaggcctttcactagccccaccttgttaacaacttgaacattcatcaaagtgtggtaaaaaaaaaa

SEQ ID NO: 11648 - DNA, 2126 bp, Homo sapiens
ttccagaagaaaacagttccacgttgcttgaaattgaaaatcaagataaaaatgttcacaattaagctccttctttttattgttcctctagttatttcctccagaattgatcaagacaattcatcatttgattctctatctccagagccaaaatcaagatttgctatgttagacgatgtaaaaattttagccaatggcctccttcagttgggacatggtcttaaagactttgtccataagacgaagggccaaattaatgacatatttcaaaaactcaacatatttgatcagtctttttatgatctatcgctgcaaaccagtgaaatcaaagaagaagaaaaggaactgagaagaactacatataaactacaagtcaaaaatgaagaggtaaagaatatgtcacttgaactcaactcaaaacttgaaagcctcctagaagaaaaaattctacttcaacaaaaagtgaaatatttagaagagcaactaactaacttaattcaaaatcaacctgaaactccagaacacccagaagtaacttcacttaaaacttttgtagaaaaacaagataatagcatcaaagaccttctccagaccgtggaagaccaatataaacaattaaaccaacagcatagtcaaataaaagaaatagaaaatcagctcagaaggactagtattcaagaacccacagaaatttctctatcttccaagccaagagcaccaagaactactccctttcttcagttgaatgaaataagaaatgtaaaacatgatggcattcctgctgaatgtaccaccatttataacagaggtgaacatacaagtggcatgtatgccatcagacccagcaactctcaagtttttcatgtctactgtgatgttatatcaggtagtccatggacattaattcaacatcgaatagatggatcacaaaacttcaatgaaacgtgggagaactacaaatatggttttgggaggcttgatggagaattttggttgggcctagagaagatatactccatagtgaagcaatctaattatgttttacgaattgagttggaagactggaaagacaacaaacattatattgaatattctttttacttgggaaatcacgaaaccaactatacgctacatctagttgcgattactggcaatgtccccaatgcaatcccggaaaacaaagatttggtgttttctacttgggatcacaaagcaaaaggacacttcaactgtccagagggttattcaggaggctggtggtggcatgatgagtgtggagaaaacaacctaaatggtaaatataacaaaccaagagcaaaatctaagccagagaggagaagaggattatcttggaagtctcaaaatggaaggttatactctataaaatcaaccaaaatgttgatccatccaacagattcagaaagctttgaatgaactgaggcaaatttaaaaggcaataatttaaacattaacctcattccaagttaatgtggtctaataatctggtattaaatccttaagagaaagcttgagaaatagattttttttatcttaaagtcactgtctatttaagattaaacatacaatcacataaccttaaagaataccgtttacatttctcaatcaaaattcttataatactatttgttttaaattttgtgatgtgggaatcaattttagatggtcacaatctagattataatcaataggtgaacttattaaataacttttctaaataaaaaatttagagacttttattttaaaaggcatcatatgagctaatatcacaactttcccagtttaaaaaactagtactcttgttaaaactctaaacttgactaaatacagaggactggtaattgtacagttcttaaatgttgtagtattaatttcaaaactaaaaatcgtcagcacagagtatgtgtaaaaatctgtaatacaaatttttaaactgatgcttcattttgctacaaaataatttggagtaaatgtttgatatgatttatttatgaaacctaatgaagcagaattaaatactgtattaaaataagttcgctgtctttaaacaaatggagatgactactaagtcacattgactttaacatgaggtatcactataccttatt

SEQ ID NO: 11649 - DNA, 3254 bp, Homo sapiens
ggcggcggccgcgcgctgctcggggcccgactgcggcgcgagggcggcgcgggagcgacgctggcccggaccgaggaaactatgccgcagacgtccgttgtcttctccagcatccttgggcccagctgtagcggacaggtgcagcctggcatgggggagcgtggaggcggggccggtggcggctccggggacctcatcttccaagatggacacctcatctctgggtccctggaggccctgatggagcaccttgttcccacggtggactattaccccgataggacgtacatcttcacctttctcctgagctcccgggtctttatgccccctcatgacctgctggcccgcgtggggcagatctgcgtggagcagaagcagcagctggaagccgggcctgaaaaggccaagctgaagtctttctcagccaagatcgtgcagctcctgaaggagtggaccgaggccttcccctatgacttccaggatgagaaggccatggccgagctgaaagccatcacacaccgtgtcacccagtgtgatgaggagaatggcacagtgaagaaggccattgcccagatgacacagagcctgttgctgtccttggctgcccggagccagctccaggaactgcgagagaagctccggccaccggctgtagacaaggggcccatcctcaagaccaagccaccagccgcccagaaggacatcctgggcgtgtgctgcgaccccctggtgctggcccagcagctgactcacattgagctggacagggtcagcagcatttaccctgaggacttgatgcagatcgtcagccacatggactcattggacaaccacaggtgccgaggggacctgaccaagacctacagcctggaggcctatgacaactggttcaactgcctgagcatgctggtggccactgaggtgtgccgggtggtgaagaagaaacaccggacccgcatgttggagttcttcattgatgtggcccgggagtgcttcaacatcgggaacttcaactccatgatggccatcatctctggcatgaacctcagtcctgtggcaaggctgaagaaaacttggtccaaggtcaagacagccaagtttgatgtcttggagcatcacatggacccgtccagcaacttctgcaactaccgtacagccctgcagggggccacgcagaggtcccagatggccaacagcagccgtgaaaagatcgtcatccctgtgttcaacctcttcgttaaggacatctacttcctgcacaaaatccataccaaccacctgcccaacgggcacattaactttaagaaattctgggagatctccagacagatccatgagttcatgacatggacacaggtagagtgtcctttcgagaaggacaagaagattcagagttacctgctcacggcgcccatctacagcgaggaagctctcttcgtcgcctcctttgaaagtgagggtcccgagaaccacgtggaaaaagacagctggaagaccctcaggaccacccttctgaacagagcctgaggcggatgcagcccgcgacgccagaggaagcacgtgcactaactgggtttaaattttgactgatgtgggttgagatgaggaggcctcactggttggggtccattttgtatataacttttatgagaaaaaaatggtaattatttcacgcatcaacctttggcacttacaaagttttttttgtttattttaaataacagggcagggccctgctttggggagggggaggggagagtatcatgggagatggtatccatgataacatcttattctaatgaaatgtagatttttattttctacttttgattattgacatcttatgaaaaaaatattttaaaaaacccagccaaaaccaacgtgagccctgcctgctcggacgcctttccagccagtgtctctgacgtcggggttagtgccttagagggtactggggtctggtcttcctgctctgtggtttgggctgcggtgagtcccactccacctgggcgcctgccctcaggagcctgggctgcgaggctccataggagggctggtggctgggaggtcgcgtccgcacacttctggaagtgagcctttgagtacgggctgtccaaagtttacattttcattttcctttcagggatttgcggggtcagggaggggcagggggcacctggcagcatattttctgtgacaatgtgtccagcaaatcattcttcaactacattttagaaaggaggaaatctaaaataaggtaagggagggaagcatggagttgtcagttttctgggctgtgactgaaagacacactgagctgtgatgaagaaaaatacatggccgactccagggtggtgacatttagagctagtcttgaaacctatcatctacagaggggagggcagccaacagccctcttcccacctgggtaggcagcgccctaattggaattggaaacagaaaattcgccaggccatactgctggagcccattcagataaaactgcccaaatactgagaggtgttttctacacccagctagaggagcacactccattttcccatgtctgacttcgtggtgtgagccctgggccctactgaccatggcgcaggacagctgtccttcagaaagcacacggtcaatccacgtggaccgtctccctcgcaggaactccgcatccttgtccctctctgcattcccagtttccgcaggagccttgatcaatggggaagcctgggtgaggatgggccaggtcccaattcccaaagctcctggaagagcctgaagacattgggaaaggctgggcctggggaggaggcagccctgggcccgttgcccatgcctctggtcctgggtggagcaggaatagttccactgtattgtcacagtgtgtttgcactttctgaggttctagctagtacagattgtatattgatagtacatattgctttgtttatgtctttgagatgagaaaggcttaaaacttgagaatatatatttggaatacagccttagaacggtttctgtacacatccacgtgcacttcacgggtgatcagttctagtacctacttgaaacagtgtctgtctgctactttattttcccaatttgatacataccctgatttgatgttttggtatttgagatgaactctgagtatgaagctgtaccataatgcagggcgtcagttttggtgtgactggacatacttgcttcaataaaagaatacatcactcccaaaaaaaaaaaaaaaa

SEQ ID NO: 11650 - DNA, 1106 bp, Homo sapiens
cccgcccccgccccttccgagcaaacttttggcacccaccgcagcccagcgcgcgttcgtgctccgcagggcgcgcctctctccgccaatgccaggcgcgcgggggagccattaggaggcgaggagagaggagggcgcagctcccgcccagcccagccctgcccagccctgcccggaggcagacgcgccggaaccgggacgcgataaatatgcagagcggaggcttcgcgcagcagagcccgcgcgccgcccgctccgggtgctgaatccaggcgtggggacacgagccaggcgccgccgccggagccagcggagccggggccagagccggagcgcgtccgcgtccacgcagccgccggccggccagcacccagggccctgcatgccaggtcgttggaggtggcagcgagacatgcacccggcccggaagctcctcagcctcctcttcctcatcctgatgggcactgaactcactcaagtgctgcccaccaaccctgaggagagctggcaggtgtacagctctgcccaggacagcgagggcaggtgtatctgcacagtggtcgccccacagcagaccatgtgttcacgggatgcccgcacaaaacagctgaggcagctactggagaaggtgcagaacatgtctcaatccatagaggtcttggacaggcggacccagagagacttgcagtacgtggagaagatggagaaccaaatgaaaggactggagtccaagttcaaacaggtggaggagagtcataagcaacacctggccaggcagtttaagggctaacttaaaagagttttttcaatgctgcagtgactgaagaagcagtccactcccatgtaaccatgaaagagagccagagagctttttgcaccatgcatttttactattattttccaatacttagcaccatttcactaaggaaccttgaatacaaccaggatcctcctttgcatgcgactgtagctgcatttcatgaatagtttgaacccttgtcaatgcattttttgaaaaagaaagaaaaaaaaaacttcgtgtatgtgactcaaagcatgtaaccttaagatgttgcattctaaactgacaataaagacctttcccc

SEQ ID NO: 11651 - DNA, 11604 bp, Homo sapiens
acatttggctgggacacaaacgagttaggtgagttatagtctaacgtgagtgagttacctgcgtggtggctgcaggctgagctctaaccagataacatgtccacggattcttgacagagagaaataagatcacttagaaagaaaggatcatttctcccttgagtcacaaggagacagaaacagaaaaaaaagcacaaaagctatgctgctccaatcaaaactgaaaatgcttttaatgtctgagcaatcttaagagtattgatttaagtggacagaatgactgcctggctgatctctctgatgagtattgaagtactacttttggcagtacgtcacctgagtttacatattgaacctgaagaaggtagccttgcagggggaacgtggatcacagtcatttttgatggtttggagttgggtgttctttaccccaacaatggctctcaattggagatacacctggtgaacgtgaacatggtggtgcccgcactgcggagtgttccctgtgacgtctttcctgttttcttggatttgcctgtggtgacatgccggaccagatctgtgctgtctgaagcacatgagggtctgtacttcctggaagcatacttcgggggacagctggtaagcagtccaaatccaggaccacgagatagctgtactttcaagttttccaaggcgcagacacccatcgttcaccaagtttatccaccaagtggtgttccaggaaaactaatacatgtatatggctggattatcactggaagattggaaacttttgattttgatgctgagtacattgatagcccagtgatcttggaagctcaaggagacaaatgggttactccttgctctcttataaataggcagatgggaagctgttatcctattcaggaggaccatggtcttgggactctgcagtgccatgtggaaggcgactacatcggctcccagaatgttagcttctcagtatttaacaaaggaaagtcaatggtccacaagaaggcatggctgatcagtgctaaacaggatcttttcctataccagacacactcagaaatattatctgtgtttccagaaactgggagccttgggggaagaacaaacatcacaattacaggagacttttttgacaattctgcccaggttaccattgcaggcattccatgtgatattagacacgtgtctcccaggaagattgagtgcaccactcgggctccaggaaaagatgtgaggctcaccacccctcagccaggcaatcgagggcttctttttgaagttggagatgctgttgagggactggaactgactgaagccaccccagggtacaggtggcagattgtccctaatgccagttctccatttgggttttggtcacaggaaggacaacctttcagagcacggctcagtgggttctttgtggctccagagacaaataattacactttctggattcaggcagatagccaagcttccttgcatttcagttggtcagaggaaccaaggactaaggtgaaagtggcctccatcagcgtcggcactgctgactggtttgactcctgggagcagaatagggatgaagggacctggcagcagaagactcccaagttggagctgttgggtggagccatgtactacctggaagcagagcatcatgggatagccccaagcagggggatgaggattggtgtccagattcacaacacctggctgaatcctgatgtggtcaccacttacctacgggagaagcaccagatccgagtccgagcccagaggcttccagaagtacaggtgctgaatgtatcaggcagaggaaacttcttccttacttgggacaatgtctctagtcagccaatccctgcaaatgccacagcccatctgattcaaacaaccattgaggagttacttgcagtaaaatgcaaactggaacccctttggtctaacatccttctccggcttggatttgaacgaggcccagaagtttccaactctgatggggacctcaccagtgggacggagcccttctgtggcaggttcagcctccgtcagcctcgacaccttgtccttactcccccggctgcccagaagggctatcggctagatcagtatacacacctgtgtcttgcatacaaaggccacatgaacaagatcctgaagatgattgtgtccttcacaatcggctttcaaaacatggtaaagaataccacctgtgactggagtctcacgaggaccagccccgagagctggcagttcgattgcactgacctctgggagacttgtgtgcgttgcttcggggatctccagccccctccggcaaactccccagtgctggttcatcagatcaaccttctccctctggcccaggagacgggcctgttctatgtggatgaaattattattgcagacacaaacgtaacagtttctcaagctgattctggaacggctcgcccagggggcaatctggtggaatcagtctctgtggtgggatcccctccggtctacagtgtcacctcctggctggcggggtgtggcacggagctcccgctcatcactgcacgctctgtgcccactgaaggaacagaagagggatctggactggtcctggtgacgacacagagacgacagcggacaagtccacctctaggaggacactttcgcatccagcttcctaatacagtgatttctgatgtccctgtacaaatttctgctcatcaccttcaccagctcttacagaataatgccgatgacttcacatccaggtacctcaatgccagtgacttcactgtgaaggaggatctatacacttgctacgaacacgtgtggaccttgtcctggtccactcagattggggatttgcccaattttatcagggtctctgatgaaaaccttactggagtgaatcctgctgcagccacgcgtgtggtatatgatggtggagtttttcttggacccatatttggagacatgttggctactgccaaccagcatactcaggtggttgtgcgagtgaatgatgtaccagctcattgcccaggttcctgctctttccagtacctccaagggtcaactccctgtgtccattctgtgtggtactccattgatggtgacatcaacctaatgatttacattaccggaactggtttctctggtgactcccagttcttgcaggttacagtgaacaaaacgagttgcaaagttattttctcaaaccagaccaatgtagtctgtcagacagatttgctacctgttggaatgcatcggatcttgatgttggtgagaccctctggtcttgccatcagtgccactggagaagacctcttcctaaatgtgaaacctagactggatatggtggagccttccagagctgcggatattggagggctctgggccaccatccgaggctctagtttggaaggtgttagcctgatattatttggatcttactcgtgtgccatcaatgtcgctacaagcaattcaagcagaattcagtgcaaagttccacccagggggaaagatggacgcattgtgaatgtgactgtgatcagaggggactattctgcagttcttcccagagcatttacatatgtctcttccttaaatccagttattgtgactctgagcagaaacataagcaatatagcaggcggtgagaccctggtcattggagtggcgaggctgatgaactatacggatttggatgtggaagtccacgtccaggatgccttggctccggttcacacacagtcggcttggggcctggaggtggcactgcccccactgccagctggtctccacagaatttccgtctctatcaatggggtcagcattcactcacaaggggttgatctccacatccagtacctcacagaagttttcagcatcgagccttgctgtgggtccctgctgggagggaccatcctcagcatctcaggaataggcttcagcagggacccagctttggtttgggtacttgtgggcaatcggtcctgtgacattgtgaacttaacggaggcgagcatctggtgtgaaaccctgccagccccccagatacccgatgcgggcgctcccactgttccagctgccgtggaggtctgggctggcaacaggttcttcgcccgtggtccttcaccaagcttggtggggaaaggcttcaccttcatgtatgaagcggcagcaacaccagtagtcactgccatgcaaggagaaatcacaaatagcagcctgagcctgcatgtgggaggaagtaacctctccaactcagtcatccttctggggaacctgaactgtgatgttgagacacagtccttccagggcaacgtgagcctgtctggatgctccatccctcttcacagtctggaggctggcatctatcctctccaagtacgtcagaagcagatgggatttgctaatatgtctgtggtgctccagcaatttgcagtgatgcctcggataatggccatcttcccatcgcagggttcggcatgtggtgggaccatacttactgtgagggggttgcttcttaactctagaaggaggtcagttcgggttgacctctcgggtccttttacttgtgtgattttgagtttgggagaccacaccattctctgccaggttagcctggagggtgaccccttgcctggagcttccttctccctgaacgtcacagtcctggtcaatgggctaaccagcgagtgtcaggggaattgcactcttttcataagggaagaggcaagtcctgtcatggatgccttgtccacaaacaccagtgggtctctgaccactgtgctgattaggggtcagaggttagccaccacagctgatgagccgatggtatttgtggatgatcaacttccttgcaatgtaactttttttaatgcaagccacgttgtgtgccagacaagagacttggccccaggaccccactacctgtcagttttttatacaagaaatgggtatgcttgttctggtaatgtttccagacacttctacattatgccccaagtgtttcattattttcctaagaatttcagcttacatggtggaagcctcttgaccatagagggcacaggcctgagaggacagaacaccacgtcagtctatattgaccagcagacctgcctgacggtgaacatcggtgctgagctcatccggtgcattgttcccacagggaatggctctgttgccctggaaatagaggtagatggactttggtatcacataggagtcattggttataacaaggcctttaccccagaattgatctctatttctcagagcgatgacatcttaacctttgcagtggcccagatctcaggagctgcaaacattgacatttttataggaatgtcaccctgtgtgggtgtctctggtaaccacaccgttcttcagtgcgtggtcccttcccttccggccggggagtaccacgtcagaggctatgactgcatcagagggtgggcctcatctgccctggtgttcacctcaagagttattattacagcagtgacggagaacttcggctgcctgggtggaaggctggtgcatgtgtttggagcgggattttctccagggaatgtctcagctgctgtgtgtggtgctccctgccgagtcctggctaatgctacagtgtctgccttcagctgcttggttctgcccctggatgtgtccttggccttcctgtgtggcctgaagcgtgaggaggacagctgtgaggctgccagacacacctatgtgcagtgtgatttgacagttgccatggcgacagagcaactgcttgaatcgtggccttacctctacatttgcgaggaaagttcccaatgcctctttgtgccagatcattgggcagagtcaatgtttccatcattctcgggcctctttatcagccctaaattggaaagagatgaagttctcatctataatagctcctgtaacattaccatggaaactgaggcagagatggagtgtgagacgcccaatcagccaattaccgtcaagattactgagatacggaaacgctggggccagaacactcagggcaacttttctttacagttctgccggagatggtccaggactcacagctggtttcctgaaaggctgccacaagatggcgacaacgtcacagtggagaatggccaattgcttctgctggacactaacacaagcatcctcaacttactgcacattaaagggggcaagctgattttcatggccccaggacccatcgagctcagggcacacgccatccttgtttctgatggtggagagctccggattggatccgaagacaagcccttccaaggcagagctcagatcacactctacgggagttcctactcaactcccttctttccctatggagtcaagttcctggctgtgaggaatggaactctttctctgcacggttcactaccagaagtaattgtcacctgtcttagagcaactgcccatgccctagacacagtgctggctttagaagatgctgtggactggaaccctggggatgaagttgtcatcatcagtggaacaggtgttaaaggtgccaaaccgatggaagagattgtcactgtggaaactgtgcaggatacagacctctatcttaagtcacctttgagatattctcacaactttacagagaattgggtggctggagagcaccatattttaaaggccactgtggctctgctcagcaggagtattaccatacaaggaaatctcactaatgagagggagaagctgcttgtttcatgccaggaggccaatgctccagaaggtaatctgcagcactgtttgtattccatgagtgagaagatgctaggatccagggatatgggagccagagtgatcgttcagtccttcccagaagagcccagccaggtccagttgaagggagtgcagtttcaagtcttggggcaagccttccataagcatctgagctcactcactctggtgggagctatgagagagtctttcatacagggctgcacagtgaggaactccttcagtagaggcctcagcatgtgcgggaccttgggcctgaaggtggacagtaatgtattctacaatattttaggtcatgcgctgctagttgggacatgcacggagatgagatatatctcctgggaggcaattcatggaaggaaagatgactggtcaggacatggaaatataataagaaacaacgtgatcatccaggtttctggtgccgagggactctccaatcctgaaatgttgacaccatctggcatctatatctgcagtcccaccaatgttatagaggggaacagagtgtgtggtgctggctatggctactttttccatctcatgaccaaccaaacatcacaagctccgcttctttccttcactcagaacattgcacattcttgtaccaggtatggtctctttgtataccctaaatttcagccaccttgggataatgtcactggcaccactctgttccagagcttcacagtttgggaaagtgcaggtggtgcccagatttttagaagtagcaatcttcgcctgaaaaacttcaaagtttattcatgcagagattttggaattgacgtcttggaaagtgatgcaaatacttcagttactgacagcttattacttggtcattttgcccacaaggtaagtctgtgtatgtcatctgggattaaaactcctaaaagatgggaactgatggtgtctaacacaacctttgttaattttgatctcatcaactgtgtggccattagaacctgttcagactgttcccaaggacaaggtggatttactgtgaagaccagccagttgaagtttacaaactcttcaaacttagtggcatttccatttcctcatgcagcaattttggaagacttggatgggtctctgtctgggaaaaacagaagtcacattcttgcttctatggaaaccctttcagcttcttgtttggtcaattcaagctttggtcgggttgtccatggcagtgcctgtggaggaggtgttctttttcatcgtatgtctattggtttagcgaatactcctgaagtttcttatgatttaaccatgactgacagcagaaataaaacaaccactgtcaattatgtacgtgatacattgtctaaccctcgtggctggatggctctgctcttggaccaagagacctactcattgcaatctgagaacctttggatcaacagatctctgcagtactcagcaacctttgacaactttgctcctggtaattacctactgctggtgcacacagatttgccgccttaccctgacatcctcctaagatgtgggagtcgagtgggtctgtcttttccatttcttccatcaccaggtcagaaccaaggctgtgactggttcttcaatagccagctgaggcaactcacctatctggtttcaggtgaaggccaagttcaagtcattctccgggtgaaggaaggtatgcccccaactatttcagcttctacctctgcccctgaatcagctttaaaatggtccctccctgaaacatggcaaggtgttgaagaaggctggggaggatacaacaataccattccaggccctggggatgacgttctcattttacccaacagaactgtccttgtggatacagatcttccattcttcaaagggctgtatgtgatggggaccttagacttccctgtggacagaagcaatgttctgagtgtggcatgcatggtcattgcaggcggggagctgaaagttggtactttagaaaatcccttagaaaaggaacaaaagcttctgattctccttagagcctcagagggagtcttttgtgaccgtatgaatggaattcatattgacccaggaacaattggggtttatgggaaagttcatctttacagtgcttatcctaagaactcctggacacatcttggagctgatattgcctcaggaaatgagagaattatagtagaagatgcagtggattggcgcccccatgacaaaatagtccttagctcctcttcttatgagcctcatgaagcagaggtcctcactgtgaaagaagtcaagggccaccatgtgaggatctatgaacggctcaaacaccggcatattggaagtgtacatgtcacggaggatggccgacacattcgtttggctgctgaggttggactgttgacccgaaatatacaaattcagcctgacgtatcatgtagggggagactgtttgtggggtccttcaggaagtccagccgagaagaattttcaggtgtccttcaacttcttaatgtggaaattcagaacttcgggtcaccattgtactcatctgttgaattcagtaatgtgtcagcaggatcctggatcatatcatctactctgcaccagagctgtggcgggggcattcatgcagctgccagtcatggagtacttttaaatgacaatattgtgtttggcacagctggccatggcatagatttagagggtcaggcctatactgtcactaataaccttgtggttctgatgacacagccagcgtggtccaccatttgggtggcgggaatcaaagtgaaccaggtaaaggacatcaacctccatggcaacgttgtggcaggatcagagagacttggctttcacatccgaggccacaagtgctcctcttgtgaactgctttggtctgacaatgtggcgcattcaagtcttcatggccttcatctctataaggaaagtggacttgacaactgtaccagaatctctggcttcttggctttcaagaactttgactatggtgccatgttacatgtagagaacagcgtggagatagagaacattactctggtagacaatactattggtcttttggcagtagtgtatgtattttctgctccacaaaattccgtcaaaaaagtgcagattgtgcttaggaattcagtcattgtggccaccagctcttcttttgactgcattcaggacaaagtgaagccgcactcagccaacttgacatcaacagatagagctccctccaatccaagaggaggtcgaattggtattctgtggcctgtattcacctcagaaccaaatcagtggcctcaggagccatggcacaaagtgaggaatgatcattcaatttcaggaatcatgaaacttcaagatgttaccttttctagttttgtgaagagttgctatagcgatgacctggatgtctgcattctaccaaatgcagagaacagtggaattatgcacccaataacagcagagaggaccaggatgctaaagataaaagataaaaacaagttctactttccttcattacaacccaggaaagatttaggaaaagtagtctgtcctgaattagactgtgcaagtccaagaaaatatctcttcaaggatctggatgggagagccctgggtctgcctccaccagtttctgtatttcctaaaacagaggcagaatggactgcatccttcttcaacgcagtaaccactgagcaggctttgaagatttcagaatagaggaggagcctgcaggaagctgaactttgaaagattaatgaggcagcaggaagcagggtgaagaatgggttggagcatggaccaaatggaaagacttgttaagacactgtttcaattgttcaaattgagaagaaattgattgaggactgggaggagattgatggcagccagaatggagaggatggtacagatcaaagaaatacaaaagagaggaaatagagtttgcttactcctgactttggggactgtggagagggtgtcaacagtgacaccattgtccgtagtcaggatatctttgggaatggaagttccagtagcagatatgggggagtaggaaagaagaggatggttgcttaagctttgcctttagtgagtttggggtacccactatatgagagaggagcaattcagatattaaattggtggtgttgaaatctttggaattagagctttggagataaattgcagctagatataaattatctggaataaagtgataggtgaaataatatggtagagaagccttattttatttctctcttctttaccaattatattgagatattattattattggcatattaatatattattattggtatattaataatataataatataggtatattatcaataatatactaatactaatataccaataatagtgggttattgttaataatattggtaaagaaagaacataaatgtaagtttattaccaagaatattggtgtggtaaagataacccatttatgctggaggttgcaattttttgaattgcaaaatcagaccttggccatgaccttaagcagtaggatataaataactcccatgtgcccagtgttccattattggaacagtgtgccattcttgtgcactgatggaggaaatagttacagatacagtgtgatttgaggaattggttcccccagagccttattgaccctcaaatacttcccttacccatgttatcatttcctttctatcctaaaattgctacctttgctgccagatcttttccttcataaagtcaatgtgacatttactcatttattaactcatttcttcaacagatacttattgggcatttactgtatgccaagtattgtaataaatgctgtatgtacaaaatgaca

SEQ ID NO: 11652 - DNA, 16235 bp, Homo sapiens
acatttggctgggacacaaacgagttaggtgagttatagtctaacgtgagtgagttacctgcgtggtggctgcaggctgagctctaaccagataacatgtccacggattcttgacagagagaaataagatcacttagaaagaaaggatcatttctcccttgagtcacaaggagacagaaacagaaaaaaaagcacaaaagctatgctgctccaatcaaaactgaaaatgcttttaatgtctgagcaatcttaagagtattgatttaagtggacagaatgactgcctggctgatctctctgatgagtattgaagtactacttttggcagtacgtcacctgagtttacatattgaacctgaagaaggtagccttgcagggggaacgtggatcacagtcatttttgatggtttggagttgggtgttctttaccccaacaatggctctcaattggagatacacctggtgaacgtgaacatggtggtgcccgcactgcggagtgttccctgtgacgtctttcctgttttcttggatttgcctgtggtgacatgccggaccagatctgtgctgtctgaagcacatgagggtctgtacttcctggaagcatacttcgggggacagctggtaagcagtccaaatccaggaccacgagatagctgtactttcaagttttccaaggcgcagacacccatcgttcaccaagtttatccaccaagtggtgttccaggaaaactaatacatgtatatggctggattatcactggaagattggaaacttttgattttgatgctgagtacattgatagcccagtgatcttggaagctcaaggagacaaatgggttactccttgctctcttataaataggcagatgggaagctgttatcctattcaggaggaccatggtcttgggactctgcagtgccatgtggaaggcgactacatcggctcccagaatgttagcttctcagtatttaacaaaggaaagtcaatggtccacaagaaggcatggctgatcagtgctaaacaggatcttttcctataccagacacactcagaaatattatctgtgtttccagaaactgggagccttgggggaagaacaaacatcacaattacaggagacttttttgacaattctgcccaggttaccattgcaggcattccatgtgatattagacacgtgtctcccaggaagattgagtgcaccactcgggctccaggaaaagatgtgaggctcaccacccctcagccaggcaatcgagggcttctttttgaagttggagatgctgttgagggactggaactgactgaagccaccccagggtacaggtggcagattgtccctaatgccagttctccatttgggttttggtcacaggaaggacaacctttcagagcacggctcagtgggttctttgtggctccagagacaaataattacactttctggattcaggcagatagccaagcttccttgcatttcagttggtcagaggaaccaaggactaaggtgaaagtggcctccatcagcgtcggcactgctgactggtttgactcctgggagcagaatagggatgaagggacctggcagcagaagactcccaagttggagctgttgggtggagccatgtactacctggaagcagagcatcatgggatagccccaagcagggggatgaggattggtgtccagattcacaacacctggctgaatcctgatgtggtcaccacttacctacgggagaagcaccagatccgagtccgagcccagaggcttccagaagtacaggtgctgaatgtatcaggcagaggaaacttcttccttacttgggacaatgtctctagtcagccaatccctgcaaatgccacagcccatctgattcaaacaaccattgaggagttacttgcagtaaaatgcaaactggaacccctttggtctaacatccttctccggcttggatttgaacgaggcccagaagtttccaactctgatggggacctcaccagtgggacggagcccttctgtggcaggttcagcctccgtcagcctcgacaccttgtccttactcccccggctgcccagaagggctatcggctagatcagtatacacacctgtgtcttgcatacaaaggccacatgaacaagatcctgaagatgattgtgtccttcacaatcggctttcaaaacatggtaaagaataccacctgtgactggagtctcacgaggaccagccccgagagctggcagttcgattgcactgacctctgggagacttgtgtgcgttgcttcggggatctccagccccctccggcaaactccccagtgctggttcatcagatcaaccttctccctctggcccaggagacgggcctgttctatgtggatgaaattattattgcagacacaaacgtaacagtttctcaagctgattctggaacggctcgcccagggggcaatctggtggaatcagtctctgtggtgggatcccctccggtctacagtgtcacctcctggctggcggggtgtggcacggagctcccgctcatcactgcacgctctgtgcccactgaaggaacagaagagggatctggactggtcctggtgacgacacagagacgacagcggacaagtccacctctaggaggacactttcgcatccagcttcctaatacagtgatttctgatgtccctgtacaaatttctgctcatcaccttcaccagctcttacagaataatgccgatgacttcacatccaggtacctcaatgccagtgacttcactgtgaaggaggatctatacacttgctacgaacacgtgtggaccttgtcctggtccactcagattggggatttgcccaattttatcagggtctctgatgaaaaccttactggagtgaatcctgctgcagccacgcgtgtggtatatgatggtggagtttttcttggacccatatttggagacatgttggctactgccaaccagcatactcaggtggttgtgcgagtgaatgatgtaccagctcattgcccaggttcctgctctttccagtacctccaagggtcaactccctgtgtccattctgtgtggtactccattgatggtgacatcaacctaatgatttacattaccggaactggtttctctggtgactcccagttcttgcaggttacagtgaacaaaacgagttgcaaagttattttctcaaaccagaccaatgtagtctgtcagacagatttgctacctgttggaatgcatcggatcttgatgttggtgagaccctctggtcttgccatcagtgccactggagaagacctcttcctaaatgtgaaacctagactggatatggtggagccttccagagctgcggatattggagggctctgggccaccatccgaggctctagtttggaaggtgttagcctgatattatttggatcttactcgtgtgccatcaatgtcgctacaagcaattcaagcagaattcagtgcaaagttccacccagggggaaagatggacgcattgtgaatgtgactgtgatcagaggggactattctgcagttcttcccagagcatttacatatgtctcttccttaaatccagttattgtgactctgagcagaaacataagcaatatagcaggcggtgagaccctggtcattggagtggcgaggctgatgaactatacggatttggatgtggaagtccacgtccaggatgccttggctccggttcacacacagtcggcttggggcctggaggtggcactgcccccactgccagctggtctccacagaatttccgtctctatcaatggggtcagcattcactcacaaggggttgatctccacatccagtacctcacagaagttttcagcatcgagccttgctgtgggtccctgctgggagggaccatcctcagcatctcaggaataggcttcagcagggacccagctttggtttgggtacttgtgggcaatcggtcctgtgacattgtgaacttaacggaggcgagcatctggtgtgaaaccctgccagccccccagatacccgatgcgggcgctcccactgttccagctgccgtggaggtctgggctggcaacaggttcttcgcccgtggtccttcaccaagcttggtggggaaaggcttcaccttcatgtatgaagcggcagcaacaccagtagtcactgccatgcaaggagaaatcacaaatagcagcctgagcctgcatgtgggaggaagtaacctctccaactcagtcatccttctggggaacctgaactgtgatgttgagacacagtccttccagggcaacgtgagcctgtctggatgctccatccctcttcacagtctggaggctggcatctatcctctccaagtacgtcagaagcagatgggatttgctaatatgtctgtggtgctccagcaatttgcagtgatgcctcggataatggccatcttcccatcgcagggttcggcatgtggtgggaccatacttactgtgagggggttgcttcttaactctagaaggaggtcagttcgggttgacctctcgggtccttttacttgtgtgattttgagtttgggagaccacaccattctctgccaggttagcctggagggtgaccccttgcctggagcttccttctccctgaacgtcacagtcctggtcaatgggctaaccagcgagtgtcaggggaattgcactcttttcataagggaagaggcaagtcctgtcatggatgccttgtccacaaacaccagtgggtctctgaccactgtgctgattaggggtcagaggttagccaccacagctgatgagccgatggtatttgtggatgatcaacttccttgcaatgtaactttttttaatgcaagccacgttgtgtgccagacaagagacttggccccaggaccccactacctgtcagttttttatacaagaaatgggtatgcttgttctggtaatgtttccagacacttctacattatgccccaagtgtttcattattttcctaagaatttcagcttacatggtggaagcctcttgaccatagagggcacaggcctgagaggacagaacaccacgtcagtctatattgaccagcagacctgcctgacggtgaacatcggtgctgagctcatccggtgcattgttcccacagggaatggctctgttgccctggaaatagaggtagatggactttggtatcacataggagtcattggttataacaaggcctttaccccagaattgatctctatttctcagagcgatgacatcttaacctttgcagtggcccagatctcaggagctgcaaacattgacatttttataggaatgtcaccctgtgtgggtgtctctggtaaccacaccgttcttcagtgcgtggtcccttcccttccggccggggagtaccacgtcagaggctatgactgcatcagagggtgggcctcatctgccctggtgttcacctcaagagttattattacagcagtgacggagaacttcggctgcctgggtggaaggctggtgcatgtgtttggagcgggattttctccagggaatgtctcagctgctgtgtgtggtgctccctgccgagtcctggctaatgctacagtgtctgccttcagctgcttggttctgcccctggatgtgtccttggccttcctgtgtggcctgaagcgtgaggaggacagctgtgaggctgccagacacacctatgtgcagtgtgatttgacagttgccatggcgacagagcaactgcttgaatcgtggccttacctctacatttgcgaggaaagttcccaatgcctctttgtgccagatcattgggcagagtcaatgtttccatcattctcgggcctctttatcagccctaaattggaaagagatgaagttctcatctataatagctcctgtaacattaccatggaaactgaggcagagatggagtgtgagacgcccaatcagccaattaccgtcaagattactgagatacggaaacgctggggccagaacactcagggcaacttttctttacagttctgccggagatggtccaggactcacagctggtttcctgaaaggctgccacaagatggcgacaacgtcacagtggagaatggccaattgcttctgctggacactaacacaagcatcctcaacttactgcacattaaagggggcaagctgattttcatggccccaggacccatcgagctcagggcacacgccatccttgtttctgatggtggagagctccggattggatccgaagacaagcccttccaaggcagagctcagatcacactctacgggagttcctactcaactcccttctttccctatggagtcaagttcctggctgtgaggaatggaactctttctctgcacggttcactaccagaagtaattgtcacctgtcttagagcaactgcccatgccctagacacagtgctggctttagaagatgctgtggactggaaccctggggatgaagttgtcatcatcagtggaacaggtgttaaaggtgccaaaccgatggaagagattgtcactgtggaaactgtgcaggatacagacctctatcttaagtcacctttgagatattctcacaactttacagagaattgggtggctggagagcaccatattttaaaggccactgtggctctgctcagcaggagtattaccatacaaggaaatctcactaatgagagggagaagctgcttgtttcatgccaggaggccaatgctccagaaggtaatctgcagcactgtttgtattccatgagtgagaagatgctaggatccagggatatgggagccagagtgatcgttcagtccttcccagaagagcccagccaggtccagttgaagggagtgcagtttcaagtcttggggcaagccttccataagcatctgagctcactcactctggtgggagctatgagagagtctttcatacagggctgcacagtgaggaactccttcagtagaggcctcagcatgtgcgggaccttgggcctgaaggtggacagtaatgtattctacaatattttaggtcatgcgctgctagttgggacatgcacggagatgagatatatctcctgggaggcaattcatggaaggaaagatgactggtcaggacatggaaatataataagaaacaacgtgatcatccaggtttctggtgccgagggactctccaatcctgaaatgttgacaccatctggcatctatatctgcagtcccaccaatgttatagaggggaacagagtgtgtggtgctggctatggctactttttccatctcatgaccaaccaaacatcacaagctccgcttctttccttcactcagaacattgcacattcttgtaccaggtatggtctctttgtataccctaaatttcagccaccttgggataatgtcactggcaccactctgttccagagcttcacagtttgggaaagtgcaggtggtgcccagatttttagaagtagcaatcttcgcctgaaaaacttcaaagtttattcatgcagagattttggaattgacgtcttggaaagtgatgcaaatacttcagttactgacagcttattacttggtcattttgcccacaaggtaagtctgtgtatgtcatctgggattaaaactcctaaaagatgggaactgatggtgtctaacacaacctttgttaattttgatctcatcaactgtgtggccattagaacctgttcagactgttcccaaggacaaggtggatttactgtgaagaccagccagttgaagtttacaaactcttcaaacttagtggcatttccatttcctcatgcagcaattttggaagacttggatgggtctctgtctgggaaaaacagaagtcacattcttgcttctatggaaaccctttcagcttcttgtttggtcaattcaagctttggtcgggttgtccatggcagtgcctgtggaggaggtgttctttttcatcgtatgtctattggtttagcgaatactcctgaagtttcttatgatttaaccatgactgacagcagaaataaaacaaccactgtcaattatgtacgtgatacattgtctaaccctcgtggctggatggctctgctcttggaccaagagacctactcattgcaatctgagaacctttggatcaacagatctctgcagtactcagcaacctttgacaactttgctcctggtaattacctactgctggtgcacacagatttgccgccttaccctgacatcctcctaagatgtgggagtcgagtgggtctgtcttttccatttcttccatcaccaggtcagaaccaaggctgtgactggttcttcaatagccagctgaggcaactcacctatctggtttcaggtgaaggccaagttcaagtcattctccgggtgaaggaaggtatgcccccaactatttcagcttctacctctgcccctgaatcagctttaaaatggtccctccctgaaacatggcaaggtgttgaagaaggctggggaggatacaacaataccattccaggccctggggatgacgttctcattttacccaacagaactgtccttgtggatacagatcttccattcttcaaagggctgtatgtgatggggaccttagacttccctgtggacagaagcaatgttctgagtgtggcatgcatggtcattgcaggcggggagctgaaagttggtactttagaaaatcccttagaaaaggaacaaaagcttctgattctccttagagcctcagagggagtcttttgtgaccgtatgaatggaattcatattgacccaggaacaattggggtttatgggaaagttcatctttacagtgcttatcctaagaactcctggacacatcttggagctgatattgcctcaggaaatgagagaattatagtagaagatgcagtggattggcgcccccatgacaaaatagtccttagctcctcttcttatgagcctcatgaagcagaggtcctcactgtgaaagaagtcaagggccaccatgtgaggatctatgaacggctcaaacaccggcatattggaagtgtacatgtcacggaggatggccgacacattcgtttggctgctgaggttggactgttgacccgaaatatacaaattcagcctgacgtatcatgtagggggagactgtttgtggggtccttcaggaagtccagccgagaagaattttcaggtgtccttcaacttcttaatgtggaaattcagaacttcgggtcaccattgtactcatctgttgaattcagtaatgtgtcagcaggatcctggatcatatcatctactctgcaccagagctgtggcgggggcattcatgcagctgccagtcatggagtacttttaaatgacaatattgtgtttggcacagctggccatggcatagatttagagggtcaggcctatactgtcactaataaccttgtggttctgatgacacagccagcgtggtccaccatttgggtggcgggaatcaaagtgaaccaggtaaaggacatcaacctccatggcaacgttgtggcaggatcagagagacttggctttcacatccgaggccacaagtgctcctcttgtgaactgctttggtctgacaatgtggcgcattcaagtcttcatggccttcatctctataaggaaagtggacttgacaactgtaccagaatctctggcttcttggctttcaagaactttgactatggtgccatgttacatgtagagaacagcgtggagatagagaacattactctggtagacaatactattggtcttttggcagtagtgtatgtattttctgctccacaaaattccgtcaaaaaagtgcagattgtgcttaggaattcagtcattgtggccaccagctcttcttttgactgcattcaggacaaagtgaagccgcactcagccaacttgacatcaacagatagagctccctccaatccaagaggaggtcgaattggtattctgtggcctgtattcacctcagaaccaaatcagtggcctcaggagccatggcacaaagtgaggaatgatcattcaatttcaggaatcatgaaacttcaagatgttaccttttctagttttgtgaagagttgctatagcgatgacctggatgtctgcattctaccaaatgcagagaacagtggaattatgcacccaataacagcagagaggaccaggatgctaaagataaaagataaaaacaagttctactttccttcattacaacccaggaaagatttaggaaaagtagtctgtcctgaattagactgtgcaagtccaagaaaatatctcttcaaggatctggatgggagagccctgggtctgcctccaccagtttctgtatttcctaaaacagaggcagaatggactgcatccttcttcaacgcaggtacatttagagaagaacagaaatgtacataccaatttctgatgcaaggattcatctgcaaacagactgaccaagtggtcctaattcttgatagcgctgatgccatttgggcaattcagaagttatatccagttgtatctgtgactagtggttttgttgatgtctttagcagtgtaaatgccaatattccctgctctacttctgggtcagtgtctactttctattctatcttacccatcaggcaaatcaccaaagtctgcttcatggatcaaactcctcaagttttgcgcttttttctattggggaacaaaagtacctccaagcttctcttggctgtattctaccatgagctccagagcccccacgtcttcttaggggaaagttttattccacccactctggttcagtcagcttccttattgctgaatgaatctattggtgccaactatttcaacatcatggataacctcttgtatgttgtcctacaaggagaggagcccattgaaatacgctcaggtgtttccattcacttggccctcactgtgatggtttcagtcttagaaaaaggctgggaaatagtaatactcgaaagactaactaacttcttacagattggccaaaaccaaatcaggtttattcacgagatgcctggccatgaagagaccttaaaggccattgctgacagtagagcaaaaagaaagcgcaattgccctactgtgacttgcactagtcattatagaagagttggtcaacgtaggcctctcatgatggaaatgaactcacatagggcttcacccccaatgactgtggaaactatctcaaaagtgattgtcattgaaattggtgattcgccaacagtaaggagcactggaatgatttcatccttatcaagtaacaaattacagaatttggctcatcgagtcatcactgctcaacagactggggtactagagaatgttctgaatatgactatcggggccttactagttactcagtcaaagggagtcattggctatggaaatacaagcagttttaaaactgggaacttgatatatattcggccctatgcactttccatcctagtccagccttcagatggagaagtgggaaatgagcttccagtgcagccacaattggtatttttggatgagcagaatcgaagagtagagtccctgggacctccttcagagccatggacaatttcagcttccctggaaggagcatcagactcagtgctaaaagggtgcacccaggcagaaactcaagatggttatgttagcttctacaacttggcagtcttgatctctgggtcaaactggcactttatttttactgtcacttctcctccaggagtcaattttacagctcgatccaagccatttgctgtcttgcctgtgactaggaaggagaagtcgaccatcatcctggctgcttccctgtcctctgtggcctcatggctggctctgagctgtctggtgtgctgttggcttaaaagaagcaaaagcagaaaaacaaaacctgaagagattcctgaatcccagactaataatcaaaatattcatatccacatctcatccaaacgccgagaatcacaagggcccaaaaaagaagacactgtggtgggagaagatatgagaatgaaggtcatgctgggcaaggtgaaccagtgcccccaccagttgatgaatggagtgtccagaaggaaagttagccgccacattgtccgagaggaagaggctgctgtgcctgctcctggtactactggcatcacatcccatgggcacatctgtgctccaggtgctcctgctcagcaggtgtacctgcaagagactgggaactggaaggagggccaagagcagttgctcagataccagctggcaggccaaaatcagctgctgctgctatgcccagacttcagacaagagaggcagcagttgccagggcaaagtcggctgagtaagcaaagtggcagcttggggctttcccaagagaagaaagcctcctgcggggccactgaggcattctgccttcattcagtacacccggaaactattcaggagcaactgtgatcagggaagttgggggcatttggcctgaaaggcagaatgttcccagtatttctggataataagctggggaagtgaggactgtcctgctgggacaactaagaagagagaatgtggactctgaatccctttttcaactttaaaatggaaaacagtcatataaatgcttacagactgaaaaatgtctcatacatattttgcagctatcatgatcctagttcaatgctaggcaaataatggcacttgttaattatttaccagtttttaacttaagcctgattttaacaacttgataatggtgtaatactgacttataccagcaggggttattattaagcattctctggattgaccacccacaatgctttgagcttcttttatagaagggatcatgaaaaggtctggtcagctacagtttaattccacactgttacagaaaagcatttctttatcctgtagtagcatttgaagggacagttcaacaccctgctccctgatctgtcagagcttaccttccaaccacaaggcaacttcctggctttttacaagtggattttatttcatggtttaaattcaatcattattgagaacctacagtagtgtgagcgtatcaaatttgcacttcatgaggatttacacatgaaaattgatattctcatgggctttgctgagagtttagttaaggacaaagatgtaaaaatgccaaatttgggaaaggaaattttgtatgaccactgttctatttttcagtgattctctctgttagtagctgggtcacatttacaactggaaaagaactacattgggagatcagagaaagccaagtggccaagtcctttatcaaaaagctgctttttggagaagatgatgcataaagctgtgatactaaggagaggagagattatgtcatatgcaactgctctaggctgtgcagggggtttaaatggagatcagaacaaaggctcacctggtattgatacatttggtaaggttgttaaaggcaatttcaccaaattcacacatttgtacggggcccatttcttttcaaactgaagaatactttaaacagcctgactgtgtccttggctctggatccagaaggccttatgctccaagcatgtaaagaaaagatcgcaggaatgtggagagcttccaaaaagagattgctctcagattttcctgaaaatcctgaaaaccaggattttccaatctctacaatgttaaggggttgttgtgtagttgcattggaagagagaaaggaaacacactctttcattgctgaattctaaataatgatgccctgaattagttctatgagaagtactggcagacagctgttatgtctgcagggcatcaaggggcaggtgtgtctcaccctactaagaattggcagaaatgttttaacctcttctttaggcatctggtgagtattgcagatcttcaggctgtccctaaaaggaggtaggtagccttctctgtggtcactgtgttggatttggaagaaaatataagtagatgttaaggtcagtgctctccaggagatttcaatccaggctatctgtgttcagggaatgatttgcaagaagttggtttatagacgtttactctggaggcacaagctggctgccatgctgagtaagtcctctttgtagatgatgtattttgcttgggcaccaacagaattaaaaacgaaaaacaaaaaaaaactcgaatgacttaggcagaacatgccttccctagtttaattagtccctgttataaccagttatttatctttttttgtagattctcggtcttgaagtcatttgcctttgcaatctctactttagtatactcattggatcctcaaagagccgtaagctttttggaaaaaaacatttcagaagtgaaggcttttgaggtttataaaatggtagcagtcttagtccttgccctgcctcagtttacctgcacatgctttctttcatttcctcggattctttcaccactttttaagttttttttccacaggtatttttcctgagctctataccatgcatttagctgcctagtgagaatatccagtaggttatcctatagttactatgaagttaacacagcccaaaaacctacttctccttgtgtttttttccaactcaatgaatgacatcactgcactcagaccagaaatctagaagtcagtcatgactcttcattctatttcgcccttcacaaagagttagctgccagctctgttatttctgccccttctttacccttcttccaatttttattatcttcttatttatcctctatgtgtcacaagaccagtctttctgggaggcatgttttatcctatccctctgcgtaggaataaccataattatcttactaattccatcccagaaaagcctgtgatccctgaggccagaattgactctttgggcctaaatagcagctataaacatcttcagtaacttgccaggctctagcatgtggcatggaattttggcatctagctaaaattcctcaacccatagttaagctactcctctttctcctaaaaaaaaaaaaaaatgagagaattagggaaacaccaaaagcaaagagagcagctctatgttcattcatgtctggagatgagccaatttgagcaccactgtaggccaactctaaatttattcagatcgttaacatgggtaacccagcaaatatttcccagcagtgacaatctacaccctttatctaaataaatattgagatgtgcttttttcctgtgttagttcaaagaatctcttcttgcctcccattgctgattttctgtattgatggactcatttctctcaagagattggacaagctaaaattctagagagttcaaaagtgtttgaaagtacattttaagtgttctcaccacaaaaaatgctagtgtgtgaggtgatacatatgttaattagttcaactgatccattccacaatgtatacatatttcaaactatcgagttgtacatgataaatatatacaatttttatttgtcaaataaagaacatctataaatatttatagatttcaaaattgagaaagaagtatatatggagccacggttgttttgaccatttctccatgctttttgtttggggagggggacattttttggggggcagggactgtgttcagggaaagtacctgaccaacagaacttcaagtctcttccagagtgcgagactcagcttatctgatcaaggtgaacttgcccttcaatagacttgcccttgttactgcccagtgaggccaccaaggaccaagaacagttgagctctctcagggccttcccctttcaacaatttagttgaatgactcccttccatctatcagtcttactccaaatatatgaaattactatacattgaaatgcctgcaaactatatgcaaaaatgagtatgaggaaatcaaatgtaaatcatatgcaaatattattcaaccaagcttctataaaattgtacgtgtcaataacagtaaagaattttaattaattctgtcatttaaaattcatgcattccatattttgctttcagaacttatagtctatgccaattttgaaaaaactataagcacaaggaattaaatactattgagtatagaactgttgatttcaacatacactatagcactttgactaattacagatatatttgatagaaaagtcacatttctacaaggtaattttcaaaaagaaataaaacatttctgtaaactt

SEQ ID NO: 11653 - DNA, 5337 bp, Homo sapiens
atgaggcgctgccggtgggccgccctggccctggggctgctgcgcctctgcttggctcaggccaacttcgccccgcacttcttcgacaacggggtcggcagcaccaacggaaacatggctctgttcagcctcccagaggacacccctgtaggctctcacgtatacaccctgaatgggacagaccctgagggagaccccatctcctaccacatcagctttgaccccagcactagaagcgtcttttctgttgaccccacttttggaaacatcaccctggttgaagagctggacagagagagggaagatgagattgaagccatcatcagcatttctgatggcctgaatctggtggccgaaaaagtcgtgatcctggtgaccgatgccaatgatgaggcgcccaggttcatccaggagccttatgttgccctggttcccgaggacatacctgctgggagcatcatctttaaggtccatgcagtggacagggacacaggctctggagggagtgtcacctacttcctgcagaacctgcactccccatttgccgtggaccgccacagcggtgtgctgcgcctccaggctggggccactctggactacgagaggtcccggacccactacatcaccgtggtcgccaaggatggcggtgggaggcttcatggggctgatgtggtgttctcagccaccaccacggtcacggtcaatgtggaggatgttcaggacatggcccctgtcttcgtgggcacaccctactatggctatgtgtacgaggacacccttccgggctcggaggtactgaaggtggtcgccatggatggagaccggggcaaacccaatcgaattctctacagccttgtaaatgggaacgatggagcctttgaaattaatgagacatctggagccatctccatcactcagagcccggcccagctccagagagaggtgtatgagctgcatgtacaggtgactgaaatgagccctgcggggagcccagctgcccaggccaccgtcccagtcaccatcaggattgtggacctcaacaaccacccgccaacattctatggagagagcggaccccaaaacaggtttgagctgtccatgaatgagcacccaccccagggagagatcctgcggggcctcaagatcaccgtcaatgactccgaccagggagccaatgccaaattcaacttgcagctggtgggacccaggggcatcttccgagtggttccacagacagtcctgaatgaagcccaagtcacaatcattgtggagaactcagctgccattgactttgaaaagtccaaagtattaaccttcaagctcctggctgttgaagtgaacaccccagagaagttcagttccacagcggatgttgtgatccagctcctggacaccaatgacaatgtccccaagttcgactccctctactacgttgccaggattcctgagaacgccccagggggctccagcgtggtggctgtcacagctgtggatccagatacaggaccctggggcgaagtgaaatattccacctatgggactggggcagacctcttcctgatccacccatccactgggcttatctacacccagccctgggctagcctggacgctgaggccactgccaggtacaacttctatgtgaaggcagaggacatggaaggcaagtacagcgtagctgaggtgtttatcacactgctggatgtcaatgaccacccccctcagtttggaaagagcgttcagaagaagacgatggtgctagggaccccagtgaaaattgaggccatagacgaggatgcagaggaacccaacaacctggtggactattccatcacccatgcagagcccgccaacgtgttcgacatcaattcccacacgggggagatctggctcaagaattccatccgctccctggatgccctgcacaacatcacacctggaagggactgcctatggtccctagaggtgcaggccaaggaccggggctccccatccttcagcaccacagccttactcaagattgacatcacagatgctgagaccctctcccggagccccatggctgccttcctgatacagaccaaggacaaccccatgaaggccgtgggtgtgctggccggcaccatggccaccgtcgtggccatcactgtcctcatctccaccgccaccttctggcgcaacaagaagtctaacaaggtcctgccaatgcggcgggtgctccgcaagcggcccagccctgcgccccgcaccatccgcattgagtggctcaagtccaagagcaccaaagccgctaccaagttcatgctcaaagagaaacctcccaatgagaactgtaacaacaacagcccagaaagctctctgctcccgagagctccggctctccctccaccacccagcgtggcgcccagcactggcgcagcccagtggaccgtgcctactgtctctggctctctcactccgcagccgacccaacccccgccaaaacccaaaactatgggaagccccgtccagtcaactctgatctctgagctcaagcaaaagtttgagaagaagagtgtgcacaacaaggcttacttctagtgtatgccctatgaccccccatctttcctccgcccctgacccccaccaccctgctgctcggactatgctccccttcctctgctccttaaggtcactgacccctgttttgcacaatggtataatccccactgtcctcatctctaccgccaccttctggcgcaacaagaagttgcgctctgacagggctctagtcagggccttgggcaagacattgggctctaggatgcaattggcaaatacgtccccgttactcaaatccttggcactactacaatgccctccattcttcagggctgagaattgacgagaagccagctcacccatcccagacctcacagtccctcaggttctactgggatctcatcatcatccttagtcaagcagcagggccctggccacgtggagcaacactgactagaatctggatcctgacgcctgcagctgagagcaggagcaggaaaaggaggctcagcactgtctcaggctggaggtcagcgaacctcgtgggctgtaggaaagcaaatgtaggtaaggggagagcaaggatgcacagaaaacacactgactgtgggactgtgccaggatgcatttggaaagatagagcattctgtctgggcagagactgtggaccctggtatgcccacgtgggacagaggacacagaggtggaagattgatcttgccaagagtgagggcagatgtctccagccaggactgccctgagccgcaaaatgtcaaagctggagctatagaggtagccctaaaggcaactagaagagcatcagggctgctctctgaggagctgccccaccagccatccttgaagagacaattcagggcagttgatgaatatcagggctgagatgtggtgagacttccgtttttatccagctcttttgctcacatcgcgtaaccttgggaaagctgtttaaagtcgctgatcatcctcttcctcatctgtaaatgaagaaagtaggccctgtctacctcacatgcaggtctagggtgaggattgaagaaaatagtggtgatgagggctttaaccaagtgcaaagcggcatgaatgcaaagtatttttctgcagcccagttctgtgggtgcagctcttccagaaagtattaggagcctcacatctactctgccaagcgccccagcaggcactgtgctgggcttaggggctaccactggatgatggcattgccgtgactcacacacctctacttctgttcttccctcactccatccccgctaccgtcctggccagctaccgtcagagagaaccagagctccaagtctttaatttgccaagatgaagaaaatgagttctcaaggagggaatgctttgcttgaggccacacagcaggttggtagcaaagatcttgtctagccagggcagcccttatcagcttgtgacaaccttccccaggacagaagtcatacaaggcctctggggttaatacaaataggttgtgccctgctttaaggaacctgctatcaggaaatctacatgtgtgcacagagagagaaaagtagaacagttctttgcatttggctctacttactaacaacccctctagaatacattggtgatttcatttaaagagattgtatgcatttgtggctttcctgatttctgagtctgtgtttggaggtgttactgagatgtgccagtgtgcagaatccttgctggggtttctacagtccccaacgtgaacagtattaagcaagaggtggactcgagcaatccaggagcccagactgagcaaataagtactttccagcctgtgtttcaggagaggactgtgctggatcatgcttgccctccacagggaatacagcatccttacagcttgcatgcaatcaacctcttttgtaaatggaaaataaagtctgttacccaaaggccatgctgatcccctgctccctgctttcatttatgtttgctgacctgtggagaccagtctttctgacacacagtgaagctcaacttgcctcctggctgcttcagcaggtggatccattcttcgacccccagatgtgactctaaagaaggctgaaaatttttgtccaaattgccatgcagatatcttgaacagcaggacatttgcaggccttgtctactggacttttctcccaaacaggacaagcccaggcagggctgcatggagaggaatggaacctggagctagaattaattgcccactctcccaccctaccagtgcagcccggcaagggcaggaattgggaggcctagggtgggcatgaaagcttgggaagcactgtcgtctctcagacaggcgtcctaaagacctctaggctggaagcttgggcttgcaagtggatccgggaccgagggtggtctcttggacaaccccaggaacttggaccaaggcagagccaatcttgcaaactggccatggatggggaagtgcccggtagccagcatgagccacactaggaaagaggaggagggtgcagccaaacttaaggcaccggcaagtgttgtcagcactggaggagaccccgccagtggggtgaggccagccaagtccctgtgttacgaatggtgggccaaggggctgtctgctaggtcccagtaggacaggcagagctccaggctggcaccatggtaggcctccagggaaagagctgggaggcaggaatggcacactgggcaggcttgcccattcctggccctgagaatggagctgtagcctcatggacaataaatggatgtgacaccaaaaaaaaaaaaaaa

SEQ ID NO: 11654 - DNA, 2175 bp, Homo sapiens
gagaaattggagaagataaaactggacactggggagaccacaacttcatgctgcgtgggatctcccagctacctgcagtggccaccatgtcttgggtcctgctgcctgtactttggctcattgttcaaactcaagcaatagccataaagcaaacacctgaattaacgctccatgaaatagtttgtcctaaaaaacttcacattttacacaaaagagagatcaagaacaaccagacagaaaagcatggcaaagaggaaaggtatgaacctgaagttcaatatcagatgatcttaaatggagaagaaatcattctctccctacaaaaaaccaagcacctcctggggccagactacactgaaacattgtactcacccagaggagaggaaattaccacgaaacctgagaacatggaacactgttactataaaggaaacatcctaaatgaaaagaattctgttgccagcatcagtacttgtgacgggttgagaggatacttcacacatcatcaccaaagataccagataaaacctctgaaaagcacagacgagaaagaacatgccgtctttacatctaaccaggaggaacaagacccagctaaccacacatgtggtgtgaagagcactgacgggaaacaaggcccaattcgaatctctagatcactcaaaagcccagagaaagaagactttcttcgggcacagaaatacattgatctctatttggtgctggataatgccttttataagaactataatgagaatctaactctgataagaagctttgtgtttgatgtgatgaacctactcaatgtgatatataacaccatagatgttcaagtggccttggtaggtatggaaatctggtctgatggggataagataaaggtggtgcccagcgcaagcaccacgtttgacaacttcctgagatggcacagttctaacctggggaaaaagatccacgaccatgctcagcttctcagcgggattagcttcaacaatcgacgtgtgggactggcagcttcaaattccttgtgttccccatcttcggttgctgttattgaggctaaaaaaaagaataatgtggctcttgtaggagtgatgtcacatgagctgggccatgtccttggtatgcctgatgttccattcaacaccaagtgtccctctggcagttgtgtgatgaatcagtatctgagttcaaaattcccaaaggatttcagtacatcttgccgtgcacattttgaaagataccttttatctcagaaaccaaagtgcctgctgcaagcacctattcctacaaatataatgacaacaccagtgtgtgggaaccaccttctagaagtgggagaagactgtgattgtggctctcctaaggagtgtaccaatctctgctgtgaagccctaacgtgtaaactgaagcctggaactgattgcggaggagatgctccaaaccataccacagagtgaatccaaaagtctgcttcactgagatgctaccttgccaggacaagaaccaagaactctaactgtcccaggaatcttgtgaattttcacccataatggtctttcacttgtcattctactttctatattgttatcagtccaggaaacaggtaaacagatgtaattagagacattggctctttgtttaggcctaatctttctttttacttttttttttcttttttctttttttttaaagatcatgaatttgtgacttagttctgccctttggagaacaaaagaaagcagtcttccatcaaatcaccttaaaatgcacggctaaactattcagagttaacactccagaattgttaaattacaagtactatgctttaatgcttctttcatcttactagtatggcctataaaaaaaataataccacttgatgggtgaaggctttggcaatagaaagaagaatagaattcaggttttatgttattcctctgtgttcacttcgccttgctcttgaaagtgcagtatttttctacatcatgtcgagaatgattcaatgtaaatatttttcattttatcatgtatatcctatacacacatctccttcatcatcatatatgaagtttattttgagaagtctacattgcttacattttaattgagccagcaaagaaggcttaatgatttattgaaccataatgtcaataaaaacacaacttttgaggc

SEQ ID NO: 11655 - DNA, 11073 bp, Homo sapiens
gcggcggcggcggctcgggagagagggacgcgggctgcaggcgcgatgcttggctagaggacgcgtccgacggcggccggacgctgaggtggtcggggctagtcagcccggcctgggcatggagcgcggggtggcagagcctctggacgtttggggcgcgcccagtccgagcccccggcgcgcctgaagttgcgagcggcgagcggcgagcggcgagcggcccgcggagacccaggagctgccggcacgccgcggatgagccttcgcgccggcgggaagacgcggcggtggccagggccagagcaggcggcccgcgggggccgatccggcggagagcagagcccgaggcgaggcgaggcgcggcgccgctgcacacacgcacacggagccatggggcgccatgttgccaccagctgccacgtggcctggcttttggtgctgatctctggatgctggggccaggtgaaccggctgcccttcttcaccaaccacttctttgatacatacctgctgatcagcgaggacacgcctgtgggttcttctgtgacccagttgctggcccaagacatggacaatgaccccctggtgtttggcgtgtctggggaggaggcctctcgcttctttgcagtggagcctgacactggcgtggtgtggctccggcagccactggacagagagaccaagtcagagttcaccgtggagttctctgtcagcgaccaccagggggtgatcacacggaaggtgaacatccaggttggggatgtgaatgacaacgcgcccacatttcacaatcagccctacagcgtccgcatccctgagaatacaccagtggggacgcccatcttcatcgtgaatgccacagaccccgacttgggggcagggggcagcgtcctctactccttccagcccccctcccaattcttcgccattgacagcgcccgcggtatcgtcacagtgatccgggagctggactacgagaccacacaggcctaccagctcacggtcaacgccacagatcaagacaagaccaggcctctgtccaccctggccaacttggccatcatcatcacagatgtccaggacatggaccccatcttcatcaacctgccttacagcaccaacatctacgagcattctcctccgggcacgacggtgcgcatcatcaccgccatagaccaggataaaggacgtccccggggcattggctacaccatcgtttcagggaataccaacagcatctttgccctggactacatcagcggagtgctgaccttgaatggcctgctggaccgggagaaccccctgtacagccatggcttcatcctgactgtgaagggcacggagctgaacgatgaccgcaccccatctgacgctacagtcaccacgaccttcaatatcctggttattgacatcaatgacaatgccccggagttcaacagctccgagtacagcgtggccatcactgagctggcacaggtcggctttgcccttccactcttcatccaggtggtggacaaggatgagaatttgggcctgaacagcatgtttgaggtgtacttggtggggaacaactcccaccacttcatcatctccccgacctccgtccaggggaaggcggacattcgtattcgggtggccatcccactggactacgagaccgtggaccgctacgactttgatctctttgccaatgagagtgtgcctgaccatgtgggctatgccaaggtgaagatcactctcatcaatgaaaatgacaaccggcccatcttcagccagccactgtacaacatcagcctgtacgagaacgtcaccgtggggacctctgtgctgacagtcctggcaactgacaatgatgcaggcacctttggggaagtcagctacttcttcagtgatgaccctgacaggttctcgctggacaaggacacgggactcatcatgctgattgccaggctggactatgagctcatccagcgcttcaccctgacgatcattgcccgggacgggggcggcgaggagaccacaggccgggtcaggatcaatgtgttggatgtcaacgacaacgtgcccaccttccagaaggatgcctacgtgggtgctctgcgggagaacgagccttctgtcacacagctggtgcggctccgggcaacagatgaagactcccctcccaacaaccagatcacctacagcattgtcagtgcatctgcctttggcagctacttcgacatcagcctgtacgagggctatggagtgatcagcgtcagtcgccccctggattatgaacagatatccaatgggctgatttatctgacggtcatggccatggatgctggcaacccccctctcaacagcaccgtccctgtcaccatcgaggtgtttgatgagaatgacaaccctcccaccttcagcaagcccgcctacttcgtctccgtggtggagaacatcatggcaggagccacggtgctgttcctgaatgccacagacctggaccgctcccgggagtacggccaggagtccatcatctactccttggaaggctccacccagtttcggatcaatgcccgctcaggggaaatcaccaccacgtctctgcttgaccgagagaccaagtctgaatacatcctcatcgttcgcgcagtggacgggggtgtgggccacaaccagaaaactggcatcgccaccgtaaacatcaccctcctggacatcaatgacaaccaccccacgtggaaggacgcaccctactacatcaacctggtggagatgacccctccagactctgatgtgaccacggtggtggctgttgacccagacctgggggagaatggcaccctggtgtacagcatccagccacccaacaagttctacagcctcaacagcaccacgggcaagatccgcaccacccacgccatgctggaccgggagaaccccgacccccatgaggccgagctgatgcgcaaaatcgtcgtctctgttactgactgtggcaggccccctctgaaagccaccagcagtgccacagtgtttgtgaacctcttggatctcaatgacaatgaccccacctttcagaacctgccttttgtggccgaggtgcttgaaggcatcccggcgggggtctccatctaccaagtggtggccatcgacctcgatgagggcctgaacggcctggtgtcctaccgcatgccggtgggcatgccccgcatggacttcctcatcaacagcagcagcggcgtggtggtcaccaccaccgagctggaccgcgagcgcatcgcggagtaccagctgcgggtggtggccagtgatgcaggcacgcccaccaagagctccaccagcacgctcaccatccatgtgctggatgtgaacgacgagacgcccaccttcttcccggccgtgtacaatgtgtctgtgtccgaggacgtgccacgcgagttccgggtggtctggctgaactgcacggacaacgacgtgggcctcaatgcagagctcagctacttcatcacaggtggcaacgtggatgggaagttcagcgtgggttaccgcgatgccgttgtgagaaccgtggtgggcctggaccgggagaccacagccgcctacatgctcatcctggaggccatcgacaacggccctgtagggaagcgacacacgggcacagccaccgtgttcgtcactgtcctggatgtgaatgacaaccggcccatctttctgcagagcagctatgaggccagcgtccctgaggacatccctgaaggccacagcatcttgcagctgaaagccacggacgcagatgagggcgagtttgggcgtgtgtggtaccgcatcctccatggtaaccatggcaacaacttccggatccatgtcagcaatgggctcctgatgcgagggccccggcccctggaccgggagcggaactcatcccacgtgctgatagtggaggcctacaaccacgacctgggccccatgcggagctccgtcagggtgattgtgtacgtggaggacatcaacgatgaggcccccgtgttcacacagcagcagtacagccgtctggggcttcgagagaccgcaggcattggaacgtcagtcatcgtggtccaagccacagaccgagactctggggatggtggcctggtgaactaccgcatcctgtcgggcgcagaggggaagtttgagattgacgagagcacagggcttatcatcaccgtgaattacctggactacgagaccaagaccagctacatgatgaatgtgtcggccactgaccaggccccgcccttcaaccagggcttctgcagcgtctacatcactctgctcaacgagctggacgaggccgtgcagttctccaatgcctcatacgaggctgccatcctggagaatctggcactgggtactgagattgtgcgggtccaggcctactccatcgacaacctcaaccaaatcacgtaccgcttcaacgcctacaccagcacccaggccaaagccctcttcaagatagacgccatcacgggtgtgatcacagtccagggcctggtggaccgtgagaagggcgacttctataccttgacagtggtggcagatgacggcggccccaaggtggactccaccgtgaaggtctacatcactgtgctggacgagaatgacaacagcccccggtttgacttcacctccgactcggcggtcagcatacccgaggactgccctgtgggccagcgagtggctactgtcaaggcctgggaccctgatgctggcagcaatgggcaggtggtcttctccctggcctctggcaacatcgcgggggcctttgagatcgtcaccaccaatgactccattggcgaagtgtttgtggccaggcccctggacagagaagagctggatcactacatcctccaggttgtggcttctgaccgaggcacccctccacggaagaaggaccacatcctgcaggtgaccatcctggacatcaatgacaaccctccagtcatcgagagcccctttggatacaatgtcagtgtgaatgagaacgtgggtggaggtactgctgtggtccaggtgagagccactgaccgtgacatcgggatcaacagtgttctgtcctactacatcaccgagggcaacaaggacatggccttccgcatggaccgcatcagcggtgagatcgccacacggcctgccccgcctgaccgcgagcgccagagcttctaccacctggtggccactgtggaggacgagggcaccccaaccctgtcggccaccacgcacgtgtacgtgaccattgtggatgagaatgataacgcgcccatgttccagcagccccactatgaggtgctgctggatgagggcccagacacgctcaacaccagcctcatcaccatccaggcactggacctggatgagggtcccaacggcacagtcacctatgccatcgtcgcaggcaacatcgtcaacaccttccgcatcgacagacacatgggtgtcatcactgctgccaaagagctggactacgagatcagccacggccgctacaccctgatcgtcactgccacagaccagtgccccatcttatcccaccgcctcacctctaccaccacggtgcttgtgaatgtgaatgacatcaacgacaatgtgcctaccttcccccgggactatgagggaccatttgaagtcactgagggccagccggggcccagagtgtggaccttcctggcccatgaccgagactcaggacccaacgggcaggtggagtacagcatcatggatggagaccctctgggtgagtttgtgatctctcctgtggagggggtgctaagggtccggaaggacgtggagctggaccgggagaccatcgccttctacaacctgaccatctgtgcccgtgaccgggggatgcccccactcagctccacaatgctggtggggatccgggtgctggacatcaacgacaacgaccctgtgctgctgaacctgcccatgaacatcaccatcagcgagaacagccctgtctccagctttgtcgcccatgtcctggccagtgacgctgacagtggctgcaatgcacgcctcaccttcaacatcactgcgggcaaccgcgagcgggccttcttcatcaatgccacgacagggatcgtcactgtgaaccggcccctggaccgcgagcggatcccagagtacaagctgaccatttctgtgaaggacaacccggagaatccacgcatagccaggagggattatgacttgcttctgatcttcctttctgatgagaatgacaaccaccccctcttcactaaaagcacctaccaggcagaggtgatggaaaactctcccgctggcacccctctcacggtgctcaatgggcccatcctggccctggatgcagaccaagacatctacgccgtggtgacctaccagctgctgggtgcccagagtggcctctttgacatcaacagcagcaccggtgtggtgaccgtgaggtcaggtgtcatcattgaccgggaggcattctcgccacccatcctggagctgctgctgctggctgaggacatcgggctgctcaacagcacggcccacctgctcatcaccatcctggatgacaatgacaaccggcccacctttagccctgccaccctcactgtccatctgctagagaactgcccgcctggattctcagtccttcaagtcacagccacagatgaggacagtggcctcaatggggagctggtctaccgaatagaagctggggctcaggaccgcttcctcattcatctggtcaccggggtcatccgtgttggtaatgccaccatcgacagagaggagcaggagtcctacaggctaacggtggtggccaccgaccggggcaccgttcctctctcgggcacagccattgtcaccattctgatcgatgacatcaatgactcccgccccgagttcctcaaccccatccagacagtgagcgtgctggagtcggctgagccaggcactgtcattgccaatatcacggccattgaccacgacctcaacccaaagctagagtaccacattgtcggcattgtggccaaggacgacactgatcgcctggtgcccaaccaggaggacgcctttgctgtgaatatcaacacaggatctgtaatggtgaagtcccccatgaatcgggagctggttgccacctatgaggtcactctctcagtgattgacaatgccagcgacctaccagagcgctctgtcagtgtgccaaatgccaagctgactgtcaacgtcctggacgtcaatgacaatacgccccagttcaagccctttgggatcacctactacatggagcggatcctggagggggccacccctgggaccacactcattgctgtggcagccgtggaccctgacaagggccttaatgggctggtcacctacaccctgctggacctggtgcccccagggtatgtccagctggaggactcctcggcagggaaggtcattgccaaccggacagtggactacgaggaggtgcactggctcaactttaccgtgagggcctcagacaacgggtccccgccccgggcagctgagatccctgtctacctggaaatcgtggacatcaatgacaacaaccccatctttgaccagccctcctaccaggaggctgtctttgaggatgtgcctgtgggcacaatcatcctgacagtcactgccactgatgctgactcaggcaactttgcactcattgagtacagccttggagatggagagagcaagtttgccatcaaccccaccacgggtgacatctatgtgctgtcttctctggaccgggagaagaaggaccactatatcctgactgccttggccaaagacaaccctggggatgtagccagcaaccgtcgcgaaaattcagtgcaggtggtgatccaagtgctggatgtcaatgactgccggccacagttctccaagccccagttcagcacaagcgtgtatgagaatgagccggcgggcacctcggtcatcaccatgatggccactgaccaggatgaaggtcccaatggagagttgacctactcacttgagggccctggcgtggaggccttccatgtggacatggactcgggcttggtgaccacacagcggccactgcagtcctacgagaagttcagtctgaccgtggtggccacagatggtggagagcccccactctggggcaccaccatgctcctggtggaggtcatcgacgtcaatgacaaccgccctgtctttgtgcgcccacccaacggcaccatcctccacatcagagaggagatcccgctgcgctccaacgtgtacgaggtctacgccacggacaaggatgagggcctcaacggggcggtgcgctacagcttcctgaagactgcgggcaaccgggactgggagttcttcatcatcgacccaatcagcggcctcatccagactgctcagcgcctggaccgcgagtcgcaggcggtgtacagcctcatcttggtggccagcgacctgggccagccagtgccatacgagactatgcagccgctgcaggtggccctggaggacatcgatgacaacgaaccccttttcgtgaggcctccaaaaggcagcccccagtaccagctgctgacagtgcctgagcactcaccacgcggcaccctcgtgggcaacgtgacaggcgcagtggatgcagatgagggccccaacgcgatcgtgtactacttcatcgcagccggcaacgaagagaagaacttccatctgcagcccgatgggtgtctgctggtgctgcgggacctggaccgggagcgagaagccatcttctccttcatcgtcaaggcctccagcaatcgcagctggacacctccccgtggaccctccccaaccctcgacctggttgctgacctcacactgcaggaggtgcgcgttgtgctagaggacatcaacgaccagccaccacgcttcaccaaggctgagtacactgcaggggtggccaccgacgccaaggtgggctcagagttgatccaggtgctggccctggatgcagacattggcaacaacagccttgtcttctacagcattctggccatccactacttccgggcccttgccaacgactctgaagatgtgggccaggtcttcaccatggggagcatggacggcattctgcgcaccttcgacctcttcatggcctacagccccggctacttcgtggtggacattgtggcccgagacctggcaggccacaacgacacggccatcatcggcatctacatcctgagggacgaccagcgcgtcaagatcgtcattaacgagatccccgaccgtgtgcgcggcttcgaggaggagttcatccacctgctctccaacatcactggggccattgtcaatactgacaatgtgcagttccatgtggacaagaagggccgggtgaactttgcgcagacagaactgcttatccacgtggtgaaccgcgataccaaccgcatcctggacgtggaccgggtgatccagatgatcgatgagaacaaggagcagctacggaatcttttccggaactacaacgtcctggacgtgcagcctgccatctctgtccggctgccggatgacatgtctgccctgcagatggcgatcatcgtcctggctatcctcctgttcctggccgccatgctctttgtcctcatgaactggtactacaggactgtacacaagaggaagctcaaggccattgtggctggctcagctgggaatcgtggcttcatcgacatcatggacatgcctaacaccaacaagtactcctttgatggagccaaccctgtgtggctggatcccttctgtcggaacctggagctggccgcccaggcggagcatgaggatgacctaccggagaacctgagtgagatcgccgacctgtggaacagccccacgcgcacccagggaacttttgggcgtgagccagcagctgtcaagcctgatgatgaccgatacctgcgggctgccatccaggagtatgacaacattgccaagctgggccagatcattcgtgaggggccaatcaagggctcgctgctgaaggtggtcctggaggattacctgcggctcaaaaagctctttgcacagcggatggtgcaaaaagcctcctcctgccactcctccatctctgagctgatacagactgagctggacgaggagccaggagaccacagcccagggcagggtagcctgcgcttccgccacaagccaccagtggagctcaaggggcccgatgggatccatgtggtgcacggcagcacgggcacgctgctggccaccgacctcaacagcctgcccgaggaagaccagaagggcctgggccgctcgctggagacgctgaccgctgccgaggccactgccttcgagcgcaacgcccgcacagaatccgccaaatccacacccctgcacaaacttcgcgacgtgatcatggagacccccctggagatcacagagctgtgactagacagggaagccttgtgggtgtgagcagcacccatccaccgtcccctcccagggagcaagggcagggacagggccggtcgggggggaccctccaaggccaggccttggggacaaccttggcttggccctggcagcccgcatcagctgctcagatcccacttttgccagacgctcattcagcatctgacctctaccttcataagatctgttatttttataagaaaaccaaacaaaaatgttaagcatctaaggacaaggtaaggagggtcactggggcccaagagtctggggaccagcttggctcaggctgagctgaaagaggccaaacaggccctcctccctcccagctccaccccgcaagcaccatcccctccggctaagcaggcgcaagggaggcccagcgcggacatcccctgctggccggacacccgactccagtccaagtctcgctacatttccgccacatccctctctgctggacgtccaggtggaggtggcatccccacgtggacaagaaagtcaatgtcaatgaacaagcattctctccatttcactggcttcccaaatgtgtgcccagcttataaacagaagtgactgatgttccctccggttttg

SEQ ID NO: 11656 - DNA, 3026 bp, Homo sapiens
cctccaggtcctggcgcacagggtgggagcgctgcgctgcgccgcgctgcgcatcgcggcccgcttgccgcctgccccctgccctagctgggccacctccccgggctgccggtggagggctaagaggcgctaacgttacgctgtttccggttttccagcgggctctgtttcccctcccaaggcggcggcggctgagcggcggagccccccaaatggcctggccagatgcggcaggtttgctgctcagcgctgccgccgccgccactggagaagggtcggtgcagcagctacagcgacagcagcagcagcagcagcgagaggagcagcagcagcagcagcagcagcagcgagagcggcagcagcagcaggagcagcagcaacaacagcagcatctctcgtcccgctgcgcccccagagccgcggccgcagcaacagccgcagccccgcagccccgcagcccggagagccgccgcccgttcgcgagccgcagccgccggcggcatgaggcgcgacccggcccccggcttctccatgctgctcttcggtgtgtcgctcgcctgctactcgcccagcctcaagtcagtgcaggaccaggcgtacaaggcacccgtggtggtggagggcaaggtacaggggctggtcccagccggcggctccagctccaacagcacccgagagccgcccgcctcgggtcgggtggcgttggtaaaggtgctggacaagtggccgctccggagcggggggctgcagcgcgagcaggtgatcagcgtgggctcctgtgtgccgctcgaaaggaaccagcgctacatctttttcctggagcccacggaacagcccttagtctttaagacggcctttgcccccctcgataccaacggcaaaaatctcaagaaagaggtgggcaagatcctgtgcactgactgcgccacccggcccaagttgaagaagatgaagagccagacgggacaggtgggtgagaagcaatcgctgaagtgtgaggcagcagccggtaatccccagccttcctaccgttggttcaaggatggcaaggagctcaaccgcagccgagacattcgcatcaaatatggcaacggcagaaagaactcacgactacagttcaacaaggtgaaggtggaggacgctggggagtatgtctgcgaggccgagaacatcctggggaaggacaccgtccggggccggctttacgtcaacagcgtgagcaccaccctgtcatcctggtcggggcacgcccggaagtgcaacgagacagccaagtcctattgcgtcaatggaggcgtctgctactacatcgagggcatcaaccagctctcctgcaagtgtcctgtgggatacaccggggacaggtgtcagcagttcgcaatggtcaacttctccaagcaccttggatttgaattaaaggaagccgaggagctgtaccagaagagggtcctgaccatcacgggcatctgcgtggctctgctggtcgtgggcatcgtctgtgtggtggcctactgcaagaccaaaaaacagcggaagcagatgcacaaccacctccggcagaacatgtgcccggcccatcagaaccggagcttggccaatgggcccagccacccccggctggacccagaggagatccagatggcagattatatttccaagaacgtgccagccacagaccatgtcatcaggagagaaactgagaccaccttctctgggagccactcctgttctccttctcaccactgctccacagccacacccacctccagccacagacacgagagccacacgtggagcctggaacgttctgagagcctgacttctgactcccagtcggggatcatgctatcatcagtgggtaccagcaaatgcaacagcccagcatgtgtggaggcccgggcaaggcgggcagcagcctacaacctggaggagcggcgcagggccaccgcgccaccctatcacgattccgtggactcccttcgcgactccccacacagcgagaggtacgtgtcggccctgaccacgcccgcgcgcctctcgcccgtggacttccactactcgctggccacgcaggtgccaactttcgagatcacgtcccccaactcggcgcacgccgtgtcgctgccgccggcggcgcccatcagttaccgcctggccgagcagcagccgttactgcggcacccggcgccccccggcccgggacccggacccgggcccgggcccgggcccggcgcagacatgcagcgcagctatgacagctactattaccccgcggcggggcccggaccgcggcgcgggacctgcgcgctcggcggcagcctgggcagcctgcctgccagccccttccgcatccccgaggacgacgagtacgagaccacgcaggagtgcgcgcccccgccgccgccgcggccgcgcgcgcgcggtgcgtcccgcaggacgtcggcggggccccggcgctggcgccgctcgcgcctcaacgggctggcggcgcagcgcgcacgggcggcgagggactcgctgtcgctgagcagcggctcgggcggcggctcagcctcggcgtcggacgacgacgcggacgacgcggacggggcgctggcggccgagagcacacctttcctgggcctgcgtggggcgcacgacgcgctgcgctcggactcgccgccactgtgcccggcggccgacagcaggacttactactcactggacagccacagcacgcgggccagcagcagacacagccgcgggccgcccccgcgggccaagcaggactcggcgccactctagggccccgccgcgcgcccctccgccccgcccgccccactatctttaaggagaccagagaccgcctactggagagaaaggaggaaaaaagaaataaaaatatttttattttctataaaaggaaaaaagtataacaaaatgttttattttcattttagcaaaaattgtcttataatactagctaacggcaaaggcgtttttatagggaaactatttatatgtaacatcctgatttacagcttcgg

SEQ ID NO: 11657 - DNA, 3020 bp, Homo sapiens
cctccaggtcctggcgcacagggtgggagcgctgcgctgcgccgcgctgcgcatcgcggcccgcttgccgcctgccccctgccctagctgggccacctccccgggctgccggtggagggctaagaggcgctaacgttacgctgtttccggttttccagcgggctctgtttcccctcccaaggcggcggcggctgagcggcggagccccccaaatggcctggccagatgcggcaggtttgctgctcagcgctgccgccgccgccactggagaagggtcggtgcagcagctacagcgacagcagcagcagcagcagcgagaggagcagcagcagcagcagcagcagcagcgagagcggcagcagcagcaggagcagcagcaacaacagcagcatctctcgtcccgctgcgcccccagagccgcggccgcagcaacagccgcagccccgcagccccgcagcccggagagccgccgcccgttcgcgagccgcagccgccggcggcatgaggcgcgacccggcccccggcttctccatgctgctcttcggtgtgtcgctcgcctgctactcgcccagcctcaagtcagtgcaggaccaggcgtacaaggcacccgtggtggtggagggcaaggtacaggggctggtcccagccggcggctccagctccaacagcacccgagagccgcccgcctcgggtcgggtggcgttggtaaaggtgctggacaagtggccgctccggagcggggggctgcagcgcgagcaggtgatcagcgtgggctcctgtgtgccgctcgaaaggaaccagcgctacatctttttcctggagcccacggaacagcccttagtctttaagacggcctttgcccccctcgataccaacggcaaaaatctcaagaaagaggtgggcaagatcctgtgcactgactgcgccacccggcccaagttgaagaagatgaagagccagacgggacaggtgggtgagaagcaatcgctgaagtgtgaggcagcagccggtaatccccagccttcctaccgttggttcaaggatggcaaggagctcaaccgcagccgagacattcgcatcaaatatggcaacggcagaaagaactcacgactacagttcaacaaggtgaaggtggaggacgctggggagtatgtctgcgaggccgagaacatcctggggaaggacaccgtccggggccggctttacgtcaacagcgtgagcaccaccctgtcatcctggtcggggcacgcccggaagtgcaacgagacagccaagtcctattgcgtcaatggaggcgtctgctactacatcgagggcatcaaccagctctcctgcaaatgtccaaatggattcttcggacagagatgtttggagaaactgcctttgcgattgtacatgccagatcctaagcaaaaagccgaggagctgtaccagaagagggtcctgaccatcacgggcatctgcgtggctctgctggtcgtgggcatcgtctgtgtggtggcctactgcaagaccaaaaaacagcggaagcagatgcacaaccacctccggcagaacatgtgcccggcccatcagaaccggagcttggccaatgggcccagccacccccggctggacccagaggagatccagatggcagattatatttccaagaacgtgccagccacagaccatgtcatcaggagagaaactgagaccaccttctctgggagccactcctgttctccttctcaccactgctccacagccacacccacctccagccacagacacgagagccacacgtggagcctggaacgttctgagagcctgacttctgactcccagtcggggatcatgctatcatcagtgggtaccagcaaatgcaacagcccagcatgtgtggaggcccgggcaaggcgggcagcagcctacaacctggaggagcggcgcagggccaccgcgccaccctatcacgattccgtggactcccttcgcgactccccacacagcgagaggtacgtgtcggccctgaccacgcccgcgcgcctctcgcccgtggacttccactactcgctggccacgcaggtgccaactttcgagatcacgtcccccaactcggcgcacgccgtgtcgctgccgccggcggcgcccatcagttaccgcctggccgagcagcagccgttactgcggcacccggcgccccccggcccgggacccggacccgggcccgggcccgggcccggcgcagacatgcagcgcagctatgacagctactattaccccgcggcggggcccggaccgcggcgcgggacctgcgcgctcggcggcagcctgggcagcctgcctgccagccccttccgcatccccgaggacgacgagtacgagaccacgcaggagtgcgcgcccccgccgccgccgcggccgcgcgcgcgcggtgcgtcccgcaggacgtcggcggggccccggcgctggcgccgctcgcgcctcaacgggctggcggcgcagcgcgcacgggcggcgagggactcgctgtcgctgagcagcggctcgggcggcggctcagcctcggcgtcggacgacgacgcggacgacgcggacggggcgctggcggccgagagcacacctttcctgggcctgcgtggggcgcacgacgcgctgcgctcggactcgccgccactgtgcccggcggccgacagcaggacttactactcactggacagccacagcacgcgggccagcagcagacacagccgcgggccgcccccgcgggccaagcaggactcggcgccactctagggccccgccgcgcgcccctccgccccgcccgccccactatctttaaggagaccagagaccgcctactggagagaaaggaggaaaaaagaaataaaaatatttttattttctataaaaggaaaaaagtataacaaaatgttttattttcattttagcaaaaattgtcttataatactagctaacggcaaaggcgtttttatagggaaactatttatatgtaacatcctgatttacagcttcgg

SEQ ID NO: 11658 - DNA, 3002 bp, Homo sapiens
cctccaggtcctggcgcacagggtgggagcgctgcgctgcgccgcgctgcgcatcgcggcccgcttgccgcctgccccctgccctagctgggccacctccccgggctgccggtggagggctaagaggcgctaacgttacgctgtttccggttttccagcgggctctgtttcccctcccaaggcggcggcggctgagcggcggagccccccaaatggcctggccagatgcggcaggtttgctgctcagcgctgccgccgccgccactggagaagggtcggtgcagcagctacagcgacagcagcagcagcagcagcgagaggagcagcagcagcagcagcagcagcagcgagagcggcagcagcagcaggagcagcagcaacaacagcagcatctctcgtcccgctgcgcccccagagccgcggccgcagcaacagccgcagccccgcagccccgcagcccggagagccgccgcccgttcgcgagccgcagccgccggcggcatgaggcgcgacccggcccccggcttctccatgctgctcttcggtgtgtcgctcgcctgctactcgcccagcctcaagtcagtgcaggaccaggcgtacaaggcacccgtggtggtggagggcaaggtacaggggctggtcccagccggcggctccagctccaacagcacccgagagccgcccgcctcgggtcgggtggcgttggtaaaggtgctggacaagtggccgctccggagcggggggctgcagcgcgagcaggtgatcagcgtgggctcctgtgtgccgctcgaaaggaaccagcgctacatctttttcctggagcccacggaacagcccttagtctttaagacggcctttgcccccctcgataccaacggcaaaaatctcaagaaagaggtgggcaagatcctgtgcactgactgcgccacccggcccaagttgaagaagatgaagagccagacgggacaggtgggtgagaagcaatcgctgaagtgtgaggcagcagccggtaatccccagccttcctaccgttggttcaaggatggcaaggagctcaaccgcagccgagacattcgcatcaaatatggcaacggcagaaagaactcacgactacagttcaacaaggtgaaggtggaggacgctggggagtatgtctgcgaggccgagaacatcctggggaaggacaccgtccggggccggctttacgtcaacagcgtgagcaccaccctgtcatcctggtcggggcacgcccggaagtgcaacgagacagccaagtcctattgcgtcaatggaggcgtctgctactacatcgagggcatcaaccagctctcctgcaagtgtcctgtgggatacaccggggacaggtgtcagcagttcgcaatggtcaacttctccaaagccgaggagctgtaccagaagagggtcctgaccatcacgggcatctgcgtggctctgctggtcgtgggcatcgtctgtgtggtggcctactgcaagaccaaaaaacagcggaagcagatgcacaaccacctccggcagaacatgtgcccggcccatcagaaccggagcttggccaatgggcccagccacccccggctggacccagaggagatccagatggcagattatatttccaagaacgtgccagccacagaccatgtcatcaggagagaaactgagaccaccttctctgggagccactcctgttctccttctcaccactgctccacagccacacccacctccagccacagacacgagagccacacgtggagcctggaacgttctgagagcctgacttctgactcccagtcggggatcatgctatcatcagtgggtaccagcaaatgcaacagcccagcatgtgtggaggcccgggcaaggcgggcagcagcctacaacctggaggagcggcgcagggccaccgcgccaccctatcacgattccgtggactcccttcgcgactccccacacagcgagaggtacgtgtcggccctgaccacgcccgcgcgcctctcgcccgtggacttccactactcgctggccacgcaggtgccaactttcgagatcacgtcccccaactcggcgcacgccgtgtcgctgccgccggcggcgcccatcagttaccgcctggccgagcagcagccgttactgcggcacccggcgccccccggcccgggacccggacccgggcccgggcccgggcccggcgcagacatgcagcgcagctatgacagctactattaccccgcggcggggcccggaccgcggcgcgggacctgcgcgctcggcggcagcctgggcagcctgcctgccagccccttccgcatccccgaggacgacgagtacgagaccacgcaggagtgcgcgcccccgccgccgccgcggccgcgcgcgcgcggtgcgtcccgcaggacgtcggcggggccccggcgctggcgccgctcgcgcctcaacgggctggcggcgcagcgcgcacgggcggcgagggactcgctgtcgctgagcagcggctcgggcggcggctcagcctcggcgtcggacgacgacgcggacgacgcggacggggcgctggcggccgagagcacacctttcctgggcctgcgtggggcgcacgacgcgctgcgctcggactcgccgccactgtgcccggcggccgacagcaggacttactactcactggacagccacagcacgcgggccagcagcagacacagccgcgggccgcccccgcgggccaagcaggactcggcgccactctagggccccgccgcgcgcccctccgccccgcccgccccactatctttaaggagaccagagaccgcctactggagagaaaggaggaaaaaagaaataaaaatatttttattttctataaaaggaaaaaagtataacaaaatgttttattttcattttagcaaaaattgtcttataatactagctaacggcaaaggcgtttttatagggaaactatttatatgtaacatcctgatttacagcttcgg

SEQ ID NO: 11659 - DNA, 3044 bp, Homo sapiens
cctccaggtcctggcgcacagggtgggagcgctgcgctgcgccgcgctgcgcatcgcggcccgcttgccgcctgccccctgccctagctgggccacctccccgggctgccggtggagggctaagaggcgctaacgttacgctgtttccggttttccagcgggctctgtttcccctcccaaggcggcggcggctgagcggcggagccccccaaatggcctggccagatgcggcaggtttgctgctcagcgctgccgccgccgccactggagaagggtcggtgcagcagctacagcgacagcagcagcagcagcagcgagaggagcagcagcagcagcagcagcagcagcgagagcggcagcagcagcaggagcagcagcaacaacagcagcatctctcgtcccgctgcgcccccagagccgcggccgcagcaacagccgcagccccgcagccccgcagcccggagagccgccgcccgttcgcgagccgcagccgccggcggcatgaggcgcgacccggcccccggcttctccatgctgctcttcggtgtgtcgctcgcctgctactcgcccagcctcaagtcagtgcaggaccaggcgtacaaggcacccgtggtggtggagggcaaggtacaggggctggtcccagccggcggctccagctccaacagcacccgagagccgcccgcctcgggtcgggtggcgttggtaaaggtgctggacaagtggccgctccggagcggggggctgcagcgcgagcaggtgatcagcgtgggctcctgtgtgccgctcgaaaggaaccagcgctacatctttttcctggagcccacggaacagcccttagtctttaagacggcctttgcccccctcgataccaacggcaaaaatctcaagaaagaggtgggcaagatcctgtgcactgactgcgccacccggcccaagttgaagaagatgaagagccagacgggacaggtgggtgagaagcaatcgctgaagtgtgaggcagcagccggtaatccccagccttcctaccgttggttcaaggatggcaaggagctcaaccgcagccgagacattcgcatcaaatatggcaacggcagaaagaactcacgactacagttcaacaaggtgaaggtggaggacgctggggagtatgtctgcgaggccgagaacatcctggggaaggacaccgtccggggccggctttacgtcaacagcgtgagcaccaccctgtcatcctggtcggggcacgcccggaagtgcaacgagacagccaagtcctattgcgtcaatggaggcgtctgctactacatcgagggcatcaaccagctctcctgcaaatgtccaaatggattcttcggacagagatgtttggagaaactgcctttgcgattgtacatgccagatcctaagcaaaagcaccttggatttgaattaaaggaagccgaggagctgtaccagaagagggtcctgaccatcacgggcatctgcgtggctctgctggtcgtgggcatcgtctgtgtggtggcctactgcaagaccaaaaaacagcggaagcagatgcacaaccacctccggcagaacatgtgcccggcccatcagaaccggagcttggccaatgggcccagccacccccggctggacccagaggagatccagatggcagattatatttccaagaacgtgccagccacagaccatgtcatcaggagagaaactgagaccaccttctctgggagccactcctgttctccttctcaccactgctccacagccacacccacctccagccacagacacgagagccacacgtggagcctggaacgttctgagagcctgacttctgactcccagtcggggatcatgctatcatcagtgggtaccagcaaatgcaacagcccagcatgtgtggaggcccgggcaaggcgggcagcagcctacaacctggaggagcggcgcagggccaccgcgccaccctatcacgattccgtggactcccttcgcgactccccacacagcgagaggtacgtgtcggccctgaccacgcccgcgcgcctctcgcccgtggacttccactactcgctggccacgcaggtgccaactttcgagatcacgtcccccaactcggcgcacgccgtgtcgctgccgccggcggcgcccatcagttaccgcctggccgagcagcagccgttactgcggcacccggcgccccccggcccgggacccggacccgggcccgggcccgggcccggcgcagacatgcagcgcagctatgacagctactattaccccgcggcggggcccggaccgcggcgcgggacctgcgcgctcggcggcagcctgggcagcctgcctgccagccccttccgcatccccgaggacgacgagtacgagaccacgcaggagtgcgcgcccccgccgccgccgcggccgcgcgcgcgcggtgcgtcccgcaggacgtcggcggggccccggcgctggcgccgctcgcgcctcaacgggctggcggcgcagcgcgcacgggcggcgagggactcgctgtcgctgagcagcggctcgggcggcggctcagcctcggcgtcggacgacgacgcggacgacgcggacggggcgctggcggccgagagcacacctttcctgggcctgcgtggggcgcacgacgcgctgcgctcggactcgccgccactgtgcccggcggccgacagcaggacttactactcactggacagccacagcacgcgggccagcagcagacacagccgcgggccgcccccgcgggccaagcaggactcggcgccactctagggccccgccgcgcgcccctccgccccgcccgccccactatctttaaggagaccagagaccgcctactggagagaaaggaggaaaaaagaaataaaaatatttttattttctataaaaggaaaaaagtataacaaaatgttttattttcattttagcaaaaattgtcttataatactagctaacggcaaaggcgtttttatagggaaactatttatatgtaacatcctgatttacagcttcgg

SEQ ID NO: 11660 - DNA, 5631 bp, Homo sapiens
gcggccgcggcgcggagccgagcgggcgtccgtcgccggagctgcaatgagcggcgcccggaggctgtgacctgcgcgcggcggcccgaccggggcccctgaatggcggctcgctgaggcggcggcggcggcggcggcggctcaggctcctcggggcgtggcgtggcggtgaaggggtgatgctgttcaagctcctgcagagacagacctatacctgcctgtcccacaggtatgggctctacgtgtgcttcttgggcgtcgttgtcaccatcgtctccgccttccagttcggagaggtggttctggaatggagccgagatcaataccatgttttgtttgattcctatagagacaatattgctggaaagtcctttcagaatcggctttgtctgcccatgccgattgacgttgtttacacctgggtgaatggcacagatcttgaactactgaaggaactacagcaggtcagagaacagatggaggaggagcagaaagcaatgagagaaatccttgggaaaaacacaacggaacctactaagaagagtgagaagcagttagagtgtttgctaacacactgcattaaggtgccaatgcttgtcctggacccagccctgccagccaacatcaccctgaaggacctgccatctctttatccttcttttcattctgccagtgacattttcaatgttgcaaaaccaaaaaacccttctaccaatgtctcagttgttgtttttgacagtactaaggatgttgaagatgcccactctggactgcttaaaggaaatagcagacagacagtatggaggggctacttgacaacagataaagaagtccctggattagtgctaatgcaagatttggctttcctgagtggatttccaccaacattcaaggaaacaaatcaactaaaaacaaaattgccagaaaatctttcctctaaagtcaaactgttgcagttgtattcagaggccagtgtagcgcttctaaaactgaataaccccaaggattttcaagaattgaataagcaaactaagaagaacatgaccattgatggaaaagaactgaccataagtcctgcatatttattatgggatctgagcgccatcagccagtctaagcaggatgaagacatctctgccagtcgttttgaagataacgaagaactgaggtactcattgcgatctatcgagaggcatgcaccatgggttcggaatattttcattgtcaccaacgggcagattccatcctggctgaaccttgacaatcctcgagtgacaatagtaacacaccaggatgtttttcgaaatttgagccacttgcctacctttagttcacctgctattgaaagtcacattcatcgcatcgaagggctgtcccagaagtttatttacctaaatgatgatgtcatgtttgggaaggatgtctggccagatgatttttacagtcactccaaaggccagaaggtttatttgacatggcctgtgccaaactgtgccgagggctgcccaggttcctggattaaggatggctattgtgacaaggcttgtaataattcagcctgcgattgggatggtggggattgctctggaaacagtggagggagtcgctatattgcaggaggtggaggtactgggagtattggagttggacagccctggcagtttggtggaggaataaacagtgtctcttactgtaatcagggatgtgcgaattcctggctcgctgataagttctgtgaccaagcatgcaatgtcttgtcctgtgggtttgatgctggcgactgtgggcaagatcattttcatgaattgtataaagtgatccttctcccaaaccagactcactatattattccaaaaggtgaatgcctgccttatttcagctttgcagaagtagccaaaagaggagttgaaggtgcctatagtgacaatccaataattcgacatgcttctattgccaacaagtggaaaaccatccacctcataatgcacagtggaatgaatgccaccacaatacattttaatctcacgtttcaaaatacaaacgatgaagagttcaaaatgcagataacagtggaggtggacacaagggagggaccaaaactgaattctacagcccagaagggttacgaaaatttagttagtcccataacacttcttccagaggcggaaatcctttttgaggatattcccaaagaaaaacgcttcccgaagtttaagagacatgatgttaactcaacaaggagagcccaggaagaggtgaaaattcccctggtaaatatttcactccttccaaaagacgcccagttgagtctcaataccttggatttgcaactggaacatggagacatcactttgaaaggatacaatttgtccaagtcagccttgctgagatcatttctgatgaactcacagcatgctaaaataaaaaatcaagctataataacagatgaaacaaatgacagtttggtggctccacaggaaaaacaggttcataaaagcatcttgccaaacagcttaggagtgtctgaaagattgcagaggttgacttttcctgcagtgagtgtaaaagtgaatggtcatgaccagggtcagaatccacccctggacttggagaccacagcaagatttagagtggaaactcacacccaaaaaaccataggcggaaatgtgacaaaagaaaagcccccatctctgattgttccactggaaagccagatgacaaaagaaaagaaaatcacagggaaagaaaaagagaacagtagaatggaggaaaatgctgaaaatcacataggcgttactgaagtgttacttggaagaaagctgcagcattacacagatagttacttgggctttttgccatgggagaaaaaaaagtatttccaagatcttctcgacgaagaagagtcattgaagacacaattggcatacttcactgatagcaaaaatactgggaggcaactaaaagatacatttgcagattccctcagatatgtaaataaaattctaaatagcaagtttggattcacatcgcggaaagtccctgctcacatgcctcacatgattgaccggattgttatgcaagaactgcaagatatgttccctgaagaatttgacaagacgtcatttcacaaagtgcgccattctgaggatatgcagtttgccttctcttatttttattatctcatgagtgcagtgcagccactgaatatatctcaagtctttgatgaagttgatacagatcaatctggtgtcttgtctgacagagaaatccgaacactggctaccagaattcacgaactgccgttaagtttgcaggatttgacaggtctggaacacatgctaataaattgctcaaaaatgcttcctgctgatatcacgcagctaaataatattccaccaactcaggaatcctactatgatcccaacctgccaccggtcactaaaagtctagtaacaaactgtaaaccagtaactgacaaaatccacaaagcatataaggacaaaaacaaatataggtttgaaatcatgggagaagaagaaatcgcttttaaaatgattcgtaccaacgtttctcatgtggttggccagttggatgacataagaaaaaaccctaggaagtttgtttgcctgaatgacaacattgaccacaatcataaagatgctcagacagtgaaggctgttctcagggacttctatgaatccatgttccccataccttcccaatttgaactgccaagagagtatcgaaaccgtttccttcatatgcatgagctgcaggaatggagggcttatcgagacaaattgaagttttggacccattgtgtactagcaacattgattatgtttactatattctcattttttgctgagcagttaattgcacttaagcggaagatatttcccagaaggaggatacacaaagaagctagtcccaatcgaatcagagtatagaagatcttcatttgaaaaccatctacctcagcatttactgagcattttaaaactcagcttcacagagatgtctttgtgatgtgatgcttagcagtttggcccgaagaaggaaaatatccagtaccatgctgttttgtggcatgaatatagcccactgaccaggaattatttaaccaacccactgaaaacttgtgtgttgagcagctctgaactgattttacttttaaagaatttgctcatggacctgtcatcctttttataaaaaggctcactgacaagagacagctgttaatttcccacagcaatcattgcagactaactttattaggagaagcctatgccagctgggagtgattgctaagaggctccagtctttgcattccaaagccttttgctaaagttttgcactttttttttttcatttcccatttttaagtagttactaagttaactagttattcttgcttctgagtataacgaattgggatgtctaaacctatttttatagatgttatttaaataatgcagcaatatcacctcttattgacaatacctaaattatgagttttattaatatttaagactgtaaatggtcttaaaccactaactactgaagagctcaatgattgacatctgaaatgctttgtaattattgacttcagcccctaagaatgctatgatttcacgtgcaggtctaatttcaaagggctagagttagtactacttaccagatgtaattatgttttggaaatgtacatattcaaacagaagtgcctcattttagaaatgagtagtgctgatggcactggcacattacagtggtgtcttgtttaatactcattggtatattccagtagctatctctctcagttggtttttgatagaacagaggccagcaaactttctttgtaaaaggctggttagtaaattattgcaggccacctgtgtctttgtcatacattcttcttgctgttgtttagtttgttttttttcaaacaaccctctaaaaatgtaaaaaccatgtttagcttgcagctgtacaaaaactgcccaccagccagatgtgaccctcaggccatcatttgccaatcactgagaattagtttttgttgttgttgttgttgttgtttttgagacagagtctctctctgttgcccaggctggagtgcagtggcgcaatctcagctcactgcaacctccgcctcccgggttcaagcagttctgtctcagccttctgagtagctgggactacaggtgcatgccaccacaccctgctaatttttgtatttttagtagagacgggggttccaccatattggtcaggcttatcttgaactcctgacctcaggtgatccacctgcctctgcctcccaaagtgctgagattacaggcataagccagtgcacccagccgagaattagtatttttatgtatggttaaaccttggcgtctagccatattttatgtcataatacaatggatttgtgaagagcagattccatgagtaactctgacaggtattttagatcatgatctcaacaatattcttccaaaatggcatacatcttttgtacaaagaacttgaaatgtaaatactgtgtttgtgctgtaagagttgtgtatttcaaaaactgaaatctcataaaaagttaaatttttgtctgaaaaaaaaaaaaaaaaa

SEQ ID NO: 11661 - DNA, 1830 bp, Homo sapiens
agccactctgagcagaactgacagcatgaaggcactcctggccctgccgctgctgctgcttctctccacgcccccgtgtgccccccaggtctccgggatccgaggagatgctctggagaggttttgccttcagcaacccctggactgtgacgacatctatgcccagggctaccagtcagacggcgtgtacctcatctacccctcgggccccagtgtgcctgtgcccgtcttctgtgacatgaccaccgagggcgggaagtggacggttttccagaagagattcaatggctcagtaagtttcttccgcggctggaatgactacaagctgggcttcggccgtgctgatggagagtactggctggggctgcagaacatgcacctcctgacactgaagcagaagtatgagctgcgagtggacttggaggactttgagaacaacacggcctatgccaagtacgctgacttctccatctccccgaacgcggtcagcgcagaggaggatggctacaccctctttgtggcaggctttgaggatggcggggcaggtgactccctgtcctaccacagtggccagaagttctctaccttcgaccgggaccaggacctctttgtgcagaactgcgcagctctctcctcaggagccttctggttccgcagctgccactttgccaacctcaatggcttctacctaggtggctcccacctctcttatgccaatggcatcaactgggcccagtggaagggcttctactactccctcaaacgcactgagatgaaaatccgccgggcctgaagggctggccccctcaggcacctttcctcccctggacacccatggtctccatgagtgctccctctgctgcccctgatgcatgcttctgctgattcccgagcaccaactccttacaagggggccttgtggctctcagccatgccacatccctgtcacacacccagggcatccattcctaagccagacccggctcccctacacctgaagttacactgccagcagttccccaggcctcttccgagaggcacatggttctagcctggacctggctgggctccatgagaatgagttgcctccaccctgtcccaacagctgacagccaggagccactctcccagctgcaggcctttgtggtccatcttgtcctgcttcctcactgtggacccctgtctgggccaccctagtgtgctaagctgagcagtgcagtgtgaacagggcccatggtgtattctaggccacagcccagcactcctctgggctgctctcaaaccatgtcccatcttcagcatccctcccaccaacttactcccctgtggtgagtaccgtggaaccccagcccacctcactatcatactcagcttcccctgatggcccatcccagcccctgaagctctatgccaagaacacagctaccgcacaccaccctgaaacagccacagccaaggtaggcatgcatatgaggtcttccccataccctctgggtgttgagaggtttagccacatgagggagcagaggacaatctctgcagggctgggagtgggtagggactgaaggtctcaataaaccttcagaacctgaatgaactggcttcatacacacaaacatatttgtttatcccccaaatgtaggcacctggctcctccttgctcccctgctgatggtgtcctaccccgaactccaaaaattacacctggagtcaggtgcagaagggaaccttgtatttcacaggcctcattttgatggcaaaaagacagtgtaataataacataataataataaaaatataatactgaaaaggaaaaaaaaaaaaaaaaaa

SEQ ID NO: 11662 - DNA, 2390 bp, Homo sapiens
agagccttcgtttgccaagtcgcctccagaccgcagacatgaaacttgtcttcctcgtcctgctgttcctcggggccctcggactgtgtctggctggccgtaggaggagtgttcagtggtgcgccgtatcccaacccgaggccacaaaatgcttccaatggcaaaggaatatgagaaaagtgcgtggccctcctgtcagctgcataaagagagactcccccatccagtgtatccaggccattgcggaaaacagggccgatgctgtgacccttgatggtggtttcatatacgaggcaggcctggccccctacaaactgcgacctgtagcggcggaagtctacgggaccgaaagacagccacgaactcactattatgccgtggctgtggtgaagaagggcggcagctttcagctgaacgaactgcaaggtctgaagtcctgccacacaggccttcgcaggaccgctggatggaatgtccctatagggacacttcgtccattcttgaattggacgggtccacctgagcccattgaggcagctgtggccaggttcttctcagccagctgtgttcccggtgcagataaaggacagttccccaacctgtgtcgcctgtgtgcggggacaggggaaaacaaatgtgccttctcctcccaggaaccgtacttcagctactctggtgccttcaagtgtctgagagacggggctggagacgtggcttttatcagagagagcacagtgtttgaggacctgtcagacgaggctgaaagggacgagtatgagttactctgcccagacaacactcggaagccagtggacaagttcaaagactgccatctggcccgggtcccttctcatgccgttgtggcacgaagtgtgaatggcaaggaggatgccatctggaatcttctccgccaggcacaggaaaagtttggaaaggacaagtcaccgaaattccagctctttggctcccctagtgggcagaaagatctgctgttcaaggactctgccattgggttttcgagggtgcccccgaggatagattctgggctgtaccttggctccggctacttcactgccatccagaacttgaggaaaagtgaggaggaagtggctgcccggcgtgcgcgggtcgtgtggtgtgcggtgggcgagcaggagctgcgcaagtgtaaccagtggagtggcttgagcgaaggcagcgtgacctgctcctcggcctccaccacagaggactgcatcgccctggtgctgaaaggagaagctgatgccatgagtttggatggaggatatgtgtacactgcaggcaaatgtggtttggtgcctgtcctggcagagaactacaaatcccaacaaagcagtgaccctgatcctaactgtgtggatagacctgtggaaggatatcttgctgtggcggtggttaggagatcagacactagccttacctggaactctgtgaaaggcaagaagtcctgccacaccgccgtggacaggactgcaggctggaatatccccatgggcctgctcttcaaccagacgggctcctgcaaatttgatgaatatttcagtcaaagctgtgcccctgggtctgacccgagatctaatctctgtgctctgtgtattggcgacgagcagggtgagaataagtgcgtgcccaacagcaacgagagatactacggctacactggggctttccggtgcctggctgagaatgctggagacgttgcatttgtgaaagatgtcactgtcttgcagaacactgatggaaataacaatgaggcatgggctaaggatttgaagctggcagactttgcgctgctgtgcctcgatggcaaacggaagcctgtgactgaggctagaagctgccatcttgccatggccccgaatcatgccgtggtgtctcggatggataaggtggaacgcctgaaacaggtgttgctccaccaacaggctaaatttgggagaaatggatctgactgcccggacaagttttgcttattccagtctgaaaccaaaaaccttctgttcaatgacaacactgagtgtctggccagactccatggcaaaacaacatatgaaaaatatttgggaccacagtatgtcgcaggcattactaatctgaaaaagtgctcaacctcccccctcctggaagcctgtgaattcctcaggaagtaaaaccgaagaagatggcccagctccccaagaaagcctcagccattcactgcccccagctcttctccccaggtgtgttggggccttggcctcccctgctgaaggtggggattgcccatccatctgcttacaattccctgctgtcgtcttagcaagaagtaaaatgagaaattttgttgatattctctccttaaaaaaaaaaaaaaaaaaaaaaaaaaaaaa

SEQ ID NO: 11663 - DNA, 1857 bp, Homo sapiens
ctgatccgggccgggcgggaagtcgggtcccgaggctccggctcggcagaccgggcggaaagcagccgagcggccatggagctgtgcgggctggggctgccccggccgcccatgctgctggcgctgctgttggcgacactgctggcggcgatgttggcgctgctgactcaggtggcgctggtggtgcaggtggcggaggcggctcgggccccgagcgtctcggccaagccggggccggcgctgtggcccctgccgctctcggtgaagatgaccccgaacctgctgcatctcgccccggagaacttctacatcagccacagccccaattccacggcgggcccctcctgcaccctgctggaggaagcgtttcgacgatatcatggctatatttttggtttctacaagtggcatcatgaacctgctgaattccaggctaaaacccaggttcagcaacttcttgtctcaatcacccttcagtcagagtgtgatgctttccccaacatatcttcagatgagtcttatactttacttgtgaaagaaccagtggctgtccttaaggccaacagagtttggggagcattacgaggtttagagacctttagccagttagtttatcaagattcttatggaactttcaccatcaatgaatccaccattattgattctccaaggttttctcacagaggaattttgattgatacatccagacattatctgccagttaagattattcttaaaactctggatgccatggcttttaataagtttaatgttcttcactggcacatagttgatgaccagtctttcccatatcagagcatcacttttcctgagttaagcaataaaggaagctattctttgtctcatgtttatacaccaaatgatgtccgtatggtgattgaatatgccagattacgaggaattcgagtcctgccagaatttgatacccctgggcatacactatcttggggaaaaggtcagaaagacctcctgactccatgttacagtagacaaaacaagttggactcttttggacctataaaccctactctgaatacaacatacagcttccttactacatttttcaaagaaattagtgaggtgtttccagatcaattcattcatttgggaggagatgaagtggaatttaaatgttgggaatcaaatccaaaaattcaagatttcatgaggcaaaaaggctttggcacagattttaagaaactagaatctttctacattcaaaaggttttggatattattgcaaccataaacaagggatccattgtctggcaggaggtttttgatgataaagcaaagcttgcgccgggcacaatagttgaagtatggaaagacagcgcatatcctgaggaactcagtagagtcacagcatctggcttccctgtaatcctttctgctccttggtacttagatttgattagctatggacaagattggaggaaatactataaagtggaacctcttgattttggcggtactcagaaacagaaacaacttttcattggtggagaagcttgtctatggggagaatatgtggatgcaactaacctcactccaagattatggcctcgggcaagtgctgttggtgagagactctggagttccaaagatgtcagagatatggatgacgcctatgacagactgacaaggcaccgctgcaggatggtcgaacgtggaatagctgcacaacctctttatgctggatattgtaaccatgagaacatgtaaaaaatggaggggaaaaaggccacagcaatctgtactacaatcaactttattttgaaatcatgtaaaataagatattagacttttttgaataaaatatttttattgattgaa

SEQ ID NO: 11664 - DNA, 2767 bp, Homo sapiens
gggcgggcgcattgcagactgcggagtcagacggtgctatgtacgccctcttcctcctggccagcctcctgggcgcggctctagccggcccggtccttggactgaaagaatgcaccaggggctcggcagtgtggtgccagaatgtgaagacggcgtccgactgcggggcagtgaagcactgcctgcagaccgtttggaacaagccaacagtgaaatcccttccctgcgacatatgcaaagacgttgtcaccgcagctggtgatatgctgaaggacaatgccactgaggaggagatccttgtttacttggagaagacctgtgactggcttccgaaaccgaacatgtctgcttcatgcaaggagatagtggactcctacctccctgtcatcctggacatcattaaaggagaaatgagccgtcctggggaggtgtgctctgctctcaacctctgcgagtctctccagaagcacctagcagagctgaatcaccagaagcagctggagtccaataagatcccagagctggacatgactgaggtggtggcccccttcatggccaacatccctctcctcctctaccctcaggacggcccccgcagcaagccccagccaaaggataatggggacgtttgccaggactgcattcagatggtgactgacatccagactgctgtacggaccaactccacctttgtccaggccttggtggaacatgtcaaggaggagtgtgaccgcctgggccctggcatggccgacatatgcaagaactatatcagccagtattctgaaattgctatccagatgatgatgcacatgcaacccaaggagatctgtgcgctggttgggttctgtgatgaggtgaaagagatgcccatgcagactctggtccccgccaaagtggcctccaagaatgtcatccctgccctggaactggtggagcccattaagaagcacgaggtcccagcaaagtctgatgtttactgtgaggtgtgtgaattcctggtgaaggaggtgaccaagctgattgacaacaacaagactgagaaagaaatactcgacgcttttgacaaaatgtgctcgaagctgccgaagtccctgtcggaagagtgccaggaggtggtggacacgtacggcagctccatcctgtccatcctgctggaggaggtcagccctgagctggtgtgcagcatgctgcacctctgctctggcacgcggctgcctgcactgaccgttcacgtgactcagccaaaggacggtggcttctgcgaagtgtgcaagaagctggtgggttatttggatcgcaacctggagaaaaacagcaccaagcaggagatcctggctgctcttgagaaaggctgcagcttcctgccagacccttaccagaagcagtgtgatcagtttgtggcagagtacgagcccgtgctgatcgagatcctggtggaggtgatggatccttccttcgtgtgcttgaaaattggagcctgcccctcggcccataagcccttgttgggaactgagaagtgtatatggggcccaagctactggtgccagaacacagagacagcagcccagtgcaatgctgtcgagcattgcaaacgccatgtgtggaactaggaggaggaatattccatcttggcagaaaccacagcattggtttttttctacttgtgtgtctgggggaatgaacgcacagatctgtttgactttgttataaaaatagggctcccccacctcccccatttctgtgtcctttattgtagcattgctgtctgcaagggagcccctagcccctagcccctggcagacatagctgcttcagtgccccttttctctctgctagatggatgttgatgcactggaggtcttttagcctgcccttgcatggcgcctgctggaggaggagagagctctgctggcatgagccacagtttcttgactggaggccatcaaccctcttggttgaggccttgttctgagccctgacatgtgcttgggcactggtgggcctgggcttctgaggtggcctcctgccctgatcagggaccctccccgctttcctgggcctctcagttgaacaaagcagcaaaacaaaggcagttttatatgaaagattagaagcctggaataatcaggctttttaaatgatgtaattcccactgtaatagcatagggattttggaagcagctgctggtggcttgggacatcagtggggccaagggttctctgtccctggttcaactgtgatttggctttcccgtgtctttcctggtgatgccttgtttggggttctgtgggtttgggtgggaagagggccatctgcctgaatgtaacctgctagctctccgaagccctgcgggcctggcttgtgtgagcgtgtggacagtggtggccgcgctgtgcctgctcgtgttgcctacatgtccctggctgttgaggcgctgcttcagcctgcacccctcccttgtctcatagatgctccttttgaccttttcaaataaatatggatggcgagctcctaggcctctggcttcctggtagagggcggcatgccgaagggtctgtctgggtgtggattggatgctgggggtgtgggggttggaagctgtctgtggcccacttgggcacccacgcttctgtccacttctggttgccaggagacagcaagcaaagccagcaggacatgaagttgctattaaatggacttcgtgatttttgttttgcactaaagtttctgtgatttaacaataaaattctgttagcccccccg

SEQ ID NO: 11665 - DNA, 4552 bp, Homo sapiens
agcgcccgccgcgtccggggccggctggtgcgcgagacgccgccgagagttgtgaagggcgcgggtggggggcgctgccggcctcgtgggtacgttcgtgccgcgtctgtcccagagctggggccgcaggagcggaggcaagaggggcactatggcagacaaagttaggaggcagaggccgaggaggcgagtctgttgggccttggtggctgtgctcttggcagacctgttggcactgagtgatacactggcagtgatgtctgtggacctgggcagtgagtccatgaaggtggccattgtcaaacctggagtgcccatggaaattgtcttgaataaggaatctcggaggaaaacaccggtgatcgtgaccctgaaagaaaatgaaagattctttggagacagtgcagcaagcatggcgattaagaatccaaaggctacgctacgttacttccagcacctcctggggaagcaggcagataacccccatgtagctctttaccaggcccgcttcccggagcacgagctgactttcgacccacagaggcagactgtgcactttcagatcagctcgcagctgcagttctcacctgaggaagtgttgggcatggttctcaattattctcgttctctagctgaagattttgcagagcagcccatcaaggatgcagtgatcaccgtgccagtcttcttcaaccaggccgagcgccgagctgtgctgcaggctgctcgtatggctggcctcaaagtgctgcagctcatcaatgacaacaccgccactgccctcagctatggtgtcttccgccggaaagatattaacaccactgcccagaatatcatgttctatgacatgggctcaggcagcaccgtatgcaccattgtgacctaccagatggtgaagactaaggaagctgggatgcagccacagctgcagatccggggagtaggatttgaccgtaccctggggggcctggagatggagctccggcttcgagaacgcctggctgggcttttcaatgagcagcgcaagggtcagagagcaaaggatgtgcgggagaacccgcgtgccatggccaagctgctgcgtgaggctaatcggctcaaaaccgtcctcagtgccaacgctgaccacatggcacagattgaaggcctgatggatgatgtggacttcaaggcaaaagtgactcgtgtggaatttgaggagttgtgtgcagacttgtttgagcgggtgcctgggcctgtacagcaggccctccagagtgccgaaatgagtctggatgagattgagcaggtgatcctggtgggtggggccactcgggtccccagagttcaggaggtgctgctgaaggccgtgggcaaggaggagctggggaagaacatcaatgcagatgaagcagccgccatgggggcagtgtaccaggcagctgcgctcagcaaagcctttaaagtgaagccatttgtcgtccgagatgcagtggtctaccccatcctggtggagttcacgagggaggtggaggaggagcctgggattcacagcctgaagcacaataaacgggtactcttctctcggatggggccctaccctcaacgcaaagtcatcacctttaaccgctacagccatgatttcaacttccacatcaactacggcgacctgggcttcctggggcctgaagatcttcgggtatttggctcccagaatctgaccacagtgaagctaaaaggggtgggtgacagcttcaagaagtatcctgactacgagtccaagggcatcaaggctcacttcaacctggatgagagtggcgtgctcagtctagacagggtggagtctgtatttgagacactggtagaggacagcgcagaagaggaatctactctcaccaaacttggcaacaccatttccagcctgtttggaggcggtaccacaccagatgccaaggagaatggtactgatactgtccaggaggaagaggagagccctgcagaggggagcaaggacgagcctggggagcaggtggagctcaaggaggaagctgaggccccagtggaggatggctctcagcccccaccccctgaacctaagggagatgcaacccctgagggagaaaaggccacagaaaaagaaaatggggacaagtctgaggcccagaaaccaagtgagaaggcagaggcagggcctgagggcgtcgctccagccccagagggagagaagaagcagaagcccgccaggaagcggcgaatggtagaggagatcggggtggagctggttgttctggacctgcctgacttgccagaggataagctggctcagtcggtgcagaaacttcaggacttgacactccgagacctggagaagcaggaacgggaaaaagctgccaacagcttggaagcgttcatatttgagacccaggacaagctgtaccagcccgagtaccaggaagtgtccacagaggagcagcgtgaggagatctctgggaagctcagcgccgcatccacctggctggaggatgagggtgttggagccaccacagtgatgttgaaggagaagctggctgagctgaggaagctgtgccaagggctgttttttcgggtagaggagcgcaagaagtggcccgaacggctgtctgccctcgataatctcctcaaccattccagcatgttcctcaagggggcccggctcatcccagagatggaccagatcttcactgaggtggagatgacaacgttagagaaagtcatcaatgagacctgggcctggaagaatgcaactctggccgagcaggctaagctgcccgccacagagaagcctgtgttgctctcaaaagacattgaagctaagatgatggccctggaccgagaggtgcagtatctgctcaataaggccaagtttaccaagccccggccccggcctaaggacaagaatgggacccgggcagagccacccctcaatgccagtgccagtgaccagggggagaaggtcatccctccagcaggccagactgaagatgcagagcccatttcagaacctgagaaagtagagactggatccgagccaggagacactgagcctttggagttaggaggtcctggagcagaacctgaacagaaagaacaatcgacaggacagaagcggcctttgaagaacgacgaactataacccccacctctgttttccccattcatctccacccccttcccccaccacttctatttatttaacatcgagggttgggggaggggttggtcctgccctcggctggagttcctttctcacccctgtgatttggaggtgtggagaaggggaagggagggacagctcactggttccttctgcagtacctctgtggttaaaaatggaaactgttctcctccccagccccactccctgttccctacccatataggccctaaatttgggaaaaatcactattaatttctgaatcctttgcctgtgggtaggaagagaatggctgccagtggctgatgggtcccggtgatgggaagggtatcaggttgctggggagtttccactcttctctggtgattgttccttccctcccttcctctcccaccatgcgatgagcatcctttcaggccagtgtctgcagagcctcagttaccaggtttggtttctgagtgcctatctgtgctctttcctccctctgcgggcttctcttgctctgagcctcccttccccattcccatgcagctcctttccccctgggtttccttggcttcctgcagcaaattgggcagttctctgccccttgcctaaaagcctgtacctctggattggcggaagtaaatctggaaggattctcactcgtatttcccacccctagtggccagaggagggaggggcacagtgaagaagggagcccaccacctctccgaagaggaaagccacgtagagtggttggcatggggtgccagcatcgtgcaagctctgtcataatctgcatcttcccagcagcctggtaccccaggttcctgtaactccctgcctcctcctctcttctgctgttctgctcctcccagacagagcctttccctcaccccctgaccccctgggctgaccaaaatgtgctttctactgtgagtccctatcccaagatcctggggaaaggagagaccatggtgtgaatgtagagatgccacctccctctctctgaggcaggcctgtggatgaaggaggagggtcagggctggccttcctctgtgcatcactctgctaggttgggggcccccgacccaccatacctacgcctagggagcccgtcctccagtattccgtctgtagcaggagctagggctgctgcctcagctccaagacaagaatgaacctggctgtgtcagtcattttgtcttttcctttttttttttttgccacattggcagagatgggacctaagggtcccacccctcaccccacccccacctcttctgtatgtttgaattctttcagtagctgttgatgctggttggacaggtttgagtcaaattgtactttgctccattgttaattgagaaactgtttcaataaaatattcttttctac

SEQ ID NO: 11666 - DNA, 3394 bp, Homo sapiens
gctgtgccgcaccgaggcgagcaggagcagggaacaggtgtttaaaattatccaactgccatagagctaaattcttttttggaaaattgaaccgaacttctactgaatacaagatgaaaatgtggttgctggtcagtcatcttgtgataatatctattactacctgtttagcagtttctgaggaagacaaaggatttggaccaatttttgaagagcagccaatcaataccatttatccagaggaatcactggaaggaaaagtctcactcaactgtagggcacgagccagccctttcccggtttacaaatggagaatgaataatggggacgttgatctcacaagtgatcgatacagtatggtaggaggaaaccttgttatcaacaaccctgacaaacagaaagatgctggaatatactactgtttagcatctaataactacgggatggtcagaagcactgaagcaaccctgagctttggatatcttgatcctttcccacctgaggaacgtcctgaggtcagagtaaaagaagggaaaggaatggtgcttctctgtgaccccccataccattttccagatgatcttagctatcgctggcttctaaatgaatttcctgtatttatcacaatggataaacggcgatttgtgtctcagacaaatggcaatctctacattgcaaatgttgaggcttccgacaaaggcaattattcctgctttgtttccagtccttctattacaaagagcgtgttcagcaaattcatcccactcattccaatacctgaacgaacaacaaaaccatatcctgctgatattgtagttcagttcaaggatgtatatgcattgatgggccaaaatgtgaccttagaatgttttgcacttggaaatcctgttccggatatccgatggcggaaggttctagaaccaatgccaagcactgctgagattagcacctctggggctgttcttaagatcttcaatattcagctagaagatgaaggcatctatgaatgtgaggctgagaacattagaggaaaggataaacatcaagcaagaatttatgttcaagcattccctgagtgggtagaacacatcaatgacacagaggtggacataggcagtgatctctactggccttgtgtggccacaggaaagcccatccctacaatccgatggttgaaaaatggatatgcgtatcataaaggggaattaagactgtatgatgtgacttttgaaaatgccggaatgtatcagtgcatagctgaaaacacatatggagccatttatgcaaatgctgagttgaagatcttggcgttggctccaacttttgaaatgaatcctatgaagaaaaagatcctggctgctaaaggtggaagggtgataattgaatgcaaacctaaagctgcaccgaaaccaaagttttcatggagtaaagggacagagtggcttgtcaatagcagcagaatactcatttgggaagatggtagcttggaaatcaacaacattacaaggaatgatggaggtatctatacatgctttgcagaaaataacagagggaaagctaatagcactggaacccttgttatcacagatcctacgcgaattatattggccccaattaatgccgatatcacagttggagaaaacgccaccatgcagtgtgctgcgtcctttgatcctgccttggatctcacatttgtttggtccttcaatggctatgtgatcgattttaacaaagagaatattcactaccagaggaattttatgctggattccaatggggaattactaatccgaaatgcgcagctgaaacatgctggaagatacacatgcactgcccagacaattgtggacaattcttcagcttcagctgaccttgtagtgagaggccctccaggccctccaggtggtctgagaatagaagacattagagccacttctgtggcacttacttggagccgtggttcagacaatcatagtcctatttctaaatacactatccagaccaagactattctttcagatgactggaaagatgcaaagacagatcccccaattattgaaggaaatatggaggcagcaagagcagtggacttaatcccatggatggagtatgaattccgcgtggtagcaaccaatacactgggtagaggagagcccagtataccatctaacagaattaaaacagacggtgctgcaccaaatgtggctccttcagatgtaggaggtggaggtggaagaaacagagagctgaccataacatgggcgcctttgtcaagagaataccactatggcaacaattttggttacatagtggcatttaagccatttgatggagaagaatggaaaaaagtcacagttactaatcctgatactggccgatatgtccataaagatgaaaccatgagcccttccactgcatttcaagttaaagtcaaggccttcaacaacaaaggagatggaccttacagcctagtagcagtcattaattcagcacaagacgctcccagtgaagccccaacagaagtaggtgtaaaagtcttatcatcttctgagatatctgttcattgggaacatgttttagaaaaaatagtggaaagctatcagattcggtattgggctgcccatgacaaagaagaagctgcaaacagagttcaagtcaccagccaagagtactcggccaggctcgagaaccttctgccagacacccagtattttatagaagtcggggcctgcaatagtgcagggtgtggacctccaagtgacatgattgaggctttcaccaagaaagcacctcctagccagcctccaaggatcatcagttcagtaaggtctggttcacgctatataatcacctgggatcatgtcgttgcactatcaaatgaatctacagtgacgggatataaggtactctacagacctgatggccagcatgatggcaagctgtattcaactcacaaacactccatagaagtcccaatccccagagatggagaatacgttgtggaggttcgcgcgcacagtgatggaggagatggagtggtgtctcaagtcaaaatttcaggtgcacccaccctatccccaagtcttctcggcttactgctgcctgcctttggcatccttgtctacttggaattctgaatgtgttgtgacagctgctgttcccatcccagctcagaagacacccttcaaccctgggatgaccacaattccttccaatttctgcggctccatcctaagccaaataaattatactttaacaaactattcaactgatttacaacacacatgatgactgaggcattcgggaaccccttcatccaaaagaataaacttttaaatggatataaatgatttttaactcgttccaatatgccttataaaccacttaacctgat

SEQ ID NO: 11667 - DNA, 3427 bp, Homo sapiens
gctgtgccgcaccgaggcgagcaggagcagggaacaggtgtttaaaattatccaactgccatagagctaaattcttttttggaaaattgaaccgaacttctactgaatacaagatgaaaatgtggttgctggtcagtcatcttgtgataatatctattactacctgtttagcagagtttacatggtatagaagatatggtcatggagtttctgaggaagacaaaggatttggaccaatttttgaagagcagccaatcaataccatttatccagaggaatcactggaaggaaaagtctcactcaactgtagggcacgagccagccctttcccggtttacaaatggagaatgaataatggggacgttgatctcacaagtgatcgatacagtatggtaggaggaaaccttgttatcaacaaccctgacaaacagaaagatgctggaatatactactgtttagcatctaataactacgggatggtcagaagcactgaagcaaccctgagctttggatatcttgatcctttcccacctgaggaacgtcctgaggtcagagtaaaagaagggaaaggaatggtgcttctctgtgaccccccataccattttccagatgatcttagctatcgctggcttctaaatgaatttcctgtatttatcacaatggataaacggcgatttgtgtctcagacaaatggcaatctctacattgcaaatgttgaggcttccgacaaaggcaattattcctgctttgtttccagtccttctattacaaagagcgtgttcagcaaattcatcccactcattccaatacctgaacgaacaacaaaaccatatcctgctgatattgtagttcagttcaaggatgtatatgcattgatgggccaaaatgtgaccttagaatgttttgcacttggaaatcctgttccggatatccgatggcggaaggttctagaaccaatgccaagcactgctgagattagcacctctggggctgttcttaagatcttcaatattcagctagaagatgaaggcatctatgaatgtgaggctgagaacattagaggaaaggataaacatcaagcaagaatttatgttcaagcattccctgagtgggtagaacacatcaatgacacagaggtggacataggcagtgatctctactggccttgtgtggccacaggaaagcccatccctacaatccgatggttgaaaaatggatatgcgtatcataaaggggaattaagactgtatgatgtgacttttgaaaatgccggaatgtatcagtgcatagctgaaaacacatatggagccatttatgcaaatgctgagttgaagatcttggcgttggctccaacttttgaaatgaatcctatgaagaaaaagatcctggctgctaaaggtggaagggtgataattgaatgcaaacctaaagctgcaccgaaaccaaagttttcatggagtaaagggacagagtggcttgtcaatagcagcagaatactcatttgggaagatggtagcttggaaatcaacaacattacaaggaatgatggaggtatctatacatgctttgcagaaaataacagagggaaagctaatagcactggaacccttgttatcacagatcctacgcgaattatattggccccaattaatgccgatatcacagttggagaaaacgccaccatgcagtgtgctgcgtcctttgatcctgccttggatctcacatttgtttggtccttcaatggctatgtgatcgattttaacaaagagaatattcactaccagaggaattttatgctggattccaatggggaattactaatccgaaatgcgcagctgaaacatgctggaagatacacatgcactgcccagacaattgtggacaattcttcagcttcagctgaccttgtagtgagaggccctccaggccctccaggtggtctgagaatagaagacattagagccacttctgtggcacttacttggagccgtggttcagacaatcatagtcctatttctaaatacactatccagaccaagactattctttcagatgactggaaagatgcaaagacagatcccccaattattgaaggaaatatggaggcagcaagagcagtggacttaatcccatggatggagtatgaattccgcgtggtagcaaccaatacactgggtagaggagagcccagtataccatctaacagaattaaaacagacggtgctgcaccaaatgtggctccttcagatgtaggaggtggaggtggaagaaacagagagctgaccataacatgggcgcctttgtcaagagaataccactatggcaacaattttggttacatagtggcatttaagccatttgatggagaagaatggaaaaaagtcacagttactaatcctgatactggccgatatgtccataaagatgaaaccatgagcccttccactgcatttcaagttaaagtcaaggccttcaacaacaaaggagatggaccttacagcctagtagcagtcattaattcagcacaagacgctcccagtgaagccccaacagaagtaggtgtaaaagtcttatcatcttctgagatatctgttcattgggaacatgttttagaaaaaatagtggaaagctatcagattcggtattgggctgcccatgacaaagaagaagctgcaaacagagttcaagtcaccagccaagagtactcggccaggctcgagaaccttctgccagacacccagtattttatagaagtcggggcctgcaatagtgcagggtgtggacctccaagtgacatgattgaggctttcaccaagaaagcacctcctagccagcctccaaggatcatcagttcagtaaggtctggttcacgctatataatcacctgggatcatgtcgttgcactatcaaatgaatctacagtgacgggatataaggtactctacagacctgatggccagcatgatggcaagctgtattcaactcacaaacactccatagaagtcccaatccccagagatggagaatacgttgtggaggttcgcgcgcacagtgatggaggagatggagtggtgtctcaagtcaaaatttcaggtgcacccaccctatccccaagtcttctcggcttactgctgcctgcctttggcatccttgtctacttggaattctgaatgtgttgtgacagctgctgttcccatcccagctcagaagacacccttcaaccctgggatgaccacaattccttccaatttctgcggctccatcctaagccaaataaattatactttaacaaactattcaactgatttacaacacacatgatgactgaggcattcgggaaccccttcatccaaaagaataaacttttaaatggatataaatgatttttaactcgttccaatatgccttataaaccacttaacctgat

SEQ ID NO: 11668 - DNA, 2455 bp, Homo sapiens
gaattcgggcgggcttcttcgctgccgacgtacgacgagtggccgggctcttgcgtctggtaacgcgctgtctctaacgccagcgccgtctcgcgcgcactgcgcacagaccacccgcagacgcccggcagtccgcaggcccaaacgcgcacgcgaccccgctctccgcaccgtacccggccgcctcggcatggcgccccgcagcgcccggcgacccctgctgctgctactgcctgttgctgctgctcggcctcatgcattgtcgtcagcagccatgtttatggtgaaaaatggcaacgggaccgcgtgcataatggccaacttctctgctgccttctcagtgaactacgacaccaagagtggccccaagaacatgacctttgacctgccatcagatgccacagtggtgctcaaccgcagctcctgtggaaaagagaacacttctgaccccagtctcgtgattgcttttggaagaggacatacactcactctcaatttcacgagaaatgcaacacgttacagcgttcagctcatgagttttgtttataacttgtcagacacacaccttttccccaatgcgagctccaaagaaatcaagactgtggaatctataactgacatcagggcagatatagataaaaaatacagatgtgttagtggcacccaggtccacatgaacaacgtgaccgtaacgctccatgatgccaccatccaggcgtacctttccaacagcagcttcagcaggggagagacacgctgtgaacaagacaggccttccccaaccacagcgccccctgcgccacccagcccctcgccctcacccgtgcccaagagcccctctgtggacaagtacaacgtgagcggcaccaacgggacctgcctgctggccagcatggggctgcagctgaacctcacctatgagaggaaggacaacacgacggtgacaaggcttctcaacatcaaccccaacaagacctcggccagcgggagctgcggcgcccacctggtgactctggagctgcacagcgagggcaccaccgtcctgctcttccagttcgggatgaatgcaagttctagccggtttttcctacaaggaatccagttgaatacaattcttcctgacgccagagaccctgcctttaaagctgccaacggctccctgcgagcgctgcaggccacagtcggcaattcctacaagtgcaacgcggaggagcacgtccgtgtcacgaaggcgttttcagtcaatatattcaaagtgtgggtccaggctttcaaggtggaaggtggccagtttggctctgtggaggagtgtctgctggacgagaacagcacgctgatccccatcgctgtgggtggtgccctggcggggctggtcctcatcgtcctcatcgcctacctcgtcggcaggaagaggagtcacgcaggctaccagactatctagcctggtgcacgcaggcacagcagctgcaggggcctctgttcctttctctgggcttagggtcctgtcgaaggggaggcacactttctgcaaacgtttctcaaatctgcttcatccaatgtgaagttcatcttgcagcatttactatgcacaacagagtaactatcgaaatgacggtgttaattttgctaactgggttaaatattttgctaactggttaaacattaatatttaccaaagtaggattttgagggtgggggtgctctctctgagggggtgggggtgccgctgtctctgaggggtgggggtgccgctgtctgaggggtgggggtgccgctctctctgagggggtgggggtgccgctttctctgagggggtgggggtgccgctctctctgagggggtgggggtgctgctctctccgaggggtggaatgccgctgtctctgaggggtgggggtgccgctctaaattggctccatatcattgagtttagggttctggtgtttggtttcttcattctttactgcactcagatttaagccttacaaagggaaacctctggccgtcacacgtaggacgcatgaaggtcactcgtgtgaggctgacatgctcacacattacaacagtagagagggaaaatcctaagacagaggaactccagagatgagtgtctggagcggcttcagttcagctttaaaggccaggacgcgcgacacgtggctggcggcctcgttccagtggcggcacgtccttggcgtctctaatgtctgcagctcaagggctggcacttttttaaatataaaaatggtgttatttttatttttttttgtaaagtgatttttggtcttctgttgacattcgggtgatcctgttctgcgctgtgtacaatgtgagatcggtgcgttctcctgatgttttgccgtggcttggggattgtacacgggaccagctcacgtaatgcattgcctgtaacaatgtaataaaaagcctctttctttcaaaaaaaccccgaattc

SEQ ID NO: 11669 - DNA, 5297 bp, Homo sapiens
gggccgggccgggctgggctggagcagcggcgcccgggagccgagcttgcagcgagggaccggctgaggcgcgcgggagggaaggaggcaagggctccgcggcgctgtcgcgctgccgctcactctcggggaagagatggcggcggagcggggagcccggcgactcctcagcaccccctccttctggctctactgcctgctgctgctcgggcgccgggcgccgggcgccgcggcggccaggagcggctccgcgccgcagtccccaggagccagcattcgaacgttcactccattttattttctggtggagccggtggatacactctcagttagaggctcttctgttatattaaactgttcagcatattctgagccttctccaaaaattgaatggaaaaaagatggaacttttttaaacttagtatcagatgatcgacgccagcttctcccggatggatctttatttatcagcaatgtggtgcattccaaacacaataaacctgatgaaggttattatcagtgtgtggccactgttgagagtcttggaactattatcagtagaacagcgaagctcatagtagcaggtcttccaagatttaccagccaaccagaaccttcctcagtttatgctgggaacggagcaattctgaattgtgaagttaatgcagatttggtcccatttgtgaggtgggaacagaacagacaaccccttcttctggatgatagagttatcaaacttccaagtggaatgctggttatcagcaatgcaactgaaggagatggcgggctttatcgctgcgtagtggaaagtggtgggccaccaaagtatagtgatgaagttgaattgaaggttcttccagatcctgaggtgatatcagacttggtatttttgaaacagccttctcccttagtcagagtcattggtcaggatgtagtgttgccatgtgttgcttcaggacttcctactccaaccattaaatggatgaaaaatgaggaggcacttgacacagaaagctctgaaagattggtattgctggcaggtggtagcctggagatcagtgatgttactgaggatgatgctgggacttatttttgtatagctgataatggaaatgagacaattgaagctcaagcagagcttacagtgcaagctcaacctgaattcctgaagcagcctactaatatatatgctcacgaatctatggatattgtatttgaatgtgaagtgactggaaaaccaactccaactgtgaagtgggtcaaaaatggggatatggttatcccaagtgattattttaagattgtaaaggaacataatcttcaagttttgggtctggtgaaatcagatgaagggttctatcagtgcattgctgaaaatgatgttggaaatgcacaagctggagcccaactgataatccttgaacatgcaccagccacaacgggaccactgccttcagctcctcgggatgtcgtggcctccctggtctctacccgcttcatcaaattgacgtggcggacacctgcatcagatcctcacggagacaaccttacctactctgtgttctacaccaaggaagggattgctagggaacgtgttgagaataccagtcacccaggagagatgcaagtaaccattcaaaacctaatgccagcgaccgtgtacatctttagagttatggctcaaaataagcatggctcaggagagagttcagctccactgcgagtagaaacacaacctgaggttcagctccctggcccagcacctaaccttcgtgcatatgcagcttcgcctacctccatcactgttacgtgggaaacaccagtgtctggcaatggggaaattcagaattataagttgtactacatggaaaaggggactgataaagaacaggatgttgatgtttcaagtcactcttacaccattaatgggttgaaaaaatatacagagtatagtttccgagtggtggcctacaataaacatggtcctggagtttccacaccagatgttgctgttcgaacattgtcagatgttcccagtgctgctcctcagaatctgtccttggaagtgagaaattcaaagagtattatgattcactggcagccacctgctccagccacacaaaatgggcagattactggctacaagattcgctaccgaaaggcctcccgaaagagtgatgtcactgagaccttggtaagcgggacacagctgtctcagctgattgaaggtcttgatcgggggactgagtataatttccgagtggctgctctaacaatcaatggtacaggcccggcaactgactggctgtctgctgaaacttttgaaagtgacctagatgaaactcgtgttcctgaagtgcctagctctcttcacgtacgcccgctcgttactagcatcgtagtgagctggactcctccagagaatcagaacattgtggtcagaggttacgccattggttatggcattggcagccctcatgcccagaccatcaaagtggactataaacagcgctattacaccattgaaaatctggatcccagctctcactatgtgattaccctgaaagcatttaataacgtgggtgaaggcatccccctgtatgagagtgctgtgaccaggcctcacacagacacttctgaagttgatttatttgttattaatgctccatacactccagtgccagatcccactcccatgatgccaccagtgggagttcaggcttccattctgagtcatgacaccatcaggattacgtgggcagacaactcgctgcccaagcaccagaagattacagactcccgatactacaccgtccgatggaaaaccaacatcccagcaaacaccaagtacaagaatgcaaatgcaaccactttgagttatttggtgactggtttaaagccgaatacactctatgaattctctgtgatggtgaccaaaggtcgaagatcaagtacatggagtatgacagcccatgggaccacctttgaattagttccgacttctccacccaaggatgtgactgttgtgagtaaagaggggaaacctaagaccataattgtgaattggcagcctccctctgaagccaatggcaaaattacaggttacatcatatattacagtacagatgtgaatgcagagatacatgactgggttattgagcctgttgtgggaaacagactgactcaccagatacaagagttaactcttgacacaccatactacttcaaaatccaggcacggaactcaaagggcatgggacccatgtctgaagctgtccaattcagaacacctaaagcggactcctctgataaaatgcctaatgatcaagcctcagggtctggagggaaaggaagccggctgccagacctaggatccgactacaaacctccaatgagcggcagtaacagccctcatgggagccccacctctcctctggacagtaatatgctgctggtcataattgtttctgttggcgtcatcaccatcgtggtggttgtgattatcgctgtcttttgtacccgtcgtaccacctctcaccagaaaaagaaacgagctgcctgcaaatcagtgaatggctctcataagtacaaagggaattccaaagatgtgaaacctccagatctctggatccatcatgagagactggagctgaaacccattgataagtctccagacccaaaccccatcatgactgatactccaattcctcgcaactctcaagatatcacaccagttgacaactccatggacagcaatatccatcaaaggcgaaattcatacagagggcatgagtcagaggacagcatgtctacactggctggaaggcgaggaatgagaccaaaaatgatgatgccctttgactcccagccaccccagcctgtgattagtgcccatcccatccattccctcgataaccctcaccatcatttccactccagcagcctcgcttctccagctcgcagtcatctctaccacccgggcagcccatggcccattggcacatccatgtccctttcagacagggccaattccacagaatccgttcgaaatacccccagcactgacaccatgccagcctcttcgtctcaaacatgctgcactgatcaccaggaccctgaaggtgctaccagctcctcttacttggccagctcccaagaggaagattcaggccagagtcttcccactgcccatgttcgcccttcccacccattgaagagcttcgccgtgccagcaatcccgcctccaggacctcccacctatgatcctgcattgccaagcacaccattactgtcccagcaagctctgaaccatcacattcactcagtgaagacagcctccatcgggactctaggaaggagccggcctcctatgccagtggttgttcccagtgcccctgaagtgcaggagaccacaaggatgttggaagactccgagagtagctatgaaccagatgagctgaccaaagagatggcccacctggaaggactaatgaaggacctaaacgctatcacaacagcatgacgaccttcaccaggacctgacttcaaacctgagtctggaagtcttggaacttaacccttgaaaacaaggaattgtacagagtacgagaggacagcacttgagaacacagaatgagccagcagactggccagcgcctctgtgtagggctggctccaggcatggccacctgccttcccctggtcagcctggaagaagcctgtgtcgaggcagcttccctttgcctgctgatattctgcaggactgggcaccatgggccaaaattttgtgtccagggaagaggcgagaagtgcaacctgcatttcactttgtggtcaggccgtgtctttgtgctgtgactgcatcacctttatggagtgtagacattggcatttatgtacaattttatttgtgtcttattttattttaccttcaaaaacaaaaacgccatccaaaaccaaggaagtccttggtgttctccacaagtggttgacatttgactgcttgttccaattatgtatggaaagtctttgacagtgtgggtcgttcctggggttggcttgttttttggtttcatttttattttttaattctgagtcattgcatcctctaccagctgttaatccatcactctgagggggaggaaatgttgcattgctgtttgtaagctttttttattatttttttattataattattaaaggcctgactctttcctctcatcactgtgagattacagatctatttgaattgaatgaaatgtaacattgaaaaaaaaaaaaaaaaaaaaaaaaaaaaa

SEQ ID NO: 11670 - DNA, 2251 bp, Homo sapiens
gcgcaacgtcatttccgcgtacgggggagggcgggcctggagtctgagccggcgccgctcagtgtgaggtggtttctgcgggtgaggctggcgcccgtaccatgagcgaggcggacgggctgcgacagcgccggcccctgcggccgcaggtcgtcacagacgatgatggccaggccccggaggctaaggacggcagctcctttagcggcagagttttccgagtgaccttcttgatgctggctgtttctctcaccgttcccctgcttggagccatgatgctgctggaatctcctatagatccacagcctctcagcttcaaagaacccccgctcttgcttggtgttctgcatccaaatacgaagctgcgacaggcagaaaggctgtttgaaaatcaacttgttggaccggagtccatagcacatattggggatgtgatgtttactgggacagcagatggccgggtcgtaaaacttgaaaatggtgaaatagagaccattgcccggtttggttcgggcccttgcaaaacccgagatgatgagcctgtgtgtgggagacccctgggtatccgtgcagggcccaatgggactctctttgtggccgatgcatacaagggactatttgaagtaaatccctggaaacgtgaagtgaaactgctgctgtcctccgagacacccattgaggggaagaacatgtcctttgtgaatgatcttacagtcactcaggatgggaggaagatttatttcaccgattctagcagcaaatggcaaagacgagactacctgcttctggtgatggagggcacagatgacgggcgcctgctggagtatgatactgtgaccagggaagtaaaagttttattggaccagctgcggttcccgaatggagtccagctgtctcctgcagaagactttgtcctggtggcagaaacaaccatggccaggatacgaagagtctacgtttctggcctgatgaagggcggggctgatctgtttgtggagaacatgcctggatttccagacaacatccggcccagcagctctggggggtactgggtgggcatgtcgaccatccgccctaaccctgggttttccatgctggatttcttatctgagagaccctggattaaaaggatgatttttaagctctttagtcaagagacggtgatgaagtttgtgccgcggtacagcctcgtcctagaactcagcgacagcggtgccttccggagaagcctgcatgatcccgatgggctggtggccacctacatcagcgaggtgcacgaacacgatgggcacctgtacctgggctctttcaggtcccccttcctctgcagactcagcctccaggctgtttagccctcccagatagctgcccctgccacgcaggccaggagtcttcacactcaggcaccaggcctggtccaggaggagctgtggacacagtcgtggttcaagtgtccacatgcacctgttagtccctgagaggtggtgggaatggctgcttcattcctcgaggatgcccgggccccacctgggcttgtctttctgtttagagggaagtgtaacatatctgccatgaggaacataaattcatgtaaagccattttctcttaaacaaaacaaaactttctaagtacagtcattctctaggatttgggaagctccttgcacttggaacagggctcaggtgggtggagcagtaaggcactacccagagagcttgctgctgcggccctgtcctgcggcctcaaagttcttctttactatatataacgtgcggtcatacctttcttcgttgtggtggggatggaagagcagagggagcatggcccaggggtgttgaggccagcggtgagagccgtgttagccaagacatggaactgtgttctcaagggttatgtggggcgtgggctctccatagtgtgtatgaaaagcttgttgactctagcggctcagagaggactttgctgggtttctttctgtgaatatctccgtgctgaccatgctggaattggatgattctgcaattcgggacctactgcaggggtccgtttagtaacgtcttgtctgtgatctttgttcttgacctctagaccccaagatgtgaacagtgcacgtgttaatgtcatctttgctcatgtgttataagccccaagttgctgtatattttcacaagtatgtctacacactggtcatgattttgataataaataacgataaatcgaaaaaaaaaaaaaaaaaaaaaaaaaaaaaaa

SEQ ID NO: 11671 - DNA, 3806 bp, Homo sapiens
gaattcttagttgttttctttagaagaacatttctagggaataatacaagaagatttaggaatcattgaagttataaatctttggaatgagcaaactcagaatggtgctacttgaagactctggatctgctgacttcagaagacattttgtcaacttgagtcccttcaccattactgtggtcttacttctcagtgcctgttttgtcaccagttctcttggaggaacagacaaggagctgaggctagtggatggtgaaaacaagtgtagcgggagagtggaagtgaaagtccaggaggagtggggaacggtgtgtaataatggctggagcatggaagcggtctctgtgatttgtaaccagctgggatgtccaactgctatcaaagcccctggatgggctaattccagtgcaggttctggacgcatttggatggatcatgtttcttgtcgtgggaatgagtcagctctttgggattgcaaacatgatggatggggaaagcatagtaactgtactcaccaacaagatgctggagtgacctgctcagatggatccaatttggaaatgaggctgacgcgtggagggaatatgtgttctggaagaatagagatcaaattccaaggacggtggggaacagtgtgtgatgataacttcaacatagatcatgcatctgtcatttgtagacaacttgaatgtggaagtgctgtcagtttctctggttcatctaattttggagaaggctctggaccaatctggtttgatgatcttatatgcaacggaaatgagtcagctctctggaactgcaaacatcaaggatggggaaagcataactgtgatcatgctgaggatgctggagtgatttgctcaaagggagcagatctgagcctgagactggtagatggagtcactgaatgttcaggaagattagaagtgagattccaaggagaatgggggacaatatgtgatgacggctgggacagttacgatgctgctgtggcatgcaagcaactgggatgtccaactgccgtcacagccattggtcgagttaacgccagtaagggatttggacacatctggcttgacagcgtttcttgccagggacatgaacctgctgtctggcaatgtaaacaccatgaatggggaaagcattattgcaatcacaatgaagatgctggcgtgacatgttctgatggatcagatctggagctaagacttagaggtggaggcagccgctgtgctgggacagttgaggtggagattcagagactgttagggaaggtgtgtgacagaggctggggactgaaagaagctgatgtggtttgcaggcagctgggatgtggatctgcactcaaaacatcttatcaagtgtactccaaaatccaggcaacaaacacatggctgtttctaagtagctgtaacggaaatgaaacttctctttgggactgcaagaactggcaatggggtggacttacctgtgatcactatgaagaagccaaaattacctgctcagcccacagggaacccagactggttggaggggacattccctgttctggacgtgttgaagtgaagcatggtgacacgtggggctccatctgtgattcggacttctctctggaagctgccagcgttctatgcagggaattacagtgtggcacagttgtctctatcctggggggagctcactttggagagggaaatggacagatctgggctgaagaattccagtgtgagggacatgagtcccatctttcactctgcccagtagcaccccgcccagaaggaacttgtagccacagcagggatgttggagtagtctgctcaagatacacagaaattcgcttggtgaatggcaagaccccgtgtgagggcagagtggagctcaaaacgcttggtgcctggggatccctctgtaactctcactgggacatagaagatgcccatgttctttgccagcagcttaaatgtggagttgccctttctaccccaggaggagcacgttttggaaaaggaaatggtcagatctggaggcatatgtttcactgcactgggactgagcagcacatgggagattgtcctgtaactgctctaggtgcttcattatgtccttcagagcaagtggcctctgtaatctgctcaggaaaccagtcccaaacactgtcctcgtgcaattcatcgtctttgggcccaacaaggcctaccattccagaagaaagtgctgtggcctgcatagagagtggtcaacttcgcctggtaaatggaggaggtcgctgtgctgggagagtagagatctatcatgagggctcctggggcaccatctgtgatgacagctgggacctgagtgatgcccacgtggtttgcagacagctgggctgtggagaggccattaatgccactggttctgctcattttggggaaggaacagggcccatctggctggatgagatgaaatgcaatggaaaagaatcccgcatttggcagtgccattcacacggctgggggcagcaaaattgcaggcacaaggaggatgcgggagttatctgctcagaattcatgtctctgagactgaccagtgaagccagcagagaggcctgtgcagggcgtctggaagttttttacaatggagcttggggcactgttggcaagagtagcatgtctgaaaccactgtgggtgtggtgtgcaggcagctgggctgtgcagacaaagggaaaatcaaccctgcatctttagacaaggccatgtccattcccatgtgggtggacaatgttcagtgtccaaaaggacctgacacgctgtggcagtgcccatcatctccatgggagaagagactggccagcccctcggaggagacctggatcacatgtgacaacaagataagacttcaggaaggacccacttcctgttctggacgtgtggagatctggcatggaggttcctgggggacagtgtgtgatgactcttgggacttggacgatgctcaggtggtgtgtcaacaacttggctgtggtccagctttgaaagcattcaaagaagcagagtttggtcaggggactggaccgatatggctcaatgaagtgaagtgcaaagggaatgagtcttccttgtgggattgtcctgccagacgctggggccatagtgagtgtgggcacaaggaagacgctgcagtgaattgcacagatatttcagtgcagaaaaccccacaaaaagccacaacaggtcgctcatcccgtcagtcatcctttattgcagtcgggatccttggggttgttctgttggccattttcgtcgcattattcttcttgactaaaaagcgaagacagagacagcggcttgcagtttcctcaagaggagagaacttagtccaccaaattcaataccgggagatgaattcttgcctgaatgcagatgatctggacctaatgaattcctcagaaaattcccatgagtcagctgatttcagtgctgctgaactaatttctgtgtctaaatttcttcctatttctggaatggaaaaggaggccattctgagccacactgaaaaggaaaatgggaatttataacccagtgagttcagcctttaagataccttgatgaagacctggactattgaatggagcagaaattcacctctctcactgactattacagttgcatttttatggagttcttcttctcctaggattcctaagactgctgctgaatttataaaaattaagtttgtgaatgtgactacttagtggtgtatatgagactttcaagggaattaaataaataaataagaatgttattgatttgagtttgctttaatt

SEQ ID NO: 11672 - DNA, 5921 bp, Homo sapiens
agcagacgggagtttctcctcggggtcggagcaggaggcacgcggagtgtgaggccacgcatgagcggacgctaaccccctccccagccacaaagagtctacatgtctagggtctagacatgttcagctttgtggacctccggctcctgctcctcttagcggccaccgccctcctgacgcacggccaagaggaaggccaagtcgagggccaagacgaagacatcccaccaatcacctgcgtacagaacggcctcaggtaccatgaccgagacgtgtggaaacccgagccctgccggatctgcgtctgcgacaacggcaaggtgttgtgcgatgacgtgatctgtgacgagaccaagaactgccccggcgccgaagtccccgagggcgagtgctgtcccgtctgccccgacggctcagagtcacccaccgaccaagaaaccaccggcgtcgagggacccaagggagacactggcccccgaggcccaaggggacccgcaggcccccctggccgagatggcatccctggacagcctggacttcccggaccccccggaccccccggacctcccggaccccctggcctcggaggaaactttgctccccagctgtcttatggctatgatgagaaatcaaccggaggaatttccgtgcctggccccatgggtccctctggtcctcgtggtctccctggcccccctggtgcacctggtccccaaggcttccaaggtccccctggtgagcctggcgagcctggagcttcaggtcccatgggtccccgaggtcccccaggtccccctggaaagaatggagatgatggggaagctggaaaacctggtcgtcctggtgagcgtgggcctcctgggcctcagggtgctcgaggattgcccggaacagctggcctccctggaatgaagggacacagaggtttcagtggtttggatggtgccaagggagatgctggtcctgctggtcctaagggtgagcctggcagccctggtgaaaatggagctcctggtcagatgggcccccgtggcctgcctggtgagagaggtcgccctggagcccctggccctgctggtgctcgtggaaatgatggtgctactggtgctgccgggccccctggtcccaccggccccgctggtcctcctggcttccctggtgctgttggtgctaagggtgaagctggtccccaagggccccgaggctctgaaggtccccagggtgtgcgtggtgagcctggcccccctggccctgctggtgctgctggccctgctggaaaccctggtgctgatggacagcctggtgctaaaggtgccaatggtgctcctggtattgctggtgctcctggcttccctggtgcccgaggcccctctggaccccagggccccggcggccctcctggtcccaagggtaacagcggtgaacctggtgctcctggcagcaaaggagacactggtgctaagggagagcctggccctgttggtgttcaaggaccccctggccctgctggagaggaaggaaagcgaggagctcgaggtgaacccggacccactggcctgcccggaccccctggcgagcgtggtggacctggtagccgtggtttccctggcgcagatggtgttgctggtcccaagggtcccgctggtgaacgtggttctcctggccccgctggccccaaaggatctcctggtgaagctggtcgtcccggtgaagctggtctgcctggtgccaagggtctgactggaagccctggcagccctggtcctgatggcaaaactggcccccctggtcccgccggtcaagatggtcgccccggacccccaggcccacctggtgcccgtggtcaggctggtgtgatgggattccctggacctaaaggtgctgctggagagcccggcaaggctggagagcgaggtgttcccggaccccctggcgctgtcggtcctgctggcaaagatggagaggctggagctcagggaccccctggccctgctggtcccgctggcgagagaggtgaacaaggccctgctggctcccccggattccagggtctccctggtcctgctggtcctccaggtgaagcaggcaaacctggtgaacagggtgttcctggagaccttggcgcccctggcccctctggagcaagaggcgagagaggtttccctggcgagcgtggtgtgcaaggtccccctggtcctgctggaccccgaggggccaacggtgctcccggcaacgatggtgctaagggtgatgctggtgcccctggagctcccggtagccagggcgcccctggccttcagggaatgcctggtgaacgtggtgcagctggtcttccagggcctaagggtgacagaggtgatgctggtcccaaaggtgctgatggctctcctggcaaagatggcgtccgtggtctgaccggccccattggtcctcctggccctgctggtgcccctggtgacaagggtgaaagtggtcccagcggccctgctggtcccactggagctcgtggtgcccccggagaccgtggtgagcctggtccccccggccctgctggctttgctggcccccctggtgctgacggccaacctggtgctaaaggcgaacctggtgatgctggtgccaaaggcgatgctggtccccctgggcctgccggacccgctggaccccctggccccattggtaatgttggtgctcctggagccaaaggtgctcgcggcagcgctggtccccctggtgctactggtttccctggtgctgctggccgagtcggtcctcctggcccctctggaaatgctggaccccctggccctcctggtcctgctggcaaagaaggcggcaaaggtccccgtggtgagactggccctgctggacgtcctggtgaagttggtccccctggtccccctggccctgctggcgagaaaggatcccctggtgctgatggtcctgctggtgctcctggtactcccgggcctcaaggtattgctggacagcgtggtgtggtcggcctgcctggtcagagaggagagagaggcttccctggtcttcctggcccctctggtgaacctggcaaacaaggtccctctggagcaagtggtgaacgtggtccccccggtcccatgggcccccctggattggctggaccccctggtgaatctggacgtgagggggctcctgctgccgaaggttcccctggacgagacggttctcctggcgccaagggtgaccgtggtgagaccggccccgctggaccccctggtgctcctggtgctcctggtgcccctggccccgttggccctgctggcaagagtggtgatcgtggtgagactggtcctgctggtcccgccggtcccgtcggccccgtcggcgcccgtggccccgccggaccccaaggcccccgtggtgacaagggtgagacaggcgaacagggcgacagaggcataaagggtcaccgtggcttctctggcctccagggtccccctggccctcctggctctcctggtgaacaaggtccctctggagcctctggtcctgctggtccccgaggtccccctggctctgctggtgctcctggcaaagatggactcaacggtctccctggccccattgggccccctggtcctcgcggtcgcactggtgatgctggtcctgttggtccccccggccctcctggacctcctggtccccctggtcctcccagcgctggtttcgacttcagcttcctgccccagccacctcaagagaaggctcacgatggtggccgctactaccgggctgatgatgccaatgtggttcgtgaccgtgacctcgaggtggacaccaccctcaagagcctgagccagcagatcgagaacatccggagcccagagggaagccgcaagaaccccgcccgcacctgccgtgacctcaagatgtgccactctgactggaagagtggagagtactggattgaccccaaccaaggctgcaacctggatgccatcaaagtcttctgcaacatggagactggtgagacctgcgtgtaccccactcagcccagtgtggcccagaagaactggtacatcagcaagaaccccaaggacaagaggcatgtctggttcggcgagagcatgaccgatggattccagttcgagtatggcggccagggctccgaccctgccgatgtggccatccagctgaccttcctgcgcctgatgtccaccgaggcctcccagaacatcacctaccactgcaagaacagcgtggcctacatggaccagcagactggcaacctcaagaaggccctgctcctcaagggctccaacgagatcgagatccgcgccgagggcaacagccgcttcacctacagcgtcactgtcgatggctgcacgagtcacaccggagcctggggcaagacagtgattgaatacaaaaccaccaagtcctcccgcctgcccatcatcgatgtggcccccttggacgttggtgccccagaccaggaattcggcttcgacgttggccctgtctgcttcctgtaaactccctccatcccaacctggctccctcccacccaaccaactttccccccaacccggaaacagacaagcaacccaaactgaacccccccaaaagccaaaaaatgggagacaatttcacatggactttggaaaatatttttttcctttgcattcatctctcaaacttagtttttatctttgaccaaccgaacatgaccaaaaaccaaaagtgcattcaaccttaccaaaaaaaaaaaaaaaaaaaaaagaataaataaataagtttttaaaaaaggaagcttggtccacttgcttgaagacccatgcgggggtaagtccctttctgcccgttgggttatgaaaccccaatgctgccctttctgctcctttctccacaccccccttggcctcccctccactccttcccaaatctgtctccccagaagacacaggaaacaatgtattgtctgcccagcaatcaaaggcaatgctcaaacacccaagtggcccccaccctcagcccgctcctgcccgcccagcacccccaggccctggggacctggggttctcagactgccaaagaagccttgccatctggcgctcccatggctcttgcaacatctccccttcgtttttgagggggtcatgccgggggagccaccagcccctcactgggttcggaggagagtcaggaagggccacgacaaagcagaaacatcggatttggggaacgcgtgtcatcccttgtgccgcaggctgggcgggagagactgttctgttctgttccttgtgtaactgtgttgctgaaagactacctcgttcttgtcttgatgtgtcaccggggcaactgcctgggggcggggatgggggcagggtggaagcggctccccatttttataccaaaggtgctacatctatgtgatgggtggggtggggagggaatcactggtgctatagaaattgagatgcccccccaggccagcaaatgttcctttttgttcaaagtctatttttattccttgatattttttctttctttttttttttttttgtggatggggacttgtgaatttttctaaaggtgctatttaacatgggaggagagcgtgtgcgctccagcccagcccgctgctcactttccaccctctctccacctgcctctggcttctcaggcctctgctctccgacctctctcctctgaaaccctcctccacagctgcagcccatcctcccggctccctcctagtctgtcctgcgtcctctgtccccgggtttcagagacaacttcccaaagcacaaagcagtttttccctaggggtgggaggaagcaaaagactctgtacctattttgtatgtgtataataatttgagatgtttttaattattttgattgctggaataaagcatgtggaaatgacccaaacataa

SEQ ID NO: 11673 - DNA, 4317 bp, Homo sapiens
gagcctgcggcgtgcagtgtgaggggcgggacccggctgccggcggtgggtctagctgggggaggtcgggccatgctggtgggccagggcgcggggctgctggggcccgcggtggtcaccgccgcggtggtgctgctgctgagcggcgtggggccggcgcacggctcggaggacatcgtggtgggctgcggtggcttcgtcaagtcggacgtggagatcaactactcgctcatcgagataaagctgtacaccaagcatgggactttgaaataccagacagactgtgcccctaataatggttactttatgatccctttgtatgataagggggatttcattctgaagattgagcctcccctagggtggagttttgagccgacgaccgtggagctccatgtggatggagtcagtgacatctgcacaaagggtggggacatcaactttgtcttcactgggttctctgtgaatggcaaggtcctcagcaaagggcagcccctgggtcctgcgggagttcaggtgtctctgagaaacactgggaccgaagcaaagatccagtccacagttacacagcctggcggaaagtttgcattttttaaagttctgcctggagattatgaaatcctcgcaactcatccaacctgggcgttgaaagaggcaagcaccacagtgcgtgtaaccaactccaatgccaatgcggccagtcccctcatagttgctggctacaatgtgtctggctctgtccgaagtgatggggagcccatgaaaggggtgaagtttcttctcttttcttctttagtaactaaagaggatgtcctgggctgcaatgtctcaccagtgcctgggttccagccccaagacgagagtctggtgtatttgtgctacacggtctccagagaagatggctcgttctctttctattccttgccaagtgggggctacactgtgattccgttctatcgaggggagaggattacctttgatgtggcgccttccagacttgacttcacagtggagcatgacagcttgaaaatcgagcccgtgttccacgtcatgggattctccgtcaccgggagggtcttgaacggacccgaaggagatggtgttccagaagcagtagtcaccctgaataaccaaatcaaagttaaaacaaaagctgatggctcattccgccttgagaacataaccacagggacatacaccatccatgctcagaaagagcacctctactttgaaacggtcaccatcaaaattgcaccgaacacacctcagctggctgacattgttgcaacagggttcagtgtctgtggtcggatatcaatcattcgcttcccggacaccgtcaagcagatgaataaatacaaagttgtcctgtcatctcaagacaaggacaagtctttggtcaccgtggagacagatgctcatggatcattttgttttaaagcaaaaccagggacttacaaagtgcaggtgatggttcctgaggcagaaaccagagcagggctgacgttgaaaccccagacatttcctcttactgtgaccgacaggcccgtgatggatgtggcctttgtacagttcttggcatcagtttctgggaaagtctcttgtttggacacctgtggtgacttgctggtgactctacagtccctgagccgccagggtgagaagcggagcctccagctctccggcaaggtcaacgccatgactttcacctttgacaacgtgctccctggaaaatacaaaataagcatcatgcatgaggattggtgctggaagaacaagagcctggaggtggaagtgctggaggatgacgtgtctgcagttgagttcaggcagacgggctacatgctgagatgttccctgtctcacgccatcactctggaattttatcaggatggaaatgggcgtgagaatgtggggatttataacctctccaaaggagtcaaccgattctgcctgtccaagcctggtgtgtacaaagtgacccctcgctcctgccaccggtttgagcaagcgttctacacctatgacacgtcttcacctagtatcttgacattgacagccattcgccaccatgtccttggaactatcaccaccgacaaaatgatggatgtcactgtgactatcaagtcttccatcgacagtgaacccgccttggtcttaggccctctgaagtctgtgcaggagctgcggagggagcagcagctggctgagatcgaggcccgcaggcaggagagggagaaaaacggcaatgaggaaggtgaagaaagaatgaccaagcctcccgtgcaggagatggtagatgagttacaaggccccttctcgtatgatttctcttactgggcgcggtctggagagaaaatcactgttacaccgtcatctaaagagctgctcttttatcccccttcaatggaagccgttgtcagtggagaaagctgcccagggaagctgatcgagatccacgggaaggcaggcctgtttttagaaggccagatccaccccgagttggaaggagtcgagattgtcatcagtgaaaagggggcaagttcaccgctgatcacagtctttactgatgacaaaggtgcctacagtgttggccccctgcacagtgacctggagtacacggtgacctcacagaaggagggctatgttctgactgcagtggaaggaaccatcggagacttcaaggcctatgccctggcaggcgtaagctttgagataaaagctgaggatgaccagcccctcccgggagtcctcttatccctgagtggtggcctgtttcgttccaacctcttgacccaggacaacggcattctgacattctcaaacctgagccctggccagtattacttcaaacccatgatgaaggagttccggtttgagccatcctcacagatgatcgaggtgcaggaaggccagaacctgaagatcaccatcacggggtaccgaaccgcttacagttgctatggcacagtgtcttccttaaacggagagcccgaacaaggggttgccatggaagcggtgggccagaacgactgcagcatttacggagaagacaccgtgacagacgaagagggcaagttcagattacgtggattgctgccgggatgtgtgtaccacgttcagctcaaggcagaaggcaacgaccacattgagcgggcgctcccccaccatagggtgattgaggttgggaataatgacatcgatgatgtaaacatcatagttttccggcagattaatcaatttgatttaagtggaaatgtgatcacttcctctgaataccttcctacgttatgggtcaagctttacaaaagcgaaaacctcgacaatccaatccagacagtttcccttggccagtccctgttcttccatttccccccactgctcagagatggcgagaactatgttgtgcttctggactccacactccccagatcccagtatgactacatcttgcctcaagtttctttcaccgcagtgggctaccataaacacatcaccttgatttttaatcccacgaggaagctgcctgaacaggacatcgcacaaggatcctacattgccctgccattgacgctgctggttctgctggccggttacaaccatgacaagctcattcctttgctgctgcagttgacaagccggctacagggagtcggcgcgctcggccaggcagcctctgacaatagcggcccagaagatgcaaagagacaagccaagaaacagaagacaaggcggacgtgaggaggaaggggacagttgcagtctcacttgggacaggccacagccaggggtccggccactacccgcccgtgggataaaagccaaaagcatgcgtcagctaacttcagcctgtgctgctgggcccgcaccccatgtcccttgtcactgtggcatcctgcacccatcctcacccctccgtagagcccctcgtgcaatgcaatgaatggaccctcctgtcactctgctgaacagaatttattttctgagtcaaatataatttattattatttttgtcaaagaagtatttaagctgtgctgtggtgtgagaatgtcattcttgatcttcagccttcgtttgcaagaagagttccagttgatgtggtgtttggttccatggcggggtaccctagggattcatctgttttcttcacttccctttgcatctgagatcctgctggaaaccacggcaacctgtatccactattaggaggtaaaaatcaataaaatggcccattcatttgtgttgtagctcaaaaaaaaaaaaaaaaaaaaaaaaaaaaaaaaaaaaaaaaaaaaaaaaaaaaaaaaaaaaaaaaa

SEQ ID NO: 11674 - DNA, 9432 bp, Homo sapiens
gccgtggctccggtagcagcaagttcgaaccccgctcccgctccgcttcggttctcgctccttcggcccttgggcctccaaacaccagtccccggcagctcgttgcgcattgcgctctccccgccaccaggatgccggtaaccgagaaggatctagctgaggacgcgccttggaagaagatccagcagaacacgttcacacgctggtgcaacgagcacctcaagtgcgtgaacaaacgcatcggcaacctgcagaccgacctgagcgacgggctgcggctcatcgcgctgctcgaggtgctcagccagaagcgcatgtaccgcaagtaccatcagcggcccacctttcgccagatgcagctcgagaatgtgtccgtggcgctcgagttcctggaccgtgagagcatcaagctcgtgtccatcgatagcaaagccattgtggatgggaacctgaagctcatcttgggtctggtgtggacgctgatcctccactactccatctccatgcccgtgtgggaggatgaaggggatgatgatgccaagaagcagacgccaaagcagaggctgctggggtggattcagaacaagatcccctacttgcccatcaccaactttaaccagaactggcaagacggcaaagccctgggagccctggtagacagctgtgctccaggtctgtgcccagactgggaatcctgggacccgcagaagcctgtggataatgcacgagaagccatgcagcaggcagatgactggctgggtgtcccacaggtcatcactcctgaagaaatcattcacccggatgtggacgagcactcagttatgacttacctgtcccagttccccaaagccaagctcaagccgggggctcctctcaaacccaaactcaacccgaagaaagccagggcctatggcagaggaatcgagcccactggaaacatggtgaagcagccagccaagttcactgtggacaccatcagcgccgggcaaggagacgtgatggtgtttgttgaggacccagaagggaacaaagaggaggcacaagtgacccctgacagcgacaagaacaagacatactctgtggagtatctgcccaaggtcaccgggctacacaaagtcacagtcctctttgcaggacagcacatctccaagagcccatttgaagtgagtgttgacaaggcccagggagatgccagtaaagtcactgcaaaaggtccagggttggaagctgtagggaacatcgccaataagcccacctactttgacatctatacggcaggagctggtgtgggtgacattggtgtggaggtggaagatccccaggggaagaacaccgtggagttgctcgtggaagacaaaggaaaccaggtgtatcgatgtgtgtacaaacccatgcagcctggccctcacgtggtcaagatcttctttgctggggacactattcctaagagtcccttcgttgtgcaggttggggaagcctgcaatccaaatgcctgccgggccagtggccgaggcctacaacccaaaggcgtccgtatccgggagaccacagatttcaaggttgacaccaaagctgcaggaagtggggagctcggggtaaccatgaagggtcctaagggtctggaggagctggtgaagcagaaagactttctggatggggtctacgcattcgagtattaccccagcaccccggggagatacagcattgccatcacatgggggggacaccacattccaaagagcccctttgaagttcaagttggccctgaagcgggtatgcagaaagtccgtgcttggggccctgggctccatggtgggattgtcgggcggtcagcggacttcgtggtagaatccattggctctgaagtggggtctctggggtttgccattgaaggcccctctcaggcaaagattgagtacaacgaccagaatgatggatcgtgtgatgtcaaatactggcccaaggagcctggcgaatatgctgttcacatcatgtgtgacgacgaagacatcaaggacagcccgtacatggccttcatccacccagccacgggaggctacaaccctgatctggttcgagcatacgggccaggtttggagaaatctggatgcattgtcaacaacctggccgagttcactgtggatcctaaggatgctggaaaagctcccttaaagatatttgctcaggatggggaaggccaacgcattgacatccagatgaagaaccggatggacggcacatatgcatgctcatacaccccggtgaaggccatcaagcacaccattgctgtggtctggggaggcgtgaacatcccgcacagcccctacagggtcaacatcgggcaaggtagccatcctcagaaggtcaaagtgtttgggccaggtgtggagagaagtggtctgaaggcaaatgaacctacacacttcacggtggactgtactgaggctggggaaggtgatgtcagtgttggcattaagtgtgatgcccgggtgttaagtgaagatgaggaagacgtggattttgacattattcacaatgccaatgatacgttcacagtcaaatatgtgcctcctgctgctgggcgatacactatcaaagttctctttgcatctcaggaaatccccgccagccctttcagagtcaaagttgacccttcccacgatgccagcaaagtgaaggcagaaggcccagggctcagcaaagcaggtgtggaaaatgggaaaccgacccacttcactgtctacaccaagggggctgggaaagccccgctcaacgtgcagttcaacagccctcttcctggcgatgcagtgaaggatttggatatcatcgataattatgactactctcacacggttaaatatacacccacccaacagggcaacatgcaggttctggtgacttacggtggcgatcccatccctaaaagccctttcactgtgggtgttgctgcaccgctggatctgagcaagataaaactcaatgggctggaaaacagggtggaagttgggaaggatcaggagttcaccgttgataccaggggggcaggaggccaggggaagctggacgtgacaatcctcagcccctctcggaaggtcgtgccatgcctagtgacacctgtgacaggccgggagaacagcacggccaagttcatccctcgggaggaggggctgtatgctgtagacgtgacctacgatggacaccctgtgcccgggagcccctacacagtggaggcctcgctgccaccagatcccagcaaggtgaaggcccacggtcccggcctcgaaggtggtctcgtgggcaagcctgccgagttcaccatcgataccaaaggagctggtactggaggtctgggcttaacggtggaaggtccgtgcgaggccaaaatcgagtgctccgacaatggtgatgggacctgctccgtctcttaccttcccacaaaacccggggagtacttcgtcaacatcctctttgaagaagtccacatacctgggtctcccttcaaagctgacattgaaatgccctttgacccctctaaagtcgtggcatcggggccaggtctcgagcacgggaaggtgggtgaagctggcctccttagcgtcaactgctcggaagcgggaccgggggccctgggcctggaagctgtctcggactcgggaacaaaagccgaagtcagtattcagaacaacaaagatggcacctacgcggtgacctacgtgcccctgacggccggcatgtacacgttgaccatgaagtatggtggcgaactcgtgccacacttccccgcccgggtcaaggtggagcccgccgtggacaccagcaggatcaaagtctttggaccaggaatagaagggaaagatgtgttccgggaagctaccaccgactttacagttgactctcggccgctgacccaggttgggggtgaccacatcaaggcccacattgccaacccctcaggggcctccaccgagtgctttgtcacagacaatgcggatgggacctaccaggtggaatacacaccctttgagaaaggtctccatgtagtggaggtgacatatgatgacgtgcctatcccaaacagtcccttcaaggtggctgtcactgaaggctgccagccatctagggtgcaagcccaaggacctggattgaaagaggcctttaccaacaagcccaatgtcttcaccgtggttaccagaggcgcaggaattggtgggcttggcataactgttgagggaccatcagagtcgaagataaattgcagagacaacaaggatggcagctgcagtgctgagtacattcctttcgcgccgggggattacgatgttaatatcacatatggaggagcccacatccctggcagccccttcagggttcctgtgaaggatgttgtggaccccagcaaggtcaagattgccggccccgggctgggctcaggcgtccgagcccgtgtcctgcagtccttcacggtggacagcagcaaggctggcctggctccgctggaagtgagggttctgggcccacgaggcttggtggagccagtgaacatggtggacaatggagatggcacacacacagtaacctacaccccatctcaggagggaccttacatggtctcagttaaatatgctgatgaagagattcctcgcagtcccttcaaggtcaaggtccttcccacatatgatgccagcaaagtgactgccagtggccccggccttagttcctatggtgtgcctgccagtctacctgtggactttgcaattgatgcccgagatgccggggaaggcctgcttgctgttcaaataacggaccaagaaggaaaacccaaaagagccattgtccatgacaataaagatggcacgtatgctgtcacctacatccccgacaagactgggcgctatatgattggagtcacctacgggggtgacgacatcccactttctccttatcgcatccgagccacacagacgggtgatgccagcaagtgcctggccacgggtcctggaatcgcctccactgtgaaaactggcgaagaagtaggctttgtggttgatgccaagactgccgggaagggtaaagtgacctgcacggttctgaccccagatggcactgaggccgaggccgatgtcattgagaatgaagatggaacctatgacatcttctacacagctgccaagccgggcacatatgtgatctatgtgcgcttcggtggtgttgatattcctaacagccccttcactgtcatggccacagatggggaagtcacagccgtggaggaggcaccggtaaatgcatgtccccctggattcaggccctgggtgaccgaagaggcctatgtcccagtgagtgacatgaacggcctgggatttaagccttttgacctggtcattccgtttgctgtcaggaaaggagaaatcactggagaggtccacatgccttctgggaagacagccacacctgagattgtggacaacaaggacggcacggtcactgttagatatgcccccactgaggtcgggctccatgagatgcacatcaaatacatgggcagccacatccctgagagcccactccagttctacgtgaactaccccaacagtggaagtgtttctgcatacggtccaggcctcgtgtatggagtggccaacaaaactgccaccttcaccatcgtcacagaggatgcaggagaaggtggtctggacttggctattgagggcccctcaaaagcagaaatcagctgcattgacaataaagatgggacatgcacagtgacctacctgccgactctgccaggcgactacagcattctggtcaagtacaatgacaagcacatccctggcagccccttcacagccaagatcacagatgacagcaggcggtgctcccaggtgaagttgggctcagccgctgacttcctgctcgacatcagtgagactgacctcagcagcctgacggccagcattaaggccccatctggccgagacgagccctgtctcctgaagaggctgcccaacaaccacattggcatctccttcatcccccgggaagtgggcgaacatctggtcagcatcaagaaaaatggcaaccatgtggccaacagccccgtgtctatcatggtggtccagtcggagattggtgacgcccgccgagccaaagtctatggccgcggcctgtcagaaggccggactttcgagatgtctgacttcatcgtggacacaagggatgcaggttatggtggcatatccttggcggtggaaggccccagcaaagtggacatccagacggaggacctggaagatggcacctgcaaagtctcctacttccctaccgtgcctggggtttatatcgtctccaccaaattcgctgacgagcacgtgcctgggagcccatttaccgtgaagatcagtggggagggaagagtcaaagagagcatcacccgcaccagtcgggccccgtccgtggccactgtcgggagcatttgtgacctgaacctgaaaatcccagaaatcaacagcagtgatatgtcggcccacgtcaccagcccctctggccgtgtgactgaggcagagattgtgcccatggggaagaactcacactgcgtccggtttgtgccccaggagatgggcgtgcacacggtcagcgtcaagtaccgtgggcagcacgtcaccggcagccccttccagttcaccgtggggccacttggtgaaggaggcgcccacaaggtgcgggcaggaggccctggcctggagagaggagaagcgggagtcccagctgagttcagcatttggacccgggaagcaggcgctggaggcctctccatcgctgttgagggccccagtaaggccgagattacattcgatgaccataaaaatgggtcgtgcggtgtatcttatattgcccaagagcctggtaactacgaggtgtccatcaagttcaatgatgagcacatcccggaaagcccctacctggtgccggtcatcgcaccctccgacgacgcccgccgcctcactgttatgagccttcaggaatcgggattaaaagttaaccagccagcatcctttgctataaggttgaatggcgcaaaaggcaagattgatgcaaaggtgcacagcccctctggagccgtggaggagtgccacgtgtctgagctggagccagataagtatgctgttcgcttcatccctcatgagaatggtgtccacaccatcgatgtcaagttcaatgggagccacgtggttggaagccccttcaaagtgcgcgttggggagcctggacaagcggggaaccctgccctggtgtccgcctatggcacgggactcgaagggggcaccacaggtatccagtcggaattctttattaacaccacccgagcaggtccagggacattatccgtcaccatcgaaggcccatccaaggttaaaatggattgccaggaaacacctgaagggtacaaagtcatgtacacccccatggctcctggtaactacctgatcagtgtcaaatacggtgggcccaaccacatcgtgggcagtcccttcaaggccaaggtgacaggccagcgtctagttagccctggctcagccaacgagacctcatccatcctggtggagtcagtgaccaggtcgtctacagagacctgctatagcgccattcccaaggcatcctcggacgccagcaaggtgacctctaagggggcagggctctcaaaggcctttgtgggccagaagagttccttcctggtggactgcagcaaagctggctccaacatgctgctgatcggggtccatgggcccaccaccccctgcgaggaggtctccatgaagcatgtaggcaaccagcaatacaacgtcacatacgtcgtcaaggagaggggcgattatgtgctggctgtgaagtggggggaggaacacatccctggcagcccttttcatgtcacagtgccttaaaacagttttctcaaatcctggagagagttcttgtggttgcttttgttgcttgtttgtaattcattttatacaaagccctccagcctgtttgtggggctgaaaccccatccctaaaatattgctgttgtaaaatgccttcagaaataagtcctagactggactcttgagggacatattggagaatcttaagaaatgcaagcttgttcagggggctgagaagatcctgagtacactaggtgcaaaccagaactcttggtggaacagaccagccactgcagcagacagaccaggaacacaatgagactgacatttcaaaaaaacaaaactggctagcctgagctgctggttcactcttcagcatttatgaaacaaggctaggggaagatgggcagagaaaaaggggacacctagtttggttgtcatttggcaaaggagatgacttaaaatccgcttaatctcttccagtgtccgtgttaatgtatttggctattagatcactagcactgctttaccgctcctcatcgccaacacccccatgctctgtggccttcttacacttctcagagggcagagtggcagccgggcaccctacagaaactcagagggcagagtggcagccaggcccacatgtctctcaagtacctgtcccctcgctctggtgattatttcttgcagaatcaccacacgagaccatcccggcagtcatggttttgctttagttttccaagtccgtttcagtcccttccttggtctgaagaaattctgcagtggcgagcagtttcccacttgccaaagatcccttttaaccaacactagcccttgtttttaacacacgctccagcccttcatcagcctgggcagtcttaccaaaatgtttaaagtgatctcagaggggcccatggattaacgccctcatcccaaggtccgtcccatgacataacactccacacccgccccagccaacttcatgggtcactttttctggaaaataatgatctgtacagacaggacagaatgaaactcctgcggctctttggcctgaaagttgggaatggttgggggagagaagggcagcagcttattggtggtcttttcaccattggcagaaacagtgagagctgtgtggtgcagaaatccagaaatgaggtgtagggaattttgcctgccttcctgcagacctgagctggctttggaatgaggttaaagtgtcagggacgttgcctgagcccaaatgtgtagtgtggtctgggcaggcagacctttaggttttgctgcttagtcctgaggaagtggccactcttgtggcaggtgtagtatctggggcgagtgttgggggtaaaagcccaccctacagaaagtggaacagcccggacctgatgtgaaaggaccacgggtgttgtaagctgggaccggaaccaaactggaatcaaacgcgactgtaaattgtatcttataacttattaaataaaacattgctccgtaaaaaaaaaaa

SEQ ID NO: 11675 - DNA, 2792 bp, Homo sapiens
aatttagagaagatgtagggagtgttcaacatgttcgttgtggaagagaaagagctaagagagaggagcttaaagacacaaacgggtagaatcaaggagtgtgctctcaaatgagaggaacaggagtgacattaaccttgaaatgctcggagactctactccttcatgacagtaggaggataattaacaatagatacaaatgcaggaattgatgagtgccatcagaaagctgtatcatgagctgcctgcacttctaaagtgtccagtggatttttaatcacatgagcctggaaatagggttatgaaaagaagctcagagcagagcaccgaaagtggccactaccagcatgaagagcccaacaattcaaactggtgaagtgagaaaaacagaatgcagctttcaaggttcgtttcaagcagttggcttgtgggactctgagagatgctgctgcccatgacatgcgggaattatcatgatcaactacccagcttggatttcatccagtggccaagagctttgtgtgggagacggcaagggttggatttttcaaaagagtaaaccaggataaatcatgaggaacctataacccttttggccacatgcaaaaaagcaagacccgtgaccaaggtgtagactaagaagtggagtcatgcttcacacggccatatcatgctggcagccattcctgggtctggctgtggtgttaatcttcatgggatccaccattggctgccccgctcgctgtgagtgctctgcccagaacaaatctgttagctgtcacagaaggcgattgatcgccatcccagagggcattcccatcgaaaccaaaatcttggacctcagtaaaaacaggctaaaaagcgtcaaccctgaagaattcatatcatatcctctgctggaagagatagacttgagtgacaacatcattgccaatgtggaaccaggagcattcaacaatctctttaacctgcgttccctccgcctaaaaggcaatcgtctaaagctggtccctttgggagtattcacggggctgtccaatctcactaagcttgacattagtgagaataagattgtcattttactagactacatgttccaagatctacataacctgaagtctctagaagtgggggacaatgatttggtttatatatcacacagggcattcagtgggcttcttagcttggagcagctcaccctggagaaatgcaacttaacagcagtaccaacagaagccctctcccacctccgcagcctcatcagcctgcatctgaagcatctcaatatcaacaatatgcctgtgtatgcctttaaaagattgttccacctgaaacacctagagattgactattggcctttactggatatgatgcctgccaatagcctctacggtctcaacctcacatccctttcagtcaccaacaccaatctgtctactgtacccttccttgcctttaaacacctggtatacctgactcaccttaacctctcctacaatcccatcagcactattgaagcaggcatgttctctgacctgatccgccttcaggagcttcatatagtgggggcccagcttcgcaccattgagcctcactccttccaagggctccgcttcctacgcgtgctcaatgtgtctcagaacctgctggaaactttggaagagaatgtcttctcctcccctagggctctggaggtcttgagcattaacaacaaccctctggcctgtgactgccgccttctctggatcttgcagcgacagcccaccctgcagtttggtggccagcaacctatgtgtgctggcccagacaccatccgtgagaggtctttcaaggatttccatagcactgccctttctttttactttacctgcaaaaaacccaaaatccgtgaaaagaagttgcagcatctgctagtagatgaagggcagacagtccagctagaatgcagtgcagatggagacccgcagcctgtgatttcctgggtgacaccccgaaggcgtttcatcaccaccaagtccaatggaagagccaccgtgttgggtgatggcaccttggaaatccgctttgcccaggatcaagacagcgggatgtatgtttgcatcgctagcaatgctgctgggaatgataccttcacagcctccttaactgtgaaaggattcgcttcagatcgttttctttatgcgaacaggacccctatgtacatgaccgactccaatgacaccatttccaatggcaccaatgccaatactttttccctggaccttaaaacaatactggtgtctacagctatgggctgcttcacattcctgggagtggttttattttgttttcttctcctttttgtgtggagccgagggaaaggcaagcacaaaaacagcattgaccttgagtatgtgcccagaaaaaacaatggtgctgttgtggaaggagaggtagctggacccaggaggttcaacatgaaaatgatttgaaggcccacccctcacattactgtctctttgtcaatgtgggtaatcagtaagacagtatggcacagtaaattactagattaagaggcagccatgtgcagctgcccctgtatcaaaagcagggtctatggaagcaggaggacttccaatggagactctccatcgaaaggcaggcaggcaggcatgtgtcagagcccttcacacagtgggatactaagtgtttgcgttgcaaatattggcgttctggggatctcagtaatgaacctgaatatttggctcacactcacggacaattattcagcattttctaccactgcaaaaaac

SEQ ID NO: 11676 - DNA, 3340 bp, Homo sapiens
agcgcgggccgcggaacatgcgccgggagcggggcccgggcgggactccggagctggtactgctccccccgcgctccggcgccgggcctcgccgtgcggcctccttcctcccttcctcccgcccggctcggccggaggcggcggcggaggggcgaggcgcggccccccttcggcggcacctcctccccgggcaggcgcgggcggagccgggcccgcctcagccagccgcggcgggagcagcgcagcgcggcgccgcgggcagcgagctccgcattcgaacctccctcgcaaagacagtctccgccccacaatgcaccgcggcgggcagcctttgaaaaagcggcgcggctcgttcaagatggcggagctcgaccagttgcctgacgagagctcttcagcaaaagcccttgtcagtttaaaagaaggaagcttatctaacacgtggaatgaaaagtacagttctttacagaaaacacctgtttggaaaggcaggaatacaagctctgctgtggaaatgcctttcagaaattcaaaacgaagtcgacttttttctgatgaagatgataggcaaataaatacaaggtcacctaaaagaaaccagagggttgcaatggttccacagaaatttacagcaacaatgtcaacaccagataagaaagcttcacagaagattggttttcgattacgtaatctgctcaagcttcctaaagcacataaatggtgtatatacgagtggttctattcaaatatagataaaccactttttgaaggtgataatgacttctgtgtatgtctaaaggaatcttttcctaatttgaaaacaagaaagttaacaagagtagaatggggaaaaattcggcggcttatgggaaaaccacggagatgttcttctgcattttttgaggaagagagatcagcattaaaacagaaacggcagaaaataaggctcttacaacaaaggaaagttgcagatgtttcacaattcaaagatctcccagatgaaattcctttgcctctggttattggaacgaaagttacagcacgattacgtggtgttcatgatggtttgttcactggacaaatagatgctgtggatactcttaatgctacttatagagtaacttttgataggacagggcttggaacccataccatccctgactatgaagttctcagtaatgaacctcatgagacaatgccaattgctgcctttggacaaaaacagcggccttctcgattttttatgaccccaccacggttacattatactcctcctctccagtcaccaattatagataatgatcctttattaggacagtcgccgtggagaagtaaaatttctggctctgacactgaaacattaggtggttttccagtagaatttcttatccaagtgaccagattatcaaaaattctcatgattaaaaaggaacatatcaagaaattaagggaaatgaacacagaagcagaaaaattgaaatcatattccatgcccatcagcattgaatttcagcggagatatgcaacaattgttctggagcttgaacagctgaacaaggacctaaacaaagttttgcataaagttcaacagtattgctatgagcttgctccagaccaggggctccagcctgcagatcagccaacagatatgagacgcaggtgtgaggaagaagcacaggaaattgttcggcatgcaaattcctcaacaggacagccctgcgttgaaaatgaaaatctgacagacttaatttccaggcttacagctattttgttacaaattaagtgtctagcagaaggaggagacctgaattcctttgaattcaaatcacttacagactcattaaatgatatcaagagtacaatagacgcttctaatatcagttgctttcagaataatgtagaaatccatgttgcacatattcagagtggcctgagccagatgggaaacttacatgcctttgcagcaaataacaccaacagagactgagtaaagatttcattattccaactgcacgggacattgtttttgagaagttcttttcctttatataggcttccaacaccaaataacctaactgctggaaaacaagggaaatttaaatctccaaataaggcattttaatagactgtactgcttcttaaaccagcattgctgaccagcattatatttatttttcttttattattcagatgcagtagcattgcttatgttacatatgtttatattcacaaatatttttaaactgaaatatctgaacataatataatttcgtggaagaatacattgaccattttttttaatgtgcatgaattcaccgcaacacatgcagacaactgctgcaatggagagtatgaagaaacctggtctttttattcatgtcggtggcagtgtggaaattccatccagaaaattacaactccacttgatttagttgatcaccatctcagtcttcaaaagataacatcatgaggtgtgggaagtcctagttttaaggaaaccactgaaatatagatgggaaatgtggactttacaagtatatgttatatatacttgcaatgtgacatggttctgtagatcattttataataataaatattttaatttatcataacatataaaagaaacctttgttgtttgttgaaagaaaatgaaggaacagggggaaaaaaggtgcaaaatgctaaatttctaaaaatggatttggcatgtcttcccatcagttcaggtcaaaagtgcattgttgtgagatttattaaaaaaaaaatgataacacactattttcatatttttttgtttatttgcacaacttttaaaccagattactggttaaaatccaacagtacacaatttataaagtaaaaagattttataaggaaaacaaatataataaccagtgctgtgaaatgcagaagaaaggcttgttttggttgtttttcttttttaggaaaacgctgcctaaaatgttaatcttgtaaaaagtatgtatttggaattttcttcgttttaatagaatattataaactcaaaatataaatttttttcaaatttggagtttaagatatagctgtagaggtggttttaattcctttagatgtctcataaaatgagactttttatatgttaatgtataataaaactgaaacaagattattttccatttgaaatttttgtatagtttaaaaaggcttccgtattctttgttggtattgtgccactgcagaactttagtgcagagtttatatttagctaaactgttatgttaattaagaaatgcataaatcttctattcttaatatttgtaattctaaataaattgatctatgaaaaaaaaaaaaaaaa

SEQ ID NO: 11677 - DNA, 3982 bp, Homo sapiens
cacagctgcttgctgctccagccttgccctcccagagctgccggacgctcgcgggtctcggaacgcatcccgccgcgggggcttcggccgtggcatgggcgccgcgggcctgctcggggttttcttggctctcgtcgcaccgggggtcctcgggatttcttgtggctctcctccgcctatcctaaatggccggattagttattattctacccccattgctgttggtaccgtgataaggtacagttgttcaggtaccttccgcctcattggagaaaaaagtctattatgcataactaaagacaaagtggatggaacctgggataaacctgctcctaaatgtgaatatttcaataaatattcttcttgccctgagcccatagtaccaggaggatacaaaattagaggctctacaccctacagacatggtgattctgtgacatttgcctgtaaaaccaacttctccatgaacggaaacaagtctgtttggtgtcaagcaaataatatgtgggggccgacacgactaccaacctgtgtaagtgttttccctctcgagtgtccagcacttcctatgatccacaatggacatcacacaagtgagaatgttggctccattgctccaggattgtctgtgacttacagctgtgaatctggttacttgcttgttggagaaaagatcattaactgtttgtcttcgggaaaatggagtgctgtcccccccacatgtgaagaggcacgctgtaaatctctaggacgatttcccaatgggaaggtaaaggagcctccaattctccgggttggtgtaactgcaaactttttctgtgatgaagggtatcgactgcaaggcccaccttctagtcggtgtgtaattgctggacagggagttgcttggaccaaaatgccagtatgtgaagaaattttttgcccatcacctccccctattctcaatggaagacatataggcaactcactagcaaatgtctcatatggaagcatagtcacttacacttgtgacccggacccagaggaaggagtgaacttcatccttattggagagagcactctccgttgtacagttgatagtcagaagactgggacctggagtggccctgccccacgctgtgaactttctacttctgcggttcagtgtccacatccccagatcctaagaggccgaatggtatctgggcagaaagatcgatatacctataacgacactgtgatatttgcttgcatgtttggcttcaccttgaagggcagcaagcaaatccgatgcaatgcccaaggcacatgggagccatctgcaccagtctgtgaaaaggaatgccaggcccctcctaacatcctcaatgggcaaaaggaagatagacacatggtccgctttgaccctggaacatctataaaatatagctgtaaccctggctatgtgctggtgggagaagaatccatacagtgtacctctgagggggtgtggacaccccctgtaccccaatgcaaagtggcagcgtgtgaagctacaggaaggcaactcttgacaaaaccccagcaccaatttgttagaccagatgtcaactcttcttgtggtgaagggtacaagttaagtgggagtgtttatcaggagtgtcaaggcacaattccttggtttatggagattcgtctttgtaaagaaatcacctgcccaccaccccctgttatctacaatggggcacacaccgggagttccttagaagattttccatatggaaccacggtcacttacacatgtaaccctgggccagaaagaggagtggaattcagcctcattggagagagcaccatccgttgtacaagcaatgatcaagaaagaggcacctggagtggccctgctcccctgtgtaaactttccctccttgctgtccagtgctcacatgtccatattgcaaatggatacaagatatctggcaaggaagccccatatttctacaatgacactgtgacattcaagtgttatagtggatttactttgaagggcagtagtcagattcgttgcaaagctgataacacctgggatcctgaaataccagtttgtgaaaaagaaacatgccagcatgtgagacagagtcttcaagaacttccagctggttcacgtgtggagctagttaatacgtcctgccaagatgggtaccagttgactggacatgcttatcagatgtgtcaagatgctgaaaatggaatttggttcaaaaagattccactttgtaaagttattcactgtcaccctccaccagtgattgtcaatgggaagcacacaggcatgatggcagaaaactttctatatggaaatgaagtctcttatgaatgtgaccaaggattctatctcctgggagagaaaaaattgcagtgcagaagtgattctaaaggacatggatcttggagcgggccttccccacagtgcttacgatctcctcctgtgactcgctgccctaatccagaagtcaaacatgggtacaagctcaataaaacacattctgcatattcccacaatgacatagtgtatgttgactgcaatcctggcttcatcatgaatggtagtcgcgtgattaggtgtcatactgataacacatgggtgccaggtgtgccaacttgtatcaaaaaagccttcatagggtgtccacctccgcctaagacccctaacgggaaccatactggtggaaacatagctcgattttctcctggaatgtcaatcctgtacagctgtgaccaaggctacctgctggtgggagaggcactccttctttgcacacatgagggaacctggagccaacctgcccctcattgtaaagaggtaaactgtagctcaccagcagatatggatggaatccagaaagggctggaaccaaggaaaatgtatcagtatggagctgttgtaactctggagtgtgaagatgggtatatgctggaaggcagtccccagagccagtgccaatcggatcaccaatggaaccctcccctggcggtttgcagatcccgttcacttgctcctgtcctttgtggtattgctgcaggtttgatacttcttaccttcttgattgtcattaccttatacgtgatatcaaaacacagagcacgcaattattatacagatacaagccagaaagaagcttttcatttagaagcacgagaagtatattctgttgatccatacaacccagccagctgatcagaagacaaactggtgtgtgcctcattgcttggaattcagcggaatattgattagaaagaaactgctctaatatcagcaagtctctttatatggcctcaagatcaatgaaatgatgtcataagcgatcacttcctatatgcacttattctcaagaagaacatctttatggtaaagatgggagcccagtttcactgccatatactcttcaaggactttctgaagcctcacttatgagatgcctgaagccaggccatggctataaacaattacatggctctaaaaagttttgccctttttaaggaaggcactaaaaagagctgtcctggtatctagacccatcttctttttgaaatcagcatactcaatgttactatctgcttttggttataatgtgtttttaattatctaaagtatgaagcattttctggggttatgatggctttacctttattaggaagtatggttttattttgatagtagcttcctcctctggtggtgttaatcatttcatttttacccttacttggtttgagtttctctcacattactgtatatactttgcctttccataatcactcagtgattgcaatttgcacaagtttttttaaattatgggaatcaagatttaatcctagagatttggtgtacaattcaggctttggatgtttctttagcagttttgtgataagttctagttgcttgtaaaatttcacttaataatgtgtacattagtcattcaataaattgtaattgtaaagaaaacatacaaaaaaaaaaaaaaaa

SEQ ID NO: 11678 - DNA, 2463 bp, Homo sapiens
ctctttccctccctcctctcctctccctctcctctcctgctatagagggctccgacagcagttcccagccagcgtgttcagcctgcctgcctgcctgcctctgtgtgtgtgtgagcgtgtgtgcgtgcgtctactttgtactgggaagaacacagcccatgtgctctgcatggacgttactgatactctgtttagcttgattttcgaaaagcaggcaagatgtccagcacaccacatgaccccttctattcttctcctttcggcccattttataggaggcatacaccatacatggtacagccagagtaccgaatctatgagatgaacaagagactgcagtctcgcacagaggatagtgacaacctctggtgggacgcctttgccactgaattttttgaagatgacgccacattaaccctttcattttgtttggaagatggaccaaagcgatacactatcggcaggaccctcatcccccgttactttagcactgtgtttgaaggaggggtgaccgacctgtattacattctcaaacactcgaaagagtcataccacaactcatccatcacggtggactgcgaccagtgtaccatggtcacccagcacgggaagcccatgtttaccaaggtatgtacagaaggcagactgatcttggagttcacctttgatgatctcatgagaatcaaaacatggcactttaccattagacaataccgagagttagtcccgagaagcatcctagccatgcatgcacaagatcctcaggtcctggatcagctgtccaaaaacatcaccaggatggggctaacaaacttcaccctcaactacctcaggttgtgtgtaatattggagccaatgcaggaactgatgtcgagacataaaacttacaacctcagtccccgagactgcctgaagacctgcttgtttcagaagtggcagaggatggtggctccgccagcagaacccacaaggcaaccaacaaccaaacggagaaaaaggaaaaattccaccagcagcacttccaacagcagcgctgggaacaatgcaaacagcactggcagcaagaagaagaccacagctgcaaacctgagtctgtccagtcaggtacctgatgtgatggtggtaggagagccaactctgatgggaggtgagtttggggacgaggacgaaaggctaatcactagattagaaaacacgcaatatgatgcggccaacggcatggacgacgaggaggacttcaacaattcacccgcgctggggaacaacagcccgtggaacagtaaacctcccgccactcaagagaccaaatcagaaaaccccccaccccaggcttcccaataagatgatcggcaccagaatccactgtcaataggcccgtgggtgatcattacaattgcaaatctttacttacaggagaggaaacagaagagataaaaacttttccatgcaaatatctatttctaaaccacaatgatctgattttctttcttctttctttttttctaattgagaggattattcccagtaagcttccatgaccctttcttggaggccttcacaggtaatacagatactggcactgattgtaattaaaatgagagaaaactctagcgcatcttctggcacggttttaacaacgtgtttgtgttgaatttcctttttatgcatcaaacgaaggccatattgtccataaatgctcagtgctcaggatctcattaatatgccgaacctaactacagatgactttttaatattgtaaaatattttctgctttttgacttgcatctgagagtttcttgtttcagtaaaaaaagaaaagacaaaaaaatcagctttggaaagtaatttaaatgtaccttattttttttttctttatgttttctttcattgggcaacagctaagagggcccagcaaggtaatttatggttgagctgatgtcaattggttcttgtcttgagtcgactcaatttagcccaagtgctgaaacaagaaatgtcatttttttcatcaaagacaccagggcagatttttaagtaaagaaagacaattggacccttaagaatttatgcatttgtaaagttgctgttgatccaaatattttcaagccatgtaatccattggttttgtgggcagtttaataaacctgaacctttgtgtgttttctaattgtacctgagttgaccatcctttctttttatagtatatttcttgtatgatattttgtaaagctctcacctggttcttttatggggacttttcgtttttgggcaactccagtgtatttatgtgaaactttataagagaattaatttttccatttgcatattaatatgttcctccacacatgtaaaggcacagtggctccgtgtgttaaaaaacagctgtattttatgtatgctttactgataagtgtgccaataataaactgtgttaatgaccaaaaaaaaaaaaaaaaaaaaaaa

SEQ ID NO: 11679 - DNA, 3842 bp, Homo sapiens
gggaagttggctggctggcgaggcagagcctctcctcaaagcctggctcccacggaaaatatgctcagtgcagccgcgtgcatgaatgaaaacgccgccgggcgcttctagtcggacaaaatgcagccgagaactccgctcgttctgtgcgttctcctgtcccaggtgctgctgctaacatctgcagaagatttggactgcactcctggatttcagcagaaagtgttccatatcaatcagccagctgaattcattgaggaccagtcaattctaaacttgaccttcagtgactgtaagggaaacgacaagctacgctatgaggtctcgagcccatacttcaaggtgaacagcgatggcggcttagttgctctgagaaacataactgcagtgggcaaaactctgttcgtccatgcacggaccccccatgcggaagatatggcagaactcgtgattgtcggggggaaagacatccagggctccttgcaggatatatttaaatttgcaagaacttctcctgtcccaagacaaaagaggtccattgtggtatctcccattttaattccagagaatcagagacagcctttcccaagagatgttggcaaggtagtcgatagtgacaggccagaaaggtccaagttccggctcactggaaagggagtggatcaagagcctaaaggaattttcagaatcaatgagaacacagggagcgtctccgtgacacggaccttggacagagaagtaatcgctgtttatcaactatttgtggagaccactgatgtcaatggcaaaactctcgaggggccggtgcctctggaagtcattgtgattgatcagaatgacaaccgaccgatctttcgggaaggcccctacatcggccacgtcatggaagggtcacccacaggcaccacagtgatgcggatgacagcctttgatgcagatgacccagccaccgataatgccctcctgcggtataatatccgtcagcagacgcctgacaagccatctcccaacatgttctacatcgatcctgagaaaggagacattgtcactgttgtgtcacctgcgctgctggaccgagagactctggaaaatcccaagtatgaactgatcatcgaggctcaagatatggctggactggatgttggattaacaggcacggccacagccacgatcatgatcgatgacaaaaatgatcactcaccaaaattcaccaagaaagagtttcaagccacagtcgaggaaggagctgtgggagttattgtcaatttgacagttgaagataaggatgaccccaccacaggtgcatggagggctgcctacaccatcatcaacggaaaccccgggcagagctttgaaatccacaccaaccctcaaaccaacgaagggatgctttctgttgtcaaaccattggactatgaaatttctgccttccacaccctgctgatcaaagtggaaaatgaagacccactcgtacccgacgtctcctacggccccagctccacagccaccgtccacatcactgtcctggatgtcaacgagggcccagtcttctacccagaccccatgatggtgaccaggcaggaggacctctctgtgggcagcgtgctgctgacagtgaatgccacggaccccgactccctgcagcatcaaaccatcaggtattctgtttacaaggacccagcaggttggctgaatattaaccccatcaatgggactgttgacaccacagctgtgctggaccgtgagtccccatttgtcgacaacagcgtgtacactgctctcttcctggcaattgacagtggcaaccctcccgctacgggcactgggactttgctgataaccctggaggacgtgaatgacaatgccccgttcatttaccccacagtagctgaagtctgtgatgatgccaaaaacctcagtgtagtcattttgggagcatcagataaggatcttcacccgaatacagatcctttcaaatttgaaatccacaaacaagctgttcctgataaagtctggaagatctccaagatcaacaatacacacgccctggtaagccttcttcaaaatctgaacaaagcaaactacaacctgcccatcatggtgacagattcagggaaaccacccatgacgaatatcacagatctcagggtacaagtgtgctcctgcaggaattccaaagtggactgcaacgcggcaggggccctgcgcttcagcctgccctcagtcctgctcctcagcctcttcagcttagcttgtctgtgagaactcctgacgtctgaagcttgactcccaagtttccatagcaacaggaaaaaaaaaaatctatccaaatctgaagattgcggtttacagctatcgaacttcacaactaggcctcaattgttccggttttttattttctttacaatttcacttagtctgtacttcatcattttgacagcatcttcctccctcctttaattaatggaatcttctgaattttccctgaatgtttaaagatcatgacatatgacttgatcttctgggagcaggaacaatgactactttttctggtgtgttaacatgtcgctagccagtgctccaggcacccagctttgtctgtgggttagtattggtgtatgtatgagtatctgtatgtatatatacacggtatttatagagagagactatcctggagaagcctcgttttgatgccattcttccttgcaaggttaagcaaggtgggtggaaactaagacacctgaaccctccagggcctcccgcatcaaggtcagcatgaggacagaccacagagctgtcacttttgctccgaagctacttctccactgtcccgttcagtctgaatgctgccacaaccagccaggcaggtccacagagagggagagcagagaaagaagtcctttctctttattgagttcgaggactacaaccaatttacactgccatctgatgccgtgatcctgagccaaggaggtgaggagcagagcaggcaatttcaccaccaaatgccaagaaaagggctgacattttctttcatgggcaccaacctgcatttgtatgtgtcccgaatccacagtcgtactgattctaatggggacacagatcatggtagagaatctctccctcctcagtaaatgtacaactgcacctgtcatcatggaggtcatacatgcatacaaagaggtgtacaggtaccatcttgtatacacatatatacccacatgtacagacatacatttatgcacattcacgctgtttgtttcatatatacaggcataaaatagagtaaatacaggtagttttaaaagtacccttttgtgtgaattgactaccgttgtttgcaaacccgaaaataaaagacgttcattatgtatgaaaagtaactgatttgtattctgtgagcatgtaaaagcggaaagttagtgcttgttctaagattaccttcttgttgataaaccataaatgaatcatcaaagctcacaccaaatttttctatcaaataaaactagtgacagcttgtggctttttattagagctcgccacgaactagggtaaggtgagtgtcttagcatattttaatgcagttgcttactaaaggttttaaccgcacatgcacacacacacgctttcttatgcaatctatgtttgcacttgtgctttcagttagccttctgtaggaagtagaagtcatatgttgtctttgttgtagtgaaattatacagatagagttccatatattgtatttgtttcaatggtaaatccttttggaacatatagaatgcagagatttttttttccattaaaataaatgggtattggtggttaaaaaaaaaaaaaaaaaa

SEQ ID NO: 11680 - DNA, 4255 bp, Homo sapiens
agaggtgaaggggcgggcacccggcggccaggagagagagggagggcgccacgcaccggactgcgggccgagagcgcgcacgccgcgctccgcccctgctgccgcccccgtcgccgccgccgccgccgccgcagcttgggaggtgctgccaccacaggtacctgcacatgttgttctttgtcagtgctgtcaagtgtgtgccagggtgatccatggtcactttccgggatggcagcaaggtgacttcggctgaggatgaccctgactgaaaggctgcgtgagaagatatctcgggccttctacaaccatgggctcctctgtgcatcctatcccatccccatcatcctcttcacagggttctgcatcttagcctgctgctacccactgctgaaactccccttgccaggaacaggacctgtggaattcaccacccctgtgaaggattactcgcccccacctgtggactctgaccgcaaacaaggagagcctactgagcagcctgagtggtatgtgggtgccccggtggcttatgtccagcagatatttgtgaagtcctcagtgtttccctggcacaagaacctcctggcagtagatgtatttcgttcacctttgtcccgggcattccaactggtggaggagatccggaaccacgtgctgagagacagctctgggatcaggagcttggaggagttgtgtctgcaagtgaccgacctgctgccaggccttaggaagctcaggaacctactccctgagcatggatgcctgctgctgtcccctgggaacttctggcagaatgactgggaacgcttccatgctgatcctgacatcattgggaccatccaccagcacgagcctaaaaccctgcagacttcagccacactcaaagacttgttatttggtgttcctgggaagtacagcggggtgagcctctacaccaggaagaggatggtctcctacaccatcaccctggtcttccagcactaccatgccaagttcctgggcagcctgcgtgcccgcctgatgcttctgcaccccagccccaactgcagccttcgggcggagagcctggtccacgtgcacttcaaggaggagattggtgtcgctgagctcatcccccttgtgaccacctacatcatcttgtttgcctacatctacttctccacgcggaagatcgacatggtcaagtccaagtgggggctggccctggctgccgtggtcacagtgctcagctcgctgctcatgtctgtgggactctgcacactcttcggcctgacgcccaccctcaatggcggcgagattttcccctaccttgtggtggttattgggttagagaatgtgttggtgctcaccaagtctgtggtctcaaccccggtagacctggaggtgaagctgcggatcgcccaaggcctaagcagcgagagctggtccatcatgaagaacatggccacggagctgggcatcatcctcatcggctacttcaccctagtgcccgccatccaggagttctgtctctttgctgtcgtggggctggtgtctgacttcttccttcagatgctgtttttcaccactgtcctgtccattgacattcgccggatggagctagcagacctgaacaagcgactgccccctgaggcctgcctgccctcagccaagccagtgggacagccaacgcgctacgagcggcagctggctgtgaggccgtccacaccccacaccatcacgttgcagccgtcttccttccgaaacctgcggctccccaagaggctgcgtgttgtctacttcctggcccgcacccgcctggcacagcgcctcatcatggctggcaccgttgtctggattggcatcctggtatacacagacccagcagggctgcgcaactacctcgctgcccaggtgacggaacagagcccattgggtgagggagccctggctcccatgcccgtgcctagtggcatgctgccccccagccacccggaccctgccttctccatcttcccacctgatgcccctaagctacctgagaaccagacgtcgccaggcgagtcacctgagcgtggaggtccagcagaggttgtccatgacagcccagtcccagaggtaacctgggggcctgaggatgaggaactttggaggaaattgtccttccgccactggccgacgctcttcagctattacaacatcacactggccaagaggtacatcagcctgctgcccgtcatcccagtcacgctccgcctgaacccgagggaggctctggagggccggcaccctcaggacggccgcagtgcctggcccccaccggggcccatacctgctgggcactgggaagcaggacccaagggcccaggtggggtgcaggcccatggagacgtcacgctgtacaaggtggcggcgctgggcctggccaccggcatcgtcttggtgctgctgctgctctgcctctaccgcgtgctatgcccgcgcaactacgggcagctgggtggtgggcccgggcggcggaggcgcggggagctgccctgcgacgactacggctatgcgccacccgagacggagatcgtgccgcttgtgctgcgcggccacctcatggacatcgagtgcctggccagcgacggcatgctgctggtgagctgctgcctggcaggccacgtctgcgtgtgggacgcgcagaccggggattgcctaacgcgcattccgcgcccaggcaggcagcgccgggacagtggcgtgggcagcgggcttgaggctcaggagagctgggaacgactttcagatggtgggaaggctggtccagaggagcctggggacagccctcccctgagacaccgcccccggggccctccgccgccttccctcttcggggaccagcctgacctcacctgcttaattgacaccaacttttcagcgcagcctcggtcctcacagcccactcagcccgagccccggcaccgggcggtctgtggccgctctcgggactccccaggctatgacttcagctgcctggtgcagcgggtgtaccaggaggaggggctggcggccgtctgcacaccagccctgcgcccaccctcgcctgggccggtgctgtcccaggcccctgaggacgagggtggctcccccgagaaaggctccccttccctcgcctgggcccccagtgccgagggttccatctggagcttggagctgcagggcaacctcatcgtggtggggcggagcagcggccggctggaggtgtgggacgccattgaaggggtgctgtgctgcagcagcgaggaggtctcctcaggcattaccgctctggtgttcttggacaaaaggattgtggctgcacggctcaacggttcccttgatttcttctccttggagacccacactgccctcagccccctgcagtttagagggaccccagggcggggcagttcccctgcctctccagtgtacagcagcagcgacacagtggcctgtcacctgacccacacagtgccctgtgcacaccaaaaacccatcacagccctgaaagccgctgctgggcgcttggtgactgggagccaagaccacacactgagagtgttccgtctggaggactcgtgctgcctcttcacccttcagggccactcaggggccatcacgaccgtgtacattgaccagaccatggtgctggccagtggaggacaagatggggccatctgcctgtgggatgtactgactggcagccgggtcagccatgtgtttgctcaccgtggggatgtcacctcccttacctgtaccacctcctgtgtcatcagcagtggcctggatgacctcatcagcatctgggaccgcagcacaggcatcaagttctactccattcagcaggacctgggctgtggtgcaagcttgggtgtcatctcagacaacctgctggtgactggcggccagggctgtgtctccttttgggacctaaactacggggacctgttacagacagtctacctggggaagaacagtgaggcccagcctgcccgccagatcctggtgctggacaacgctgccattgtctgcaactttggcagtgagctcagcctggtgtatgtgccctctgtgctggagaagctggactgagcgcagggcctccttgcccaggcaggaggctggggtgctgtgtgggggccaatgcactgaacctggacttgggggaaagagccgagtatcttccagccgctgcctcctgactgtaataatattaaacttttttaaaaaaccatatcatcatctgtcaggc

SEQ ID NO: 11681 - DNA, 918 bp, Homo sapiens
gctcctcttcctctcaggctccgagacggccccagcagcgtccaccgctgtccatatgccaggagggtggctgggcaggctgctgtctaggccaggctaacccctgcggtgggcgtgggtgtcaccagggccgatggcgcttgtgcagaaacccacgtctctgagctgccagcagccaagctgtcctgatgacattcccgggtgggcgcacaagcctgcactgtccgtatagaatcggcccaggctgtgcagcaggggaacccggagcccggaccccgccacggaggccaggctgccgtgcaccatcctgggtgtcctcgtggtgctccgggcgcaggtggcagcagccatggaggagctggaccggcagaagattggaggattctggagggaagtcggtgtggcctccgatcaaagcctggtgctgacggccccgaagcgggtggagggcttgttcctcaccttgagcgggagtaacctgaccgtgaaggttgcatataacagctcaggaagctgtgagatagagaagatcgtgggctcagaaatagacagtacgggaaaattcgcttttcctggccacagagagatccacgtgctggacaccgactacgagggctacgccatcctgcgggtgtccctgatgtggcggggcaggaactttcgcgtcctcaagtactttactcggagccttgaggacaaggaccggctggggttctggaagtttcgggagctgacagcagacactggtctctacctggcggcccggcctgggcggtgtgccgagctcctgaaggaggagctgatttaatggagttcctgcctcagaccacaaggttcggagcgcccgcccacccctgcccctcctgggcaccctgcccaccaggtcacctgcacctgctctgaataaactgtgaagtc

SEQ ID NO: 11682 - DNA, 4744 bp, Homo sapiens
cgaaatgagagcaaaaagggagagagcaggaaagcgagcacaggcgagtacagtatacaaagtgttttgagtttctgactggcgtgccggaaagatcatgttagcacacccagaaacttcacacgatgcagaccccagaggtaccagcagaaaggtcccctcgtagacggagtatctcagggaccagtacatcagagaaacccaactccatggacactgcaaatacctcacccttcaaagtaccaggattcttcagcaagcgcctgaaaggctccatcaagaggaccaaaagccagtcaaagcttgacagaaacacgagctttcggcttccatcccttcgcagtacagatgacaggtctcgtgggctgcctaaactaaaagagtcacgttcccatgaatccttgctgagcccatgcagcacagtggaatgtctggatcttggtagaggggaacctgtatcagtgaaaccacttcatagtagcatccttggacaagacttctgctttgaggttacctacttaagtggaagtaaatgcttcagctgtaattctgcttctgagagagacaagtggatggaaaaccttcgcaggacagttcaacctaataaggacaattgcaggcgagctgaaaatgttcttcgtttatggatcattgaagccaaggaccttgcccctaaaaagaaatatttctgcgaactgtgccttgatgataccctctttgctcgtacaaccagcaagaccaaagcagacaatattttctggggcgaacattttgaattcttcagccttccacctcttcatagtatcacagttcacatttacaaggatgtggaaaaaaagaaaaaaaaggacaagaataattatgtagggctagtcaacatccccactgccagtgtgactggtcgccaatttgtagaaaagtggtatccagtgagtacacctacacccaacaaaggaaagacaggaggaccttctattcggattaaatcacgtttccaaactatcaccattctgcctatggagcaatacaaagaatttgcagaatttgtcaccagcaactacaccatgctgtgttctgtccttgagccagtaattagtgtgagaaataaagaggagttggcttgtgccttagtgcacattcttcaaagtactggcagagccaaggattttctgactgacttggtgatgtctgaggtggatcgttgtggagagcatgatgtcttgatcttcagagagaacactattgccaccaaatccattgaggaatacctcaagttggtgggacaacagtatcttcatgacgcactgggggagtttatcaaagctttgtatgagtccgatgagaactgtgaagtggatcccagcaaatgttcatctagtgaactgatagaccatcagagcaacctgaaaatgtgctgtgagctggctttctgcaagatcatcaactcttactgtgttttccctcgtgagttgaaagaagtgtttgcatcatggaagcagcagtgcctgaaccgtggcaagcaagacatcagcgagaggctcatcagtgcctcattatttctccgttttctgtgtccagccattatgtctcccagtcttttcaaccttatgcaggagtatcctgatgaccgcacatctcggactctaactcttattgccaaggtcattcagaacctggccaactttgccaagtttggtaacaaagaggaatacatggcattcatgaatgattttttagaacatgaatggggtggaatgaagcgctttcttttggagatctctaatccagacaccatctcaaacaccccaggctttgatggttacattgatctgggccgagagctttcagttttgcattccttactgtgggaagtagtttcccaacttgataagggtgaaaattccttcctacaggcgaccgtggcaaaattggggcctctccctcgtgttcttgctgatattaccaagtcattgactaatcctacgccaatacaacagcaactgagacgcttcactgaacataactccagtccaaatgtcagtggaagcctctcctctgggctgcagaaaatatttgaagaccccactgacagtgatttgcataaactaaaatctccaagccaggacaacacagacagctacttcagagggaaaacattattgctggttcagcaagcctcctctcagagcatgacttattctgaaaaggatgaaagggaaagtagccttcctaatggtcggagcgtctccctcatggacctccaggacactcatgctgctcaagtggagcatgcatctgtcatgcttgatgtgcctatacgcttgaccggaagccagctttccataacccaggtggccagcatcaaacagctgcgggaaacccagagcactccccaaagtgcaccccaagtgagaaggcccctgcacccagccttgaaccagccaggtggccttcagcccttgtcgttccagaaccctgtctatcacctcaataacccaattccagcaatgccaaaggcctctatagattccagtttggagaacctaagcactgccagttccagaagccaaagtaacagtgaagacttcaagctcagtggacccagcaatagcagcatggaagatttcactaaacgtagcactcagagtgaggacttctccaggcggcacacggtgccagatagacacatacctcttgctttgccacgacaaaatagtactgggcaggcccagatccgaaaagtggaccagggtgggttaggtgcccgagccaaagccccaccatccctgccacacagtgcttctttacgtagcaccgggagcatgtcagtggtgtccgcagccctggtggccgaacctgtgcagaatgggagccggtcccggcagcagtcctcttcctccagagagagccctgttcccaaagttagagcaatccagagacaacagacacagcaggttcagtcacctgtggactctgccacaatgtccccagtagagaggacagcagcctgggttctgaacaatgggcagtatgaagaggatgtggaagaaactgagcaaaatctagatgaagccaagcatgctgagaagtatgaacaagaaattactaaactgaaggagcgcctgagagtttccagccggcgactggaggaatatgaacgccgcttgctggtgcaggagcagcagatgcagaagctgctgctggaatacaaggcccgactggaggacagcgaggagcggctccgaagacagcaggaagaaaaagatagccagatgaaaagcatcatcagcaggctaatggctgtggaagaggaactgaagaaggatcatgctgagatgcaagcagttattgatgcaaagcagaaaataattgatgcacaggaaaaacggatcgtgtccctggattcagccaacaccagactgatgagcgcgctgacccaagtgaaggagcggtacagcatgcaggtccgcaatggcatctcccccaccaaccccaccaagctttccatcacggagaatggtgaattcaaaaacagcagctgctgacgggctttgtctgtggaaggagacagaaggaaattgacccactctcctatctccagacctttacctagcccctccaggtttacagaatgttgctacttcacaatggcgatgtggtgagaaactcctgaatgaagaaaggaaccttgtctttcagggcataaggcggcgacttccaaggtcaatgcttttcccccacatctctatgtacatagggaacttagttctgggccatgtacagaaaatatcactgtaatataccaaaaggaagttaataatgtagattacctttttgattattgctatttttattattgttttcctcttgttgaaagcactgcagttgttacaggaagtaaagtaggaactgttgtgtgagcgagacatgagcctgtaggttcagtaggtagagaccaagcatctatctgatagaagcacatggagtgcaataggacattgtgagaaggaatttttcagggattcatctactagtttaaaaaccccactctggccctcttgtcctttcagaaaacatgcaaataccaagatccatacaaaacaataatttattccactgatcaaccaagactggttctggttggacagctaatctgatttggggattcactgtttcagaggacacagacaaaagctgttgcatcaaaactggactttaggagtaatttctattgaactcctgtcaatatgtttatttcctctgtctacagcagatgggagtcttctcttttagacaggggctttttgtttttaaccccaattgtaataaagggtgttctttttcctctttagagtttacaaaactataaatatttgtgtctccacataccatcttcatcttcacacattcactgtgctttcctccccatagtgggagctgtcatcaccaacagggtttactctcccctggagaggttatttaaatagctgtccataagccatccagatcaacaccctttcttccatacagaaaagggctaaccataccacagctggaatctctgaatatttcctattaaaaattttttctatgtgttgttataatttttgtttgggataaagactctatccattgtactagcaaatctatggggggtaattttatctccatctttaacttttaaagtacttcttccccttatcccctcaataaagaaaggaaatccaaaaaaaaaaaaaaaaaa

SEQ ID NO: 11683 - DNA, 5061 bp, Homo sapiens
ggagctctctccgtcgtccggaggagccgcggaggcgctgtcctggccggagatgttcccggcgctggagtccgactcgccgctgcccccggaggacctggacgcggttgtcccagtcagtggagccgtcgccggtggcatgttggatcggatccttctggagtccgtgtgccagcaacagagctgggtccgggtgtacgatggtaaaggaccacccacccaccgtctgtcttgtggtcagtcaccctacaccgagacaacaacgtgggagcggaagtattgcatcctcacagacagccagttggtattgctcaacaaggagaaggagatacctgtggaagggggacaggagcagcagacagattccaccaaagggcgatgcctgaggagaactgtcagtgtcccttccgagggtcagtttcccgagtacccaccagagggcgccactaaactggaggtaccagcagaaaggtcccctcgtagacggagtatctcagggaccagtacatcagagaaacccaactccatggacactgcaaatacctcacccttcaaagtaccaggattcttcagcaagcgcctgaaaggctccatcaagaggaccaaaagccagtcaaagcttgacagaaacacgagctttcggcttccatcccttcgcagtacagatgacaggtctcgtgggctgcctaaactaaaagagtcacgttcccatgaatccttgctgagcccatgcagcacagtggaatgtctggatcttggtagaggggaacctgtatcagtgaaaccacttcatagtagcatccttggacaagacttctgctttgaggttacctacttaagtggaagtaaatgcttcagctgtaattctgcttctgagagagacaagtggatggaaaaccttcgcaggacagttcaacctaataaggacaattgcaggcgagctgaaaatgttcttcgtttatggatcattgaagccaaggaccttgcccctaaaaagaaatatttctgcgaactgtgccttgatgataccctctttgctcgtacaaccagcaagaccaaagcagacaatattttctggggcgaacattttgaattcttcagccttccacctcttcatagtatcacagttcacatttacaaggatgtggaaaaaaagaaaaaaaaggacaagaataattatgtagggctagtcaacatccccactgccagtgtgactggtcgccaatttgtagaaaagtggtatccagtgagtacacctacacccaacaaaggaaagacaggaggaccttctattcggattaaatcacgtttccaaactatcaccattctgcctatggagcaatacaaagaatttgcagaatttgtcaccagcaactacaccatgctgtgttctgtccttgagccagtaattagtgtgagaaataaagaggagttggcttgtgccttagtgcacattcttcaaagtactggcagagccaaggattttctgactgacttggtgatgtctgaggtggatcgttgtggagagcatgatgtcttgatcttcagagagaacactattgccaccaaatccattgaggaatacctcaagttggtgggacaacagtatcttcatgacgcactgggggagtttatcaaagctttgtatgagtccgatgagaactgtgaagtggatcccagcaaatgttcatctagtgaactgatagaccatcagagcaacctgaaaatgtgctgtgagctggctttctgcaagatcatcaactcttactgtgttttccctcgtgagttgaaagaagtgtttgcatcatggaagcagcagtgcctgaaccgtggcaagcaagacatcagcgagaggctcatcagtgcctcattatttctccgttttctgtgtccagccattatgtctcccagtcttttcaaccttatgcaggagtatcctgatgaccgcacatctcggactctaactcttattgccaaggtcattcagaacctggccaactttgccaagtttggtaacaaagaggaatacatggcattcatgaatgattttttagaacatgaatggggtggaatgaagcgctttcttttggagatctctaatccagacaccatctcaaacaccccaggctttgatggttacattgatctgggccgagagctttcagttttgcattccttactgtgggaagtagtttcccaacttgataagggtgaaaattccttcctacaggcgaccgtggcaaaattggggcctctccctcgtgttcttgctgatattaccaagtcattgactaatcctacgccaatacaacagcaactgagacgcttcactgaacataactccagtccaaatgtcagtggaagcctctcctctgggctgcagaaaatatttgaagaccccactgacagtgatttgcataaactaaaatctccaagccaggacaacacagacagctacttcagagggaaaacattattgctggttcagcaagcctcctctcagagcatgacttattctgaaaaggatgaaagggaaagtagccttcctaatggtcggagcgtctccctcatggacctccaggacactcatgctgctcaagtggagcatgcatctgtcatgcttgatgtgcctatacgcttgaccggaagccagctttccataacccaggtggccagcatcaaacagctgcgggaaacccagagcactccccaaagtgcaccccaagtgagaaggcccctgcacccagccttgaaccagccaggtggccttcagcccttgtcgttccagaaccctgtctatcacctcaataacccaattccagcaatgccaaaggcctctatagattccagtttggagaacctaagcactgccagttccagaagccaaagtaacagtgaagacttcaagctcagtggacccagcaatagcagcatggaagatttcactaaacgtagcactcagagtgaggacttctccaggcggcacacggtgccagatagacacatacctcttgctttgccacgacaaaatagtactgggcaggcccagatccgaaaagtggaccagggtgggttaggtgcccgagccaaagccccaccatccctgccacacagtgcttctttacgtagcaccgggagcatgtcagtggtgtccgcagccctggtggccgaacctgtgcagaatgggagccggtcccggcagcagtcctcttcctccagagagagccctgttcccaaagttagagcaatccagagacaacagacacagcaggttcagtcacctgtggactctgccacaatgtccccagtagagaggacagcagcctgggttctgaacaatgggcagtatgaagaggatgtggaagaaactgagcaaaatctagatgaagccaagcatgctgagaagtatgaacaagaaattactaaactgaaggagcgcctgagagtttccagccggcgactggaggaatatgaacgccgcttgctggtgcaggagcagcagatgcagaagctgctgctggaatacaaggcccgactggaggacagcgaggagcggctccgaagacagcaggaagaaaaagatagccagatgaaaagcatcatcagcaggctaatggctgtggaagaggaactgaagaaggatcatgctgagatgcaagcagttattgatgcaaagcagaaaataattgatgcacaggaaaaacggatcgtgtccctggattcagccaacaccagactgatgagcgcgctgacccaagtgaaggagcggtacagcatgcaggtccgcaatggcatctcccccaccaaccccaccaagctttccatcacggagaatggtgaattcaaaaacagcagctgctgacgggctttgtctgtggaaggagacagaaggaaattgacccactctcctatctccagacctttacctagcccctccaggtttacagaatgttgctacttcacaatggcgatgtggtgagaaactcctgaatgaagaaaggaaccttgtctttcagggcataaggcggcgacttccaaggtcaatgcttttcccccacatctctatgtacatagggaacttagttctgggccatgtacagaaaatatcactgtaatataccaaaaggaagttaataatgtagattacctttttgattattgctatttttattattgttttcctcttgttgaaagcactgcagttgttacaggaagtaaagtaggaactgttgtgtgagcgagacatgagcctgtaggttcagtaggtagagaccaagcatctatctgatagaagcacatggagtgcaataggacattgtgagaaggaatttttcagggattcatctactagtttaaaaaccccactctggccctcttgtcctttcagaaaacatgcaaataccaagatccatacaaaacaataatttattccactgatcaaccaagactggttctggttggacagctaatctgatttggggattcactgtttcagaggacacagacaaaagctgttgcatcaaaactggactttaggagtaatttctattgaactcctgtcaatatgtttatttcctctgtctacagcagatgggagtcttctcttttagacaggggctttttgtttttaaccccaattgtaataaagggtgttctttttcctctttagagtttacaaaactataaatatttgtgtctccacataccatcttcatcttcacacattcactgtgctttcctccccatagtgggagctgtcatcaccaacagggtttactctcccctggagaggttatttaaatagctgtccataagccatccagatcaacaccctttcttccatacagaaaagggctaaccataccacagctggaatctctgaatatttcctattaaaaattttttctatgtgttgttataatttttgtttgggataaagactctatccattgtactagcaaatctatggggggtaattttatctccatctttaacttttaaagtacttcttccccttatcccctcaataaagaaaggaaatccaaaaaaaaaaaaaaaaaa

SEQ ID NO: 11684 - DNA, 3999 bp, Homo sapiens
atgcagcaggcgccgcagccttacgagttcttcagcgaggagaacagtccgaaatggcggggactgttggtctcggccctgcggaaggttcaggttcaagtgcatcccactctctcagctaatgaagagtctctctattatattgaagagctgatttttcagctgcttaataaattatgcatggcccagccaaggactgttcaagatgtagaggagcgagttcagaagacctttcctcacccaattgataaatgggccattgctgatgcacaatctgctatagaaaaacgaaaacgaagaaatcctcttttactgcctgtggacaaaatccatccttcgttgaaggaagtattagggtacaaagtggactaccatgtatccctatatattgtggctgtactagagtatatctcagctgatattttaaaattggctggtaattatgtttttaatatccggcattatgaaatatctcagcaggacattaaagtgtcaatgtgtgcggataaggttttgatggacatgtttgatcaggatgacataggtttggtttctctctgtgaagatgaaccctgttcttctggtgaattaaactactatgatcttgtcagaactgaaatcgcagaagaaagacagtatctacgggaattaaatatgatcataaaagtgtttcgagaagcctttctttctgatagaaagctgtttaaaccttctgtatacgaaaagatttttagtaacatttcagatatacatgaattgactgtgaaacttttaggtttgattgaagacacagttgaaatgactgatgaaagcagtcctcatcccttagctggcagctgttttgaagatttggcagaagagcaagcatttgatccttatgaaacattatcacaggacattctttcaccagagtttcatgaacatttcaataaattgatggccagacctgcagttgctctacactttcagtccattgctgatggttttaaagaggcagttcgttatgtccttccacgtcttatgctggtgccagtgtatcactgttggcactactttgagttactaaagcaattgaaagcatgtagtgaagaacaagaagacagagaatgtttgaaccaagctattactgctctcatgaatcaccaaggtagcatggaccgaatttacaagcagtattcacctagacgtcgacctggagatcctgtttgccctttttatagtcaccaattaagaagcaaacacctggctatcaaaaaaatgaatgaaattcagaaaaatatcgatggatgggaaggcaaagatattggacagtgttgtaatgaattcattatggagggaccattgacaagaatcggtgccaaacatgaacggcatatttttctgtttgatggcttaatgatcagttgtaaacctaatcatggccagactcggcttccaggttacactagtgcagaatacaggttaaaagaaaaatttgtcatgaggaaaatacaaatttgtgataaagaagatacttgtgagcacaagcatgcatttgaattagtatccaaagatgagaacagcataatatttgctgctaagtctgctgaagaaaaaaacaactggatggcagcccttatttctcttcattatcgtagtactctagatcgaatgttagattcagtattattgaaagaagaaaatgagcaaccactgagattaccaagtcctgaagtatatcgttttgtagtaaaagactctgaggaaaacattgtttttgaagacaacttgcaaagtagaagtggcatccccattattaaaggaggaactgtagtgaaattaattgaaaggttaacatatcatatgtatgcagatcccaattttgttcgtacttttcttaccacatatcgttcattttgtaaaccacaggaattgctgagcttactgattgaacggtttgaaattccagagccagaacctactgacgcagacaaattggcaatagagaaaggcgagcagccaatcagtgcagaccttaaaagatttcgcaaggaatatgtccaaccagtacaacttagggtacttaatgtattccgccattgggttgaccatcattattatgactttgaaagagacctggaattgctggaaagactagaatccttcatttcaagtgtaagagggaaagctatgaaaaaatgggtagagtcaattgctaagatcatcaggaggaagaagcaagctcaggcaaatggagtaagccataatattacctttgaaagtccacctccaccaattgaatggcatatcagcaaaccaggacagtttgaaacatttgatctcatgacacttgatccaatagaaattgcacgtcagctgacacttttggagtctgatctttacaggaaagttcaaccgtctgaacttgtagggagtgtgtggaccaaagaagataaagaaataaattctccaaatttattaaaaatgattcgccataccacaaatctcaccctctggtttgaaaaatgcattgtggaagcagaaaattttgaagaacgggtggcagtactaagtagaattatagaaattctgcaagtttttcaagatttgaataatttcaatggcgtattggagatagtcagtgcagtaaattcagtgtcagtatacagactagaccatacctttgaggcactgcaggaaaggaaaaggaaaattttggacgaagctgtggaattaagtcaagatcactttaaaaaatacctagtaaaacttaagtcaatcaatccaccttgtgtgcctttttttggaatatatttaacaaatattctgaagaccgaagaagggaataatgattttttaaaaagaaagggaaaagatttaatcaatttcagtaagaggaggaaagtagctgaaattactggagaaattcagcagtatcagaatcagccttactgtttacggatagaaccagatatgaggagattctttgaaaaccttaaccccatgggaagtgcatctgaaaaagagtttacagattatttgttcaacaagtcactagaaattgaacctcgaaactgcaaacagccacctcgatttcctaggaaatcaactttttccttaaaatctcctggaataaggcctaacacaggccgacatggctctacctcaggtactttacgaggtcacccaacaccattagaaagagaaccatgtaaaataagctttagtcggattgctgaaactgagctggaatcaacagtgtcagcaccaacctctccaaatacaccatctactccaccagtatctgcttcttcagaccttagtgtatttttagatgtggatctcaacagctcctgtggcagcaatagcatctttgctccagtgcttttgccacattcaaagtctttctttagttcatgtggtagtttacataaactaagtgaagagcccctgattcctcctcctcttcctcctcgaaaaaagtttgatcatgatgcttcaaattccaagggaaatatgaaatctgatgatgatcctcctgctattccaccgagacagcctcctcctccaaaggtaaaacccagagttcctgttcctactggtgcatttgatgggcctctgcatagtccacctccgccaccaccaagagatcctcttcctgatacccctccaccagttccccttcggcctccagaacactttataaactgtccatttaatcttcagccacctccactggggcatcttcacagagattcagactggctcagagacattagtacgtgtccaaattcgccaagcactcctcctagcacaccctctccaagggtaccgcgtcgatgctatgtgctcagttctagtcagaataatcttgctcatcctccagctccccctgttccaccaaggcagaattcaagccctcatctgccaaaactgccaccaaagacttacaaacgggagctttcgcaccccccattgtacagactgcctttgctagaaaatgcagaaactccccaatga

SEQ ID NO: 11685 - DNA, 9089 bp, Homo sapiens
atgaagaatgaattggcaggagttgaatgggttgagatgaatgaaggagaagattggactttggaataccacataaaagccaacggaggagtttctacaacccaaagactctctctggctcccttgctagatcctgccttctgccagaagaccccagaatacaggcaaagccgccaaagaacaacagttccaacgtcccgcttccgtcacctccctaaggctgcgcccccctcctgggggacgtgcgctgggcccggggccgccggggcggggaagggtcgggcccggggcggggagaagcgtttatatgtcggcgaggggcgtgggagctgccacccgcttgcctgcgggacaccggagtcaagaggctgcccacgccgctgcctgtccgttccacggttccgaggtctccaccgtctccccgcgcgccgcaggcggcaccaaactctgcgctccccgcggtgcgccctgcccgcgcagtgcgcgtccagaggaaatccgccccgggctttcgaagtgcagggctgggggctgcatggaagtttccccaagaacctacagcacactcttgtcattctctgctcccatctccgcgtctcccaccgcgcaccagggcgcctcctgagaggtgcgtcacccaacactgtgtcctcacagcacagggcctggcgagtggcatgtacagtggaccactctcggaaacaaatgaatggagttaatcagggccctgagtatgcagatgttgtgtttttggtggacagctctgatcgcctgggatccaagtccttcccatttgtgaaaatgttcatcaccaaaatgatcagcagtctccccatagaggccgacaaataccgtgtggccctggcccagtacagtgataaacttcacagtgaattccacctgagcaccttcaaaggcaggagccccatgctgaaccacctaaggaagaactttggattcattggcgggtccctgcagataggaaaggctcttcaggaggctcacaggacttatttctctgcacccgcaaatgggagagacaagaaacagtttcccccaattctagtggtcctggcttcatctgagtctgaggataatgtggaagaggcatcaaaggccctgcggaaagacggagtgaaaatcatctctgtaggggtgcagaaagcttctgaggaaaacctgaaggccatggccacgtctcagtttcatttcaaccttcggacagtcagagacctcagcatgttttcccaaaacatgacacacatcatcaaggatgtaataaagtacaaggagggagcagttgatgacatctttgtagaagcttgccaaggcccttctatggccgatgttgtgttcctattggatatgtcaatcaatggaagtgaggagaactttgactatcttaaaggattcttggaagaaagtgtatctgcccttgacataaaggaaaattgcatgagggttggccttgtggcctatagcaatgagacaaaagtgataaattcactgagcatgggcataaataagtcagaggttctccagcatatacagaacctttctccccgaactgggaaggcctatactggagctgccatcaaaaagctcaggaaggaagtttttagtgcacggaatggcagtcggaagaatcagggggtgccccagattgccgtgctggtgacccaccgagattcagaagacaacgtgacaaaagcagctgttaacctccgacgggagggtgtgaccatcttcaccctgggcatagagggcgccagcgacacccagttggaaaagatagcatcccaccctgctgagcagtatgtctccaaactgaagaccttcgctgacctggctgctcacaaccagacatttctgaagaagctgcggaaccaaataacacacacagtctctgtcttttcagagaggactgaaacgctcaaatctggttgtgtggacactgaggaagcagacatctatctgcttatcgatggctcagggagcacccaggccacagatttccatgaaatgaagacgttcctgtcagaggtggtagggatgttcaacattgctccccataaggtgcgggttggggccgttcagtatgctgacagctgggacttggaatttgagatcaataaatactccaacaagcaggatttgggaaaggccattgagaatatcaggcagatgggtgggaatacaaacacaggcgcagcactgaatttcacactgagtctgttgcaaaaagcaaagaagcagcgaggaaacaaagttccatgccaccttgttgtcctgacaaatggcatgtccaaggatagcatcttggagcctgcaaacagactgagagaagagcacatccgagtttatgctatcgggatcaaggaggccaaccaaacacagctgagagaaattgcaggagaggaaaagagagtgtattacgtgcatgactttgatgcattgaaagacataagaaaccaagttgttcaagaaatctgtactgaagaagctgacttgaataaacatcacagtttttcctatgcagcttgcaaagagatgaaagctgacatcatgtttctggtggacagttctggaagtataggacctgaaaacttcagcaaaatgaaaacatttatgaaaaacctggtgagcaagtctcagattggaccagatcgggtgcaaattggtgtagtccagttcagcgacatcaataaggaagagtttcagctcaacagattcatgtcccaaagcgacatttcaaatgcaatagaccaaatggctcacattggacaaaccaccctgactggtagtgccctgagctttgtgtctcagtacttcagccccaccaagggcgcccggcccaacatcagaaagtttctcatcctcatcacggatggtgaagctcaggacatagtaaaggaaccagcagtagtgcttcggcaagaaggtgtaatcatctattctgtgggagtgtttggctccaatgtcacccagcttgaggagatcagtgggaggcccgagatggttttttatgttgagaattttgacattctgcagcgcattgaagatgatcttgtttttggaatatgcagcccccgtgaagaatgcaagcggattgaagttttagacgttgtgtttgtcattgatagctctggcagtattgactatgatgagtataatatcatgaaggattttatgattggcttagtgaaaaaagctgatgtgggcaagaatcaggtccggtttggggctctgaagtatgctgatgacccagaggtgctgttttatctggatgactttggcacaaaactggaggtaatttcagtgctccagaatgaccaagccatgggtggcagtacttatactgctgaggcactgggcttctcagaccacatgttcactgaagcccggggcagccgcctgaacaagggggtcccccaagtcctcattgtgatcaccgatggggaatcccatgatgctgataaactcaatgccacggcaaaggccttgcgggacaaaggcattcttgtcctggctgtggggattgatggtgccaatcccgtggagctgttagccatggcaggatcaagcgacaagtacttcttcgtggagacttttggaggtctgaagggaatattttcagatgtgacagccagtgtctgcaactcttcaaaagtagattgtgaaattgacaaagtagatcttgttttccttatggatggttcaactagcattcagccaaatgacttcaagaaaatgaaggaatttctggcatctgttgttcaagactttgatgtcagcctcaacagagtgcgaataggagcggcccagtttagcgatacctatcacccggagtttccactgggaactttcataggtgaaaaagagatatcatttcagattgaaaacatcaagcagatctttggaaacacacacatcggtgctgcactcagggaggtggaacattacttcaggccagacatgggcagcaggataaatacaggtaccccacaggtgctgctggtccttacagatggccagtcccaagacgaggtggcccaggccgcggaagccctgagacacagaggtatcgacatctactccgtgggcattggggatgtggatgaccagcagctcattcagatcaccgggactgcagagaaaaaactgacagtgcacaacttcgatgaactgaagaaggtcaataaaaggatcgttcgcaacatctgtaccacagcgggtgaaagcaactgtttcgtggatgttgtggtgggatttgatgtctcaactcaggagaaagggcagactttgcttgaaggtcagccttggatggaaacctaccttcaagacatcttacgtgccatcagctccctcaatggagtaagctgtgaggtgggcacagagactcaggtcagtgtggcttttcaagtgaccaatgccatggaaaaatattctcccaagtttgagatctacagtgaaaacatactgaatagcttgaaggatataacagttaaaggaccatctcttctcaatgcaaacctcttggattctctatgggatacatttcagaataaatcagctgctcgaggaaaggtggtccttttattttcagatggattggatgatgatgttgagaaacttgaacaaaaatctgatgaacttagaaaagaaggcctgaatgccctcataactgttgctctggatggacctgctgattcaagtgacttggctgatcttccctatattgaatttgggaaaggatttgagtacaggacacagctctctattggcatgagagaacttggaagccggctgtcaaagcagctggtcaatgttgctgaaaggacatgctgctgtttgttctgcaagtgcattggaggagatggcacaatgggagatcctggaccaccagggaaaaggcttcatgtaaagagagtggtagatttttttaaaaaacaaggctcagaaagaatggaaagaaagggacctccaggttttaaaggcagtgaaggctacctgggagaggagggaatcgctggagaaagaggagcccctggaccagtgggagagcaaggtactaagggatgctatggcaccaaaggtcctaagggaaacagaggactaaatggacaggagggagaagttggggaaaatggaattgacggattaaacggagaacagggtgataatggtcttcctggaagaaaaggagaaaagggagatgagggatctcagggaagcccagggaagagagggactcctggtgaccgtggagcaaagggcctgcgaggggatcccggagctcctggagttgacagtagcatagaaggacccacaggcttgaaaggagaacgtggaagacaaggaacagcaggcatcccaggaccagatggacttgaaggctccctgggacttaagggccctcagggcccaagaggagaggctggtgtgaaaggagaaaaaggaggtgtgggaagtaaaggtccccaggggcctccaggacccggaggagaggcagggaatcaaggccgtttgggaagccaaggaaataaaggagaacctggagatctgggagaaaaaggagctgttggctttcctggtcctcgtggcttgcagggcaatgatggcagtccaggttatggtagtgtcggacgcaagggagcaaagggacaagaaggattccctggagaaagtggacctaagggtgagattggggaccctggtggtccaggagagactgggctgaagggagctagaggcaaaatgatatctgctgggcttccaggagagatgggatcccctggggaaccaggacctcctggacgtaagacatgtgagctcattcagtatgtgcgagaccgcagtcgaaaaccggaatgcccagtgcacccaaccgagttggtgtttgccctggaccactcccgggatgtcactgagcaggaatttgagcggatgaaggagatgatggctttcctggtgagagacattaaggtccgggagaacagctgccccgtgggagcgcacatcgccatcctctcctataactcccacgccaggcaccttgtgcgcttctcagacgcctacaagaagagtcaacttctcagagaaattgaaactattccttatgagagatcctctgccagcagggagattggcagagcaatgcggtttatttccaggaatgtcttcaagcggacgcttccgggggcacacacgagaaaaatcgccacatttttcagcagcggtcagtccgcggatgcccactccatcaccacggctgccatggagttcggcgcgcttgaaatcattcccgtggtgatcactttcagcaacgtgccctcggtcaggcgcgcatttgcgattgacgacactggcacatttcaagtaatagtggttccctccggggccgactacataccagcattagagagactccagcggtgcactttctgctatgtaacccagagtaacttttggttcacagatgtgtgcaagccagatgcttcttgtgaccaagccagaccaccccctgtgcagtcttacatggatgctgctttccttctggatgcctcccggaacatgggaagtgctgaatttgaagacataagagccttccttggagcactattagatcactttgaaatcaccccagagccggagacttctgtcactggagaccgggtggccctattgagccatgctccccccgacttcctacccaacactcagaagagtccagttagagctgagttcaatcttaccacctacagaagtaagcgcctcatgaagaggcatgtgcacgagtcagttaaacaactaaatggagatgcttttattggtcatgccttacagtggactctggacaatgtatttttaagtacacccaatctgagaagaaacaaagtcatatttgtgatatctgctggggaaaccagccacttagatggggaaatcttaaagaaggaatccttgcgagccaaatgtcagggatatgccttatttgtgttttcccttggccctatttgggatgacaaggaactggaggatctcgccagccaccctttggatcaccacctggtccagcttggccgaattcataaacctgaccacagttatggtgtgaagtttgtgaagtcctttataaactcaatcaggcgtgcaatcaacaaatatccaccaataaacttaaaaataaagtgcaacagacttaactctatagatccaaagcagcccccacgaccattccgaagctttgttcctggaccacttaaagctaccctcaaagaagatgtattacagaaggcaaaattctttcaagataaaaaatatctttcaagagtagcaagaagtggcagagatgatgctattcaaaattttatgagaagcacctcccatacctttaagaatggaaggatgatagaaagtgctcccaaacaacatgattaaaaaaatgcttgaacaacttagccttaggaagcatggtaagactctggacttaaatagtaactaaatctgctgccagaactcaagcaacagtttgtaggttatcaggtgacttgaccccctgcattcattggtattaagatatatcttgttcatttatttgaccactcctgacaattccagcactctacgactgatatgtcgaagaactgtttcattagaagacagaagaatgaaagaagtgttttgaaaagtctaatggagatataatttgaaggtaaaatttatatgatgtatgcatatgtgtacatgggtcaatgttaattcttttatctctgtccagttcattttctgcaaacccatcctcctttcctaatttagtaatgtctaatgctcatctatttagtcaaagttattttttaatgttttaagctactccaaaatttatcctagaaatggatgctgtttatatgtcgtatttttttaaaacgtgaccttctattccacttaaacacaccactgtgggagttgtttgcttggactgatgagaagagggtaattttctccatctctaaatcctcctgaactcactgaaaaactcattaattcccgcagaacataaattattgcttttgagctggaagttttctcttcattaggaagcttactgccattttgatggagcttgaagcccccattttgatggacttctagtctgtctttcctgttatggtcatttattaattttcactaatccatatattctttagacaaggagagtcaagaaactacttgtcatagatgaagctctgagttacttttacccatcaggtagctgtttagtcaataataaacagcaccaaaacaggattagcagagctcttaaaaacagccttaaatacacactgagtttagaaaaatgtaagaaaatcattgttttaatctacaaattcatatgcagttgcagagatgcaaaagagatcagagtaagttaaagtaggaaaggttttataaaagtattgatggctgtgtcctcatctgcatttttgtttttatgatagggctgatattttcaacaacgaaacacccaatgttcagaccttacctcagtctaagagctggctccacagttggtagcaatggccctgttaggcagactgtccccctctttgggaatggaaagaagccctgcctggatgcatggagcagatggatactgacaccaaggacattcagattttctttcctatacctattttcataaaatttggaaagaaaaactatctgcagtatttttttaaaacgacttctgctattcttacttagagaaatccagtgatagcacctcatgtcttcagaggagcaagaagttcaaggagttaaatgtcacattcatactcaggtaatagagaagaataaaacacatcaggtttgcttcatctatcctaagtggtgcttaggggttcagaaaaaatgtttcaagtacaggaaattaatgagcaatatttacaatgtattttaataaaagggatttttctagttaactctgagttaagcacgaactcctttcttttgttaattgttggaaataccattaagatgtatttgtctgtttttctgcattggcaagtaaagaacataaaacaaatatt

SEQ ID NO: 11686 - DNA, 2271 bp, Homo sapiens
ccgttgtggcgagcgctacacgaggcaaacgacttctcccttctttgaactggaccccgcgagcaccagagtcggcgtaactatcgcctgacaggcatttaaatcaaacggtattgagatggattgggttatgaaacataatggtccaaatgacgctagtgatgggacagtacgacttcgtggactaccatttggttgcagcaaagaggaaatagttcagttctttcaagggttggaaatcgtgccaaatgggataacattgacgatggactaccaggggagaagcacaggggaggccttcgtgcagtttgcttcaaaggagatagcagaaaatgctctggggaaacacaaggaaagaatagggcacaggtatattgagatcttcagaagtagcaggagtgaaatcaaaggattttatgatccaccaagaagattgctgggacagcgaccgggaccatatgatagaccaataggaggaagagggggttattatggagctgggcgtggaagttatggaggttttgatgactatggtggctataataattacggctatgggaatgatggctttgatgacagaatgagagatggaagaggtatgggaggacatggctatggtggagctggtgatgcaagttcaggttttcatggtggtcatttcgtacatatgagagggttgccttttcgtgcaactgaaaatgacattgctaatttcttctcaccactaaatccaatacgagttcatattgatattggagctgatggcagagccacaggagaagcagatgtagagtttgtgacacatgaagatgcagtagctgccatgtctaaagataaaaataacatgcaacatcgatatattgaactcttcttgaattctactcctggaggcggctctggcatgggaggttctggaatgggaggctacggaagagatggaatggataatcagggaggctatggatcagttggaagaatgggaatggggaacaattacagtggaggatatggtactcctgatggtttgggtggttatggccgtggtggtggaggcagtggaggttactatgggcaaggcggcatgagtggaggtggatggcgtgggatgtactgaaagcaaaaacaccaacatacaagtcttgacaacagcatctggtctactagactttcttacagatttaatttcttttgtattttaagaactttataatgactgaaggaatgtgttttcaaaatattatttggtaaagcaacagattgtgatgggaaaatgttttctgtaggtttatttgttgcatactttgacttaaaaataaatttttatattcaaaccactgatgttgatactttttatatactagttactcctaaagatgtgctgccttcataagatttgggttgatgtattttactattagttctacaagaagtagtgtggtgtaattttagaggataatggttcacctctgcgtaaactgcaagtcttaagcagacatctggaatagagcttgacaaataattagtgtaacttttttctttagttcctcctggacaacactgtaaatataaagcctaaagatgaagtggcttcaggagtataaattcagctaattatttctatattattatttttcaaatgtcatttatcaggcatagctctgaaacattgatgatctaagaggtattgatttctgaatattcataattgtgttacctgggtatgagagtgttggaagctgaattctagccctagattttggagtaaaaccccttcagcacttgaccgaaataccaaaaatgtctccaaaaaattgatagttgcaggttatcgcaagatgtcttagagtagggttaaggttctcagtgacacaagaattcagtattaagtacataggtatttactatggagtataattctcacaattgtattttcagttttctgcccaatagagtttaaataactgtataaatgatgactttaaaaaaatgtaagcaacaagtccatgtcatagtcaataaaaacaatcctgcagttgggttttgtatctgatccctgcttggagttttagtttaaagaatctatatgtagcaaggaaaaggtgctttttaattttaatccctttgatcaatatggcttttttccaaattggctaatggatcaaaatgaaacctgttgatgtgaattcagttattgaacttgttacttgtttttgccagaaatgttattaataaatgtcaatgtgggagataaaaaaaaaaaaaaaaaaaaaa

SEQ ID NO: 11687 - DNA, 2316 bp, Homo sapiens
ccgttgtggcgagcgctacacgaggcaaacgacttctcccttctttgaactggaccccgcgagcaccagagtcggcgtaactatcgcctgacaggcatttaaatcaaacggtattgagatggattgggttatgaaacataatggtccaaatgacgctagtgatgggacagtacgacttcgtggactaccatttggttgcagcaaagaggaaatagttcagttctttcaagggttggaaatcgtgccaaatgggataacattgacgatggactaccaggggagaagcacaggggaggccttcgtgcagtttgcttcaaaggagatagcagaaaatgctctggggaaacacaaggaaagaatagggcacaggtatattgagatcttcagaagtagcaggagtgaaatcaaaggattttatgatccaccaagaagattgctgggacagcgaccgggaccatatgatagaccaataggaggaagagggggttattatggagctgggcgtggaagtatgtatgacagaatgcgacgaggaggtgatggatatgatggtggttatggaggttttgatgactatggtggctataataattacggctatgggaatgatggctttgatgacagaatgagagatggaagaggtatgggaggacatggctatggtggagctggtgatgcaagttcaggttttcatggtggtcatttcgtacatatgagagggttgccttttcgtgcaactgaaaatgacattgctaatttcttctcaccactaaatccaatacgagttcatattgatattggagctgatggcagagccacaggagaagcagatgtagagtttgtgacacatgaagatgcagtagctgccatgtctaaagataaaaataacatgcaacatcgatatattgaactcttcttgaattctactcctggaggcggctctggcatgggaggttctggaatgggaggctacggaagagatggaatggataatcagggaggctatggatcagttggaagaatgggaatggggaacaattacagtggaggatatggtactcctgatggtttgggtggttatggccgtggtggtggaggcagtggaggttactatgggcaaggcggcatgagtggaggtggatggcgtgggatgtactgaaagcaaaaacaccaacatacaagtcttgacaacagcatctggtctactagactttcttacagatttaatttcttttgtattttaagaactttataatgactgaaggaatgtgttttcaaaatattatttggtaaagcaacagattgtgatgggaaaatgttttctgtaggtttatttgttgcatactttgacttaaaaataaatttttatattcaaaccactgatgttgatactttttatatactagttactcctaaagatgtgctgccttcataagatttgggttgatgtattttactattagttctacaagaagtagtgtggtgtaattttagaggataatggttcacctctgcgtaaactgcaagtcttaagcagacatctggaatagagcttgacaaataattagtgtaacttttttctttagttcctcctggacaacactgtaaatataaagcctaaagatgaagtggcttcaggagtataaattcagctaattatttctatattattatttttcaaatgtcatttatcaggcatagctctgaaacattgatgatctaagaggtattgatttctgaatattcataattgtgttacctgggtatgagagtgttggaagctgaattctagccctagattttggagtaaaaccccttcagcacttgaccgaaataccaaaaatgtctccaaaaaattgatagttgcaggttatcgcaagatgtcttagagtagggttaaggttctcagtgacacaagaattcagtattaagtacataggtatttactatggagtataattctcacaattgtattttcagttttctgcccaatagagtttaaataactgtataaatgatgactttaaaaaaatgtaagcaacaagtccatgtcatagtcaataaaaacaatcctgcagttgggttttgtatctgatccctgcttggagttttagtttaaagaatctatatgtagcaaggaaaaggtgctttttaattttaatccctttgatcaatatggcttttttccaaattggctaatggatcaaaatgaaacctgttgatgtgaattcagttattgaacttgttacttgtttttgccagaaatgttattaataaatgtcaatgtgggagataaaaaaaaaaaaaaaaaaaaaa

SEQ ID NO: 11688 - DNA, 3568 bp, Homo sapiens
atagttttcaggttaagaaagccagaatctttgttcagccacactgactgaacagacttttagtggggttacctggctaacagcagcagcggcaacggcagcagcagcagcagcagcagcagcagcagcagcagggctcctgggataactcaggcatagttcaacactatgggtcctcctctgaagctcttcaaaaaccagaaataccaggaactgaagcaggaatgcatcaaagacagcagacttttctgtgatccaacatttctgcctgagaatgattctcttttctacaaccgactgcttcctggaaaggtggtgtggaaacgtccccaggacatctgtgatgacccccatctgattgtgggcaacattagcaaccaccagctgacccaagggagactggggcacaagccaatggtttctgcattttcctgtttggctgttcaggagtctcattggacaaagacaattcccaaccataaggaacaggaatgggaccctcaaaaaacagaaaaatacgctgggatatttcactttcgtttctggcattttggagaatggactgaagtggtgattgatgacttgttgcccaccattaacggagatctggtcttctctttctccacttccatgaatgagttttggaatgctctgctggaaaaagcttatgcaaagctgctaggctgttatgaggccctggatggtttgaccatcactgatattattgtggacttcacgggcacattggctgaaactgttgacatgcagaaaggaagatacactgagcttgttgaggagaagtacaagctattcggagaactgtacaaaacatttaccaaaggtggtctgatctgctgttccattgagtctcccaatcaggaggagcaagaagttgaaactgattggggtctgctgaagggccatacctataccatgactgatattcgcaaaattcgtcttggagagagacttgtggaagtcttcagtgctgagaaggtgtatatggttcgcctgagaaaccccttgggaagacaggaatggagtggcccctggagtgaaatttctgaagagtggcagcaactgactgcatcagatcgcaagaacctggggcttgttatgtctgatgatggagagttttggatgagcttggaggacttttgccgcaactttcacaaactgaatgtctgccgcaatgtgaacaaccctatttttggccgaaaggagctggaatcggtgttgggatgctggactgtggatgatgatcccctgatgaaccgctcaggaggctgctataacaaccgtgataccttcctgcagaatccccagtacatcttcactgtgcctgaggatgggcacaaggtcattatgtcactgcagcagaaggacctgcgcacttaccgccgaatgggaagacctgacaattacatcattggctttgagctcttcaaggtggagatgaaccgcaaattccgcctccaccacctctacatccaggagcgtgctgggacttccacctatattgacacccgcacagtgtttctgagcaagtacctgaagaagggcaactatgtgcttgtcccaaccatgttccagcatggtcgcaccagcgagtttctcctgagaatcttctctgaagtgcctgtccagctcagggaactgactctggacatgcccaaaatgtcctgctggaacctggctcgtggctacccgaaagtagttactcagatcactgttcacagtgctgaggacctggagaagaagtatgccaatgaaactgtaaacccatatttggtcatcaaatgtggaaaggaggaagtccgttctcctgtccagaagaatacagttcatgccatttttgacacccaggccattttctacagaaggaccactgacattcctattatagtacaggtctggaacagccgaaaattctgtgatcagttcttggggcaggttactctggatgctgaccccagcgactgccgtgatctgaagtctctgtacctgcgtaagaagggtggtccaactgccaaagtcaagcaaggccacatcagcttcaaggttatttccagcgatgatctcactgagctctaaatctgcaatcccagagaatcctgacaaagcgtgccacccttttattttccgtcaggtgccaggtcttagttaagattcacaatctttagaaagaatgagattcacaataattaactcttcctctcttctgataaattccccatacctcccaatccaagtagcatctgtagctacataacctatatacctccagcagctggacatggggaggcgacagtcctatctagacatcatacacatttgccaagaaaggatctctggggcttccgggggtgagattcaagcaggacaataacaagaggctggacaccctacagatgtctttgatgttttcagttgtttgatatatctcccctgtagggcatgttgaggaaggaggagggctgatcaaggccaagctggtctagcctgacatcctagctcctgactgaacactatagacttcccagcagcatttcacccagcagccagagccggctttaagtccccaacccttacagacaccactgccaccaccaccaaccacgaccaccaccaccaccaccactcaccaccatcatcacctccggaaagtgtagtcctgccctaacccaagtcacccccgacagtaaattttaccttcatgttgagaaagcttcctggtgcttaatcaagagctggagttcaatgagtcctagacagtgagaggggcctgagcttcagctcaatggaagcctgctgtgtgccacaagacggaaaagtggaagaagctgcagtgggagacaaagcctcggtcccccacccatccacacacacctacactcacacacgcgcacatgggcgcgcacgaactaccattcaggcagtcagtgggcaagaggaaagataagtaagtaccatacacacctaaaagatgagagaattcatccagacatattacagccagtttggggcccctgactgcaatgtgaaacctctcgctgctgctaggtttacaaacaagcccattgtcctgtgcctcctaatatcatttgtactgaagaccccatctggggacttgagactttggtcccagcccagactcctcagacttttctctcagttgggatgcttcactcgctgggggtgtttgtttgccctctcatttttcagtacttctacagaattttctctagagtcagtcattatgaaatgtacttccctccatcttaacctatcaactttctgcccctccttcaaggcccagtataaatgccacctcctccatgaagccttccctaattccaccccaaacccccaccttcaacaatatttcaacgcttctgcaatgatgaaaaagaaacatagttgtagtacttagcctacctagaccagcaagcattcatttttagctcgctcattttttaccatgttttccagtctgtttaacttctgcagtgccttcactacactgccttacataaaccaaatcacaataaagttcatattcagtaca

SEQ ID NO: 11689 - DNA, 4203 bp, Homo sapiens
ttccttggagcctagcggctctccccgcgtccaagatggcggcagaagcagctggtgggaaatacagaagcacagtcagcaaaagcaaagacccctcggggctgctcatctctgtgatcaggactctgtctactagtgacgatgtcgaagacagggaaaatgaaaagggtcgccttgaagaagcctacgagaaatgtgaccgtgacctggatgaattgattgtacagcactacacagaattgacgacagccattcgcacataccagagcatcacagagcgcatcactaactcccgaaataaaataaagcaggtaaaagagaacctgctttcatgcaagatgctgctgcactgcaaacgggatgagcttcggaaactgtggattgaaggaattgagcataagcatgtcctgaacttgttggatgaaattgagaatatcaagcaagtgcctcaaaagctggaacagtgcatggccagcaagcactatctcagtgccactgacatgttggtgtcagcagttgagtctttggagggccccctgctccaggtggaaggactgagtgaccttcgactagagcttcacagcaagaagatgaaccttcacttggttctcatagatgaactacaccggcacctgtacatcaaatcgactagccgagttgtgcagcgtaacaaggaaaaagggaaaatcagctccctcgtgaaagatgcttctgttcctctgattgatgttacaaacctccctactcctcgaaaattccttgatacctctcactattctactgctggaagctcaagtgtgagggagataaatctgcaggacatcaaggaagatttagaattggatccagaggaaaacagcaccctgtttatgggtatcctcattaagggcttggcgaaactgaagaagatcccagaaacagttaaggcaatcatagagcgcttggagcaggagttgaagcaaattgtgaagaggtctacaacccaggtggcagacagtggctatcagcggggggagaacgttactgtggagaaccaaccaaggttgcttctagaactgctggagttactgtttgacaagtttaatgctgtagccgctgcacactctgtggtcctgggatacctgcaggacactgtagtgactccactgactcagcaggaagatatcaaactgtatgatatggcagatgtatgggtgaagatccaagatgttctacagatgctattaactgagtacttggatatgaaaaatactcgtacggcctctgaaccatcagctcaactaagctatgccagcactggacgagagtttgcagccttttttgccaagaagaaacctcaaaggccaaaaaattctcttttcaagttcgaatcgtcctcccatgccatcagtatgagcgcctatctgcgagaacagagaagggagctctatagtcggagtggagaactgcaagggggtcctgatgacaacttaattgaaggtggaggaacaaaatttgtctgcaaacctggagccagaaacattaccgtcatattccacccattactaagatttattcaggagattgagcatgctctgggtcttggcccagccaaacagtgtcctcttcgagagtttctcaccgtgtacatcaaaaacatctttctcaatcaagtcttggctgagatcaacaaggagattgaaggagtcactaaaacatctgaccctttgaagattctggccaacgcagacaccatgaaggtgctgggagtgcagcggcctctcctacagagcacaatcattgtggagaagacagttcaagacctcctgaacctgatgcatgacttgagtgcatattcagatcaattcctcaacatggtgtgcgtgaagctccaggagtacaaggacacctgcactgcagcttacaggggtattgtccagtcagaagaaaaacttgtcatcagtgcatcctgggcaaaagatgatgatatcagcagactcttgaaatctctaccaaactggatgaatatggctcaacccaaacagctgaggccaaaaagagaggaggaagaagatttcataagggcagcttttggcaaggagtctgaagttcttattgggaacctgggtgataaattaatccctccacaagacatccttcgtgacgtcagtgacctcaaagccttggccaacatgcatgaaagcctggaatggttggcaagtcgaacaaagtcagctttctccaatctttctacatcccagatgctttctcctgctcaagacagccacacgaacacggatctccccccagtgtcagagcagatcatgcagactctcagtgaacttgccaaatcgttccaggatatggctgaccgctgcttgcttgtcttacatctggaagtgagggttcactgtttccactatcttatccctcttgcaaaggaggggaactatgccattgtggctaatgtggaaagtatggattatgaccccctggtggtcaagctcaacaaagatatcagcgccattgaagaggccatgagcgccagccttcagcagcacaagttccagtatatcttcgaaggcctgggccacctgatctcctgcatcctcattaatggtgcccagtacttcaggcgcatcagtgagtctggcatcaagaaaatgtgtaggaacatttttgttcttcagcagaatttgaccaacatcaccatgtcgcgggaggcagacctggactttgcaaggcagtactacgagatgctttacaacacagctgacgagctcctgaacctggtggtggaccagggtgtgaagtacacggagctggagtacatccacgctctgaccctgctgcaccgcagccagactggggtgggggaactgaccacccagaacacgaggctgcagaggctcaaagagatcatctgcgagcaggctgccatcaagcaagccaccaaggacaagaagataactaccgtttagcagggcgtactgcggttggtgacgggggtcccctcagtcacactcacttttttccttggtatgttattgagtatattctgagcttagttttctctacagtgatactttagtggagaggaggtgtaaggattctttctctctggttttggcttttcatataaatgctaaaggaaggcgacagtacagagtgttttggttgaacaactactttaatgcagtcaaatctaacgggactagggtgggatagggaggaaggtggtatcaaattgttggactctgaaaaacaagtggatggattactaatatttgatttattactcaatatatatataattccagccttggaaagtaggaaagtaggctgctacctaacttttagtcccttccaaaaccatttagtagggttctattacataaacagtagggtttttcctctcctgaccttatccgtttacagttcaatgaaataagtgtatgtgcattgctgtctgtctctattgccaaaatcaaataaatggcttctcagctgctgtttacaacaaacttccctaaccaaaacagaacctctaatttagggctaggaatagaagtcttttgatcccagtccctgggacagttttgtatgctgtatcttgtacacaggttgtaggttggtttattgccattttgttttatttctgctgtataaaaaccaagagccagacaattagacaactatggaggaatgaaaggcaattcaaacatctgcttgattcccgccccgccacccctaatttctgagagaataatggttagagaacattgcatctcacttgaaacatcctttgggggtaaatgattcttaggtgctcacttggtctgagctcagctgaatgcagggaagatgggacagagtgacatttctcctctgtgcggcctccagctgagcctgtctctgaattgttccctcccccgcaatgtgggcacttaccatgttcctggcacactggacctcaccatgtcccccggtcaccagtcctcttgctgcccatggttcataggtcatagaaggcagcaatgcactgactgggccacatcttgaaaactcgtggaaagggaaaggggaggagatgggactttgaccacacacagtgatgcctcacaccctgaaggtgggggattttgtacctgtttgtacaactttggtcttgatgggaaaaatggagaattaaaaagtgttttgagaagcttaaaaaaaaaaaaa

SEQ ID NO: 11690 - DNA, 1860 bp, Homo sapiens
cgagccggcaaaggcttgggtgtgagacagcagcggtggcagacaccgcagaagcaaagagcagtgaggctcctgcattcgggtggagcaccatggacgaagctggcagctctgcgagcggcgggggcttccgcccgggcgtggacagcctggacgaaccgcccaacagccgcatcttccttgtgatcagcaagtacacacctgagtcggtgctgagggagcgcttctcgccttttggcgacatccaggacatctgggtggtgcgggacaagcacaccaaggagtccaagggcattgctttcgtcaagttcgcccgcagctcacaggcctgcagggccatggaggagatgcatggccagtgcctcggccccaacgacaccaagcccatcaaggttttcattgctcagtcccgatcatctggaagtcaccgagatgttgaagatgaagaacttacaagaatctttgttatgataccaaagtcctacacagaagaagatctgcgggaaaaatttaaggtgtatggagatatcgagtattgcagcattattaagaataaagtgactggagaaagtaaaggtttgggctacgtacgatacttaaaaccatcacaagctgcccaagcaatagaaaactgtgatcgaagttttagagcaatcttggctgaacctaaaaataaagcatctgaatcctctgaacaagattattatagtaatatgaggcaagaagctttgggacatgaacctagagtaaatatgtttccatttgaacaacaatctgaattttcaagttttgacaagaatgatagccgaggccaggaagcaatctccaaacgcttgtcagttgtatcaagagttcctttcactgaagaacagcttttcagcatttttgatatagtaccaggattggaatattgtgaagttcaacgagatccttattcaaattatggtcatggagtggttcagtattttaatgtagcatcagctatttatgcaaaatacaaattacatggatttcagtaccctcctgggaaccgaataggtgtttccttcattgatgatggaagtaatgcaacagatctccttagaaaaatggcaacacagatggtagctgcacagcttgcatcaatggtgtggaataacccaagtcagcaacaatttatgcaatttggaggaagctctggatcacagttgcctcaaatccagacagatgttgtacttccatcatgcaaaaaaaaagctcctgctgaaactcctgtgaaagaaagactttttattgtgtttaatcctcatcctttacctttagacgtattagaagatatattctgtcgttttggtaacctgatcgaagtttaccttgtgtcaggaaaaaatgtggggtatgccaagtatgccgatagaataagtgctaatgatgccattgccactctacatggaaagattctgaatggggtgagacttaaagttatgctggcagattcgccaagagaagaatctaacaaacggcaaagaacttactgattcttgagaacaaagactaaataatgacataatcctcagctgactgactgaaaatgtgactggacgcattccctgtggacagttgacagctttttttttttccatatacctgatagtctgtgtacagcattgttttgtctgggaagcagggattgctgacatgtatttttgaatccatacattaatgctaaaacgaatatagtagttgttccttagagcaatatgttgttacgtgtagcagaaataaagttttctttgcttaactaaaaaaaaaaaaaaaaaaaaaaaaaaaaaaaaaaaaaaaaaaaaaaaaaaaaaaaaaaaaaaaaaaaaaaaaaaaaaa

SEQ ID NO: 11691 - DNA, 8019 bp, Homo sapiens
gcggcccggtgcgggtgtcggggagaccgggctctctgcccggcgcggcgcggcgcggctcggcccacgagcgaccaccgacatggagtgggctcgggcggccaagtagccgcttctccggagcccggtgccagtgccgcccgcagcccgccttccacccccggccgcgccgccggtcaggccctagggtgaagccgggaggaaaatgaagagttttcaccggaatccgttgaaaataggactgactgcaaagccttaaagaaagaaggacctcgggaggagaaacgaaaagccgcctccgggcaagacttggcgtgctccgagccgaggggctgcttcagggacctcgccccctccctttcccgctggagaaattgccgctgatgcattatccaagtggtggttgggaggatttgcagcaacatttttggttttccctcccccttctatgcattctgtttttttcctcccttttctgtttttcttcttcccgggaagtgaattgctgatgcaaatcggactttattcattaatgatgcaaccggattcgtttcaggattacgttgcacgagttgaattttgaatgaaggagaagagtttttttttttttttttaaagaagtgttgactctctagttcgttgtacttttaattattattttatttaaatatacgacttaattgtattcttttaaaaatgcattaagtatatattttatggtaatttaccctcaaaatatatgtatatgggtgaaattgaagacgcttcagttaagtgaggttactggtgtgttggatgtttaattcagcaccagcattgcatgacagttgtttgaataacaagtggtttatttttaaaaccataccttttaaaatttaggttcagataatagtaaaagtcatcataataatttaaaggaaaaccagcagaaatcgaagcaaacatgtctggagaagtgcgtttgaggcagttggagcagtttattttggacgggcccgctcagaccaatgggcagtgcttcagtgtggagacattactggatatactcatctgcctttatgatgaatgcaataattctccattgagaagagagaagaacattctcgaatacctagaatgggctaaaccatttacttctaaagtgaaacaaatgcgattacatagagaagactttgaaatattaaaggtgattggtcgaggagcttttggggaggttgctgtagtaaaactaaaaaatgcagataaagtgtttgccatgaaaatattgaataaatgggaaatgctgaaaagagctgagacagcatgttttcgtgaagaaagggatgtattagtgaatggagacaataaatggattacaaccttgcactatgctttccaggatgacaataacttatacctggttatggattattatgttggtggggatttgcttactctactcagcaaatttgaagatagattgcctgaagatatggctagattttacttggctgagatggtgatagcaattgactcagttcatcagctacattatgtacacagagacattaaacctgacaatatactgatggatatgaatggacatattcggttagcagattttggttcttgtctgaagctgatggaagatggaacggttcagtcctcagtggctgtaggaactccagattatatctctcctgaaatccttcaagccatggaagatggaaaagggagatatggacctgaatgtgactggtggtctttgggggtctgtatgtatgaaatgctttacggagaaacaccattttatgcagaatcgctggtggagacatacggaaaaatcatgaaccacaaagagaggtttcagtttccagcccaagtgactgatgtgtctgaaaatgctaaggatcttattcgaaggctcatttgtagcagagaacatcgacttggtcaaaatggaatagaagactttaagaaacacccatttttcagtggaattgattgggataatattcggaactgtgaagcaccttatattccagaagttagtagcccaacagatacatcgaattttgatgtagatgatgattgtttaaaaaattctgaaacgatgcccccaccaacacatactgcattttctggccaccatctgccatttgttggttttacatatactagtagctgtgtactttctgatcggagctgtttaagagttacggctggtcccacctcactggatcttgatgttaatgttcagaggactctagacaacaacttagcaactgaagcttatgaaagaagaattaagcgccttgagcaagaaaaacttgaactcagtagaaaacttcaagagtcaacacagactgtccaagctctgcagtattcaactgttgatggtccactaacagcaagcaaagatttagaaataaaaaacttaaaagaagaaattgaaaaactaagaaaacaagtaacagaatcaagtcatttggaacagcaacttgaagaagctaatgctgtgaggcaagaactagatgatgcttttagacaaatcaaggcttatgaaaaacaaatcaaaacgttacaacaagaaagagaagatctaaataaggaactagtccaggctagtgagcgattaaaaaaccaatccaaagagctgaaagacgcacactgtcagaggaaactggccatgcaggaattcatggagatcaatgagcggctaacagaattgcacacccaaaaacagaaacttgctcgccatgtccgagataaggaagaagaggtggacctggtgatgcaaaaagttgaaagcttaaggcaagaactgcgcagaacagaaagagccaaaaaagagctggaagttcatacagaagctctagctgctgaagcatctaaagacaggaagctacgtgaacagagtgagcactattctaagcaactggaaaatgaattggagggactgaagcaaaaacaaattagttactcaccaggagtatgcagcatagaacatcagcaagagataaccaaactaaagactgatttggaaaagaaaagtatcttttatgaagaagaattatctaaaagagaaggaatacatgcaaatgaaataaaaaatcttaagaaagaactgcatgattcagaaggtcagcaacttgctctcaacaaagaaattatgattttaaaagacaaattggaaaaaaccagaagagaaagtcaaagtgaaagggaggaatttgaaagtgagttcaaacaacaatatgaacgagaaaaagtgttgttaactgaagaaaataaaaagctgacgagtgaacttgataagcttactactttgtatgagaacttaagtatacacaaccagcagttagaagaagaggttaaagatctagcagacaagaaagaatcagttgcacattgggaagcccaaatcacagaaataattcagtgggtcagcgatgaaaaggatgcacgagggtatcttcaggccttagcttctaaaatgactgaagaattggaggcattaagaaattccagcttgggtacacgagcaacagatatgccctggaaaatgcgtcgttttgcgaaactggatatgtcagctagactggagttgcagtcggctctggatgcagaaataagagccaaacaggccatccaagaagagttgaataaagttaaagcatctaatatcataacagaatgtaaactaaaagattcagagaagaagaacttggaactactctcagaaatcgaacagctgataaaggacactgaagagcttagatctgaaaagggtatagagcaccaagactcacagcattctttcttggcatttttgaatacgcctaccgatgctctggatcaatttgaaactgtagactccactccactttcagttcacacaccaaccttaaggaaaaaaggatgtcctggttcaactggctttccacctaagcgcaagactcaccagttttttgtaaaatcttttactactcctaccaagtgtcatcagtgtacctccttgatggtgggtttaataagacagggctgttcatgtgaagtgtgtggattctcatgccatataacttgtgtaaacaaagctccaaccacttgtccagttcctcctgaacagacaaaaggtcccctgggtatagatcctcagaaaggaataggaacagcatatgaaggtcatgtcaggattcctaagccagctggagtgaagaaagggtggcagagagcactggctatagtgtgtgacttcaaactctttctgtacgatattgctgaaggaaaagcatctcagcccagtgttgtcattagtcaagtgattgacatgagggatgaagaattttctgtgagttcagtcttggcttctgatgttatccatgcaagtcggaaagatataccctgtatatttagggtcacagcttcccagctctcagcatctaataacaaatgttcaatcctgatgctagcagacactgagaatgagaagaataagtgggtgggagtgctgagtgaattgcacaagattttgaagaaaaacaaattcagagaccgctcagtctatgttcccaaagaggcttatgacagcactctacccctcattaaaacaacccaggcagccgcaatcatagatcatgaaagaattgctttgggaaacgaagaagggttatttgttgtacatgtcaccaaagatgaaattattagagttggtgacaataagaagattcatcagattgaactcattccaaatgatcagcttgttgctgtgatctcaggacgaaatcgtcatgtacgactttttcctatgtcagcattggatgggcgagagaccgatttttacaagctgtcagaaactaaagggtgtcaaaccgtaacttctggaaaggtgcgccatggagctctcacatgcctgtgtgtggctatgaaaaggcaggtcctctgttatgaactatttcagagcaagacccgtcacagaaaatttaaagaaattcaagtcccatataatgtccagtggatggcaatcttcagtgaacaactctgtgtgggattccagtcaggatttctaagataccccttgaatggagaaggaaatccatacagtatgctccattcaaatgaccatacactatcatttattgcacatcaaccaatggatgctatctgcgcagttgagatctccagtaaagaatatctgctgtgttttaacagcattgggatatacactgactgccagggccgaagatctagacaacaggaattgatgtggccagcaaatccttcctcttgttgttacaatgcaccatatctctcggtgtacagtgaaaatgcagttgatatctttgatgtgaactccatggaatggattcagactcttcctctcaaaaaggttcgacccttaaacaatgaaggatcattaaatcttttagggttggagaccattagattaatatatttcaaaaataagatggcagaaggggacgaactggtagtacctgaaacatcagataatagtcggaaacaaatggttagaaacattaacaataagcggcgttattccttcagagtcccagaagaggaaaggatgcagcagaggagggaaatgctacgagatccagaaatgagaaataaattaatttctaatccaactaattttaatcacatagcacacatgggtcctggagatggaatacagatcctgaaagatctgcccatgaaccctcggcctcaggaaagtcggacagtattcagtggctcagtcagtattccatctatcaccaaatcccgccctgagccaggccgctccatgagtgctagcagtggcttgtcagcaaggtcatccgcacagaatggcagcgcattaaagagggaattctctggaggaagctacagtgccaagcggcagcccatgccctccccgtcagagggctctttgtcctctggaggcatggaccaaggaagtgatgccccagcgagggactttgacggagaggactctgactctccgaggcattccacagcttccaacagttccaacctaagcagccccccaagcccagcttcaccccgaaaaaccaagagcctctccctggagagcactgaccgcgggagctgggacccgtgagctgcctcagcactgggacctctcgctctccgctccctgccactcgcctcctctcactttcatctcttccctccacctcgcctgctcggcctgaaagccaccaggggctggcagcagtagcaggacagggattcaggagttctgacgacacgactctcagatccacgcccccagcctaacagcaacaacaaagacagactttccgtagcagcttagattaacgttgatttcattccatgcacttagagttgctttcagtaacattttacccctactcccaaaggtagcttaaatagacagattacacaaatgtaagtgataagaataagattagacagattttgctttcacagtagagtctcattatagtcctaaaatagctcatgggcttctccgcatccagaagggagaattggtccctggagtggctcactaagctcttaatcagcaaacgcagtgagtatcaacctgattgttgccaggaaatccttatgaattaaaacaatgcatattttactacagtacagagtttaaatgaatacataaatgtagaagtactgaatgtatatatttaaaaggagcctcttgtattcaacaaaagatggatgcatatataagagagatgatttaatttaaagaaatatgttgtttcttgtctgtaatgtaatgtaaagggtggaaaggcctcaagctcacatttgtagagagagagcgagagaaatcagagttccctttattgccctgtcctcaaactggtcataggctctagtcacctggggagctgtagaaaacacttgcagagccaggttttgctggtttggggcatgccctgggcaccagagctttaacatttgaagccacttcagcagcagcagcaaaaggcgaactcatctctacccaagatgtttcttttcctagtggtggaatttgaacacttctcactttttattgtattttatcttccgcagataaatgtagaaatacacgattctgtcacctctgatcccttccatctgaaaggttacaaggagtgttgtagcttctgaaggtgcagaaaacaatttctaaaaatgcttttattcctgggctaatcctgtccctccctaagtcacagcgaggtgtctgtcccagggctggagatgcttcccaaggaggagtctgttttgttgagagtgggcgtgggcttcttcacataagcctggggaaggaagaaaaaacggctttcattaccaaataatgtaaaacctcaaaagcaagggcttcaacagccttaaccaaatattattccccatagccagtggaaaatggatgtgacaaccccagtgcgcaggccagagtgagtgagcccagcacggcgctccgactggcttcctctctcaggtgctggattgtggggttagtggcatttccagctggattcctcctgttgtagttgccataaggaaatgagatgcagaatcagaaggatctatttctacagaatcatttcaccagttaagcacatgagtagagaaagagataaaaataaaagtatctcatgaaggaaagagattttgcctctcttttacttttcacctaagtttctctgagaaatagagacaggattctctctttaaaattcagtgaaaatgaagaaagttttcctgcagttgctaacctgagttgcagtgtttaaggccatcatttcactgctgctgtctgtgactccacgtctgtgtcactgaggtgacctgcgtgtcactgaggtggccaccatgctggcctgcggcatgtgcagggagctgaggctgtttccaggtgatgctgctgtgtggagaaggttctgagatgcagtgagggaagaaaggatcctgctggggattccattgtaagcacctataatcgggaattttcatgtaacagctttgacatttaaa

SEQ ID NO: 11692 - DNA, 7776 bp, Homo sapiens
gcggcccggtgcgggtgtcggggagaccgggctctctgcccggcgcggcgcggcgcggctcggcccacgagcgaccaccgacatggagtgggctcgggcggccaagtagccgcttctccggagcccggtgccagtgccgcccgcagcccgccttccacccccggccgcgccgccggtcaggccctagggtgaagccgggaggaaaatgaagagttttcaccggaatccgttgaaaataggactgactgcaaagccttaaagaaagaaggacctcgggaggagaaacgaaaagccgcctccgggcaagacttggcgtgctccgagccgaggggctgcttcagggacctcgccccctccctttcccgctggagaaattgccgctgatgcattatccaagtggtggttgggaggatttgcagcaacatttttggttttccctcccccttctatgcattctgtttttttcctcccttttctgtttttcttcttcccgggaagtgaattgctgatgcaaatcggactttattcattaatgatgcaaccggattcgtttcaggattacgttgcacgagttgaattttgaatgaaggagaagagtttttttttttttttttaaagaagtgttgactctctagttcgttgtacttttaattattattttatttaaatatacgacttaattgtattcttttaaaaatgcattaagtatatattttatggtaatttaccctcaaaatatatgtatatgggtgaaattgaagacgcttcagttaagtgaggttactggtgtgttggatgtttaattcagcaccagcattgcatgacagttgtttgaataacaagtggtttatttttaaaaccataccttttaaaatttaggttcagataatagtaaaagtcatcataataatttaaaggaaaaccagcagaaatcgaagcaaacatgtctggagaagtgcgtttgaggcagttggagcagtttattttggacgggcccgctcagaccaatgggcagtgcttcagtgtggagacattactggatatactcatctgcctttatgatgaatgcaataattctccattgagaagagagaagaacattctcgaatacctagaatgggctaaaccatttacttctaaagtgaaacaaatgcgattacatagagaagactttgaaatattaaaggtgattggtcgaggagcttttggggaggttgctgtagtaaaactaaaaaatgcagataaagtgtttgccatgaaaatattgaataaatgggaaatgctgaaaagagctgagacagcatgttttcgtgaagaaagggatgtattagtgaatggagacaataaatggattacaaccttgcactatgctttccaggatgacaataacttatacctggttatggattattatgttggtggggatttgcttactctactcagcaaatttgaagatagattgcctgaagatatggctagattttacttggctgagatggtgatagcaattgactcagttcatcagctacattatgtacacagagacattaaacctgacaatatactgatggatatgaatggacatattcggttagcagattttggttcttgtctgaagctgatggaagatggaacggttcagtcctcagtggctgtaggaactccagattatatctctcctgaaatccttcaagccatggaagatggaaaagggagatatggacctgaatgtgactggtggtctttgggggtctgtatgtatgaaatgctttacggagaaacaccattttatgcagaatcgctggtggagacatacggaaaaatcatgaaccacaaagagaggtttcagtttccagcccaagtgactgatgtgtctgaaaatgctaaggatcttattcgaaggctcatttgtagcagagaacatcgacttggtcaaaatggaatagaagactttaagaaacacccatttttcagtggaattgattgggataatattcggaactgtgaagcaccttatattccagaagttagtagcccaacagatacatcgaattttgatgtagatgatgattgtttaaaaaattctgaaacgatgcccccaccaacacatactgcattttctggccaccatctgccatttgttggttttacatatactagtagctgtgtactttctgatcggagctgtttaagagttacggctggtcccacctcactggatcttgatgttaatgttcagaggactctagacaacaacttagcaactgaagcttatgaaagaagaattaagcgccttgagcaagaaaaacttgaactcagtagaaaacttcaagagtcaacacagactgtccaagctctgcagtattcaactgttgatggtccactaacagcaagcaaagatttagaaataaaaaacttaaaagaagaaattgaaaaactaagaaaacaagtaacagaatcaagtcatttggaacagcaacttgaagaagctaatgctgtgaggcaagaactagatgatgcttttagacaaatcaaggcttatgaaaaacaaatcaaaacgttacaacaagaaagagaagatctaaataagctggaagttcatacagaagctctagctgctgaagcatctaaagacaggaagctacgtgaacagagtgagcactattctaagcaactggaaaatgaattggagggactgaagcaaaaacaaattagttactcaccaggagtatgcagcatagaacatcagcaagagataaccaaactaaagactgatttggaaaagaaaagtatcttttatgaagaagaattatctaaaagagaaggaatacatgcaaatgaaataaaaaatcttaagaaagaactgcatgattcagaaggtcagcaacttgctctcaacaaagaaattatgattttaaaagacaaattggaaaaaaccagaagagaaagtcaaagtgaaagggaggaatttgaaagtgagttcaaacaacaatatgaacgagaaaaagtgttgttaactgaagaaaataaaaagctgacgagtgaacttgataagcttactactttgtatgagaacttaagtatacacaaccagcagttagaagaagaggttaaagatctagcagacaagaaagaatcagttgcacattgggaagcccaaatcacagaaataattcagtgggtcagcgatgaaaaggatgcacgagggtatcttcaggccttagcttctaaaatgactgaagaattggaggcattaagaaattccagcttgggtacacgagcaacagatatgccctggaaaatgcgtcgttttgcgaaactggatatgtcagctagactggagttgcagtcggctctggatgcagaaataagagccaaacaggccatccaagaagagttgaataaagttaaagcatctaatatcataacagaatgtaaactaaaagattcagagaagaagaacttggaactactctcagaaatcgaacagctgataaaggacactgaagagcttagatctgaaaagggtatagagcaccaagactcacagcattctttcttggcatttttgaatacgcctaccgatgctctggatcaatttgaaactgtagactccactccactttcagttcacacaccaaccttaaggaaaaaaggatgtcctggttcaactggctttccacctaagcgcaagactcaccagttttttgtaaaatcttttactactcctaccaagtgtcatcagtgtacctccttgatggtgggtttaataagacagggctgttcatgtgaagtgtgtggattctcatgccatataacttgtgtaaacaaagctccaaccacttgtccagttcctcctgaacagacaaaaggtcccctgggtatagatcctcagaaaggaataggaacagcatatgaaggtcatgtcaggattcctaagccagctggagtgaagaaagggtggcagagagcactggctatagtgtgtgacttcaaactctttctgtacgatattgctgaaggaaaagcatctcagcccagtgttgtcattagtcaagtgattgacatgagggatgaagaattttctgtgagttcagtcttggcttctgatgttatccatgcaagtcggaaagatataccctgtatatttagggtcacagcttcccagctctcagcatctaataacaaatgttcaatcctgatgctagcagacactgagaatgagaagaataagtgggtgggagtgctgagtgaattgcacaagattttgaagaaaaacaaattcagagaccgctcagtctatgttcccaaagaggcttatgacagcactctacccctcattaaaacaacccaggcagccgcaatcatagatcatgaaagaattgctttgggaaacgaagaagggttatttgttgtacatgtcaccaaagatgaaattattagagttggtgacaataagaagattcatcagattgaactcattccaaatgatcagcttgttgctgtgatctcaggacgaaatcgtcatgtacgactttttcctatgtcagcattggatgggcgagagaccgatttttacaagctgtcagaaactaaagggtgtcaaaccgtaacttctggaaaggtgcgccatggagctctcacatgcctgtgtgtggctatgaaaaggcaggtcctctgttatgaactatttcagagcaagacccgtcacagaaaatttaaagaaattcaagtcccatataatgtccagtggatggcaatcttcagtgaacaactctgtgtgggattccagtcaggatttctaagataccccttgaatggagaaggaaatccatacagtatgctccattcaaatgaccatacactatcatttattgcacatcaaccaatggatgctatctgcgcagttgagatctccagtaaagaatatctgctgtgttttaacagcattgggatatacactgactgccagggccgaagatctagacaacaggaattgatgtggccagcaaatccttcctcttgttgttacaatgcaccatatctctcggtgtacagtgaaaatgcagttgatatctttgatgtgaactccatggaatggattcagactcttcctctcaaaaaggttcgacccttaaacaatgaaggatcattaaatcttttagggttggagaccattagattaatatatttcaaaaataagatggcagaaggggacgaactggtagtacctgaaacatcagataatagtcggaaacaaatggttagaaacattaacaataagcggcgttattccttcagagtcccagaagaggaaaggatgcagcagaggagggaaatgctacgagatccagaaatgagaaataaattaatttctaatccaactaattttaatcacatagcacacatgggtcctggagatggaatacagatcctgaaagatctgcccatgaaccctcggcctcaggaaagtcggacagtattcagtggctcagtcagtattccatctatcaccaaatcccgccctgagccaggccgctccatgagtgctagcagtggcttgtcagcaaggtcatccgcacagaatggcagcgcattaaagagggaattctctggaggaagctacagtgccaagcggcagcccatgccctccccgtcagagggctctttgtcctctggaggcatggaccaaggaagtgatgccccagcgagggactttgacggagaggactctgactctccgaggcattccacagcttccaacagttccaacctaagcagccccccaagcccagcttcaccccgaaaaaccaagagcctctccctggagagcactgaccgcgggagctgggacccgtgagctgcctcagcactgggacctctcgctctccgctccctgccactcgcctcctctcactttcatctcttccctccacctcgcctgctcggcctgaaagccaccaggggctggcagcagtagcaggacagggattcaggagttctgacgacacgactctcagatccacgcccccagcctaacagcaacaacaaagacagactttccgtagcagcttagattaacgttgatttcattccatgcacttagagttgctttcagtaacattttacccctactcccaaaggtagcttaaatagacagattacacaaatgtaagtgataagaataagattagacagattttgctttcacagtagagtctcattatagtcctaaaatagctcatgggcttctccgcatccagaagggagaattggtccctggagtggctcactaagctcttaatcagcaaacgcagtgagtatcaacctgattgttgccaggaaatccttatgaattaaaacaatgcatattttactacagtacagagtttaaatgaatacataaatgtagaagtactgaatgtatatatttaaaaggagcctcttgtattcaacaaaagatggatgcatatataagagagatgatttaatttaaagaaatatgttgtttcttgtctgtaatgtaatgtaaagggtggaaaggcctcaagctcacatttgtagagagagagcgagagaaatcagagttccctttattgccctgtcctcaaactggtcataggctctagtcacctggggagctgtagaaaacacttgcagagccaggttttgctggtttggggcatgccctgggcaccagagctttaacatttgaagccacttcagcagcagcagcaaaaggcgaactcatctctacccaagatgtttcttttcctagtggtggaatttgaacacttctcactttttattgtattttatcttccgcagataaatgtagaaatacacgattctgtcacctctgatcccttccatctgaaaggttacaaggagtgttgtagcttctgaaggtgcagaaaacaatttctaaaaatgcttttattcctgggctaatcctgtccctccctaagtcacagcgaggtgtctgtcccagggctggagatgcttcccaaggaggagtctgttttgttgagagtgggcgtgggcttcttcacataagcctggggaaggaagaaaaaacggctttcattaccaaataatgtaaaacctcaaaagcaagggcttcaacagccttaaccaaatattattccccatagccagtggaaaatggatgtgacaaccccagtgcgcaggccagagtgagtgagcccagcacggcgctccgactggcttcctctctcaggtgctggattgtggggttagtggcatttccagctggattcctcctgttgtagttgccataaggaaatgagatgcagaatcagaaggatctatttctacagaatcatttcaccagttaagcacatgagtagagaaagagataaaaataaaagtatctcatgaaggaaagagattttgcctctcttttacttttcacctaagtttctctgagaaatagagacaggattctctctttaaaattcagtgaaaatgaagaaagttttcctgcagttgctaacctgagttgcagtgtttaaggccatcatttcactgctgctgtctgtgactccacgtctgtgtcactgaggtgacctgcgtgtcactgaggtggccaccatgctggcctgcggcatgtgcagggagctgaggctgtttccaggtgatgctgctgtgtggagaaggttctgagatgcagtgagggaagaaaggatcctgctggggattccattgtaagcacctataatcgggaattttcatgtaacagctttgacatttaaa

SEQ ID NO: 11693 - DNA, 2396 bp, Homo sapiens
ggaagttgagcggcggcaagaaataatggcggcagctacgggggatcctggactctctaaactgcagtttgccccttttagtagtgccttggatgttgggttttggcatgagttgacccagaagaagctgaacgagtatcggctggatgaagctcccaaggacattaagggttattactacaatggtgactctgctgggctgccagctcgcttaacattggagttcagtgcttttgacatgagtgctcccaccccagcccgttgctgcccagctattggaacactgtataacaccaacacactcgagtctttcaagactgcagataagaagctccttttggaacaagcagcaaatgagatatgggaatccataaaatcaggcactgctcttgaaaaccctgtactcctcaacaagttcctcctcttgacatttgcagatctaaagaagtaccacttctactattggttttgctatcctgccctctgtcttccagagagtttacctctcattcaggggccagtgggtttggatcaaaggttttcactaaaacagattgaagcactagagtgtgcatatgataatctttgtcaaacagaaggagtcacagctcttccttacttcttaatcaagtatgatgagaacatggtgctggtttccttgcttaaacactacagtgatttcttccaaggtcaaaggacgaagataacaattggtgtatatgatccctgtaacttagcccagtaccctggatggcctttgaggaattttttggtcctagcagcccacagatggagtagcagtttccagtctgttgaagttgtttgcttccgtgaccgtaccatgcagggggcgagagacgttgcccacagcatcatcttcgaagtgaagcttccagaaatggcatttagcccagattgtcctaaagcagttggatgggaaaagaaccagaaaggaggcatgggaccaaggatggtgaacctcagtgaatgtatggaccctaaaaggttagctgagtcatcagtggatctaaatctcaaactgatgtgttggagattggttcctactttagacttggacaaggttgtgtctgtcaaatgtctgctgcttggagccggcaccttgggttgcaatgtagctaggacgttgatgggttggggcgtgagacacatcacatttgtggacaatgccaagatctcctactccaatcctgtgaggcagcctctctatgagtttgaagattgcctagggggtggtaagcccaaggctctggcagcagcggaccggctccagaaaatattccccggtgtgaatgccagaggattcaacatgagcatacctatgcctgggcatccagtgaacttctccagtgtcactctggagcaagcccgcagagatgtggagcaactggagcagctcatcgaaagccatgatgtcgtcttcctattgatggacaccagggagagccggtggcttcctgccgtcattgctgcaagcaagagaaagctggtcatcaatgctgctttgggatttgacacatttgttgtcatgagacatggtctgaagaaaccaaagcagcaaggagctggggacttgtgtccaaaccaccctgtggcatctgctgacctcctgggctcatcgctttttgccaacatccctggttacaagcttggctgctacttctgcaatgatgtggtggccccaggagattcaaccagagaccggaccttggaccagcagtgcactgtgagtcgtccaggactggccgtgattgcaggagccctggccgtggaattgatggtatctgttttgcagcatccagaagggggctatgccattgccagcagcagtgacgatcggatgaatgagcctccaacctctcttgggcttgtgcctcaccagatccggggatttctttcacggtttgataatgtccttcccgtcagcctggcatttgacaaatgtacagcttgttcttccaaagttcttgatcaatatgaacgagaaggatttaacttcctagccaaggtgtttaattcttcacattccttcttagaagacttgactggtcttacattgctgcatcaagaaacccaagctgctgagatctgggacatgagcgatgatgagaccatctgagatggccccgctgtggggctgacttctccctggccgcctgctgaggagctctccatcgccagagcaggactgctgaccccaggcctggtgattctgggcccctcctccataccccgaggtctgggattcccccctctgctgcccaggagtggccagtgttcggcgttgctcgggattcaagataccaccagttcagagctaaataataaccttggccttggccttgctattgacctgggaaaaaaaaaaaaaaaaaaaa

SEQ ID NO: 11694 - DNA, 4707 bp, Homo sapiens
gcgccatggagcagtggcgacagtgcggccgctggctcatcgattgcaaggtcctgccgcccaaccaccgggtggtgtggccctcggccgtggtcttcgacctggcgcaggcgctgcgcgacggggtccttctgtgccagctgctgcacaacctctcccccggctccatcgacctcaaggacatcaacttccggccgcagatgtcccagtttctgtgtttgaagaacatacgcaccttcctgaaagtctgccacgataaatttggattaaggaacagcgagctgtttgacccctttgacctcttcgatgtgcgagactttggaaaggtcatctccgcggtgtcgaggctctccctgcacagcatcgcgcagaacaaagggatcaggccttttccctcagaggagaccacagagaatgacgatgacgtctaccgcagcctggaggagctggccgacgagcatgacctgggggaggacatctacgactgcgtcccgtgtgaggatggaggggacgacatctacgaggacatcatcaaggtggaggtgcagcagcccatgaaaatgggcatgactgaagatgacaagaggaactgctgcctgctggagatccaggagaccgaggccaagtactaccgcaccctggaggacattgagaagaactacatgagccccctgcggctggtgctgagcccggcggacatggcagctgtcttcattaacctggaggacctgatcaaggtgcatcacagcttcctgagggccatcgacgtgtccgtgatggtggggggcagcacgctggccaaggtcttcctcgatttcaaggaaaggcttctgatctacggggagtactgcagccacatggagcacgcccagaacacactgaaccagctcctggccagccgggaggacttcaggcagaaagtcgaggagtgcacactgaaggtccaggatggaaaatttaagctgcaagacctgctggtggtccccatgcagagggtgctcaaataccacctgctcttgaaggagcttctgagccattctgcggaacggcctgagaggcagcagctcaaagaagcactggaagccatgcaggacttggcgatgtacatcaatgaagttaaacgggacaaggagaccttgaggaaaatcagcgaatttcagagttctatagaaaatttgcaagtgaaactggaggaatttggaagaccaaagattgacggggaactgaaagtccggtccatagtcaaccacaccaagcaggacaggtacttgttcctgtttgacaaggtggtcatcgtctgcaagcggaagggctacagctacgagctcaaggagatcatcgagctgctgttccacaagatgaccgacgaccccatgaacaacaaggacgtcaagaagtggtcctacggcttctacctaattcaccttcaaggaaagcagggcttccagtttttctgcaaaacagaagatatgaagaggaagtggatggagcagtttgagatggccatgtcaaacatcaagccagacaaagccaatgccaaccaccacagtttccagatgtacacgtttgacaagaccaccaactgcaaagcctgcaaaatgttcctcaggggcaccttctaccagggatacatgtgtaccaagtgtggcgtcggggcacacaaggagtgcctggaagtgatacctccctgcaagttcacttctcctgcagatctggacgcctccggagcgggaccaggtcccaagatggtggccatgcagaattaccatggcaacccagcccctcccgggaagcctgtgctgaccttccagacgggcgacgtgcttgagctgctgaggggcgaccctgagtctccgtggtgggagggtcgtctggtacaaaccaggaagtcagggtatttccccagctcatctgtgaagccctgccctgtggatggaaggccgcccatcagccggccgccatcccgggagatcgactacactgcatacccctggtttgcaggtaacatggagaggcagcagacggacaacctgctcaagtcccacgccagcgggacctacctgatcagggagcggcctgccgaggctgagcgctttgcaataagcatcaagttcaatgatgaggtgaagcacatcaaggtggtggagaaggacaactggatccacatcacagaggccaagaaattcgacagcctcctggagttggtggagtactaccagtgccactcactgaaggagagcttcaagcagctggacaccacactcaagtacccctacaagtcccgggaacgttcggcctccagggcctccagccggtccccagtgttcacgccccgcgtcatcggcacagctgtggccaggtataactttgccgcccgagatatgagggagctttcgctgcgggagggtgacgtggtgaggatctacagccgcatcggcggagaccagggctggtggaagggcgagaccaacggacggattggctggtttccttcaacgtacgtagaagaggagggcatccagtgacggcaggaacgtggacaagactcgcagattttcttgggagagtcactccagccctgaagtctgtctctagctcctctgtgactcagaggggaaataccaacctcccagtcttccactgcccacagggatagggagggtgttgagaatcctaaactcgaaccgtttcactgtcagcctgccctcggcgacccatcactgggtatgctattgtacatagaggaaacctgggctagccccacccagagcgcagaggagggggcaccgacagcgctgcgagccaggctctgggtagtggctgaggccagaggcccatcgcctgcccctgtccaactgagatggccttcaggagcctaggtttgaacagcagatgctgtcccaggaagggctagggacatcggaggggacctgcccccacaccctctgctcagcccctggactcagccttgcctgtcttttcctgctgctcccagggggaggtgtcagacctcgggaggcagacgggaccagagccaggctgttcactgtgggcccacttgccccactgtgctagggcgcgggaggagagagcactgtggtcgccctctgcagccactctggctcccaagacttccctgactcccccactcccctccttgccaggggcacacccggaccccacacggcaggcccctctcttgggaggggcctttggaatgatgaaattccaaccctgctgcccggtcagcggtaccgtttcctgccctctctctgagaggccctttctggagtcctgggaaggtgtctgcctggccgcgctgccagatcagtacatcttttgtaaaaaccctgaaatgggcagggaagaaaacagggatttcccctctctagatccctgccaggtccctctccaggaggcccctctgctctcctgaagggtggtccctgagggtctgcccagccttggcacgagaggttggttccagcccctggcagggcttccttccaagggcccctgcagcctacaaactgggcctcgggcgactcaaaataagtgctcttgggggtggctctaccccattacctcccccagccacaactcctggccttcgacttctggctgggttagccagaccctggtttctctaccctgatgttgcatgagacctggtaacagtgtctccctcccagctccttgccaaagcctctgttgagacctgggcttcttgtagccccttctccctctggccagctgcacagcctgtgggaggtgcccggcccaggctgggtgtgggggaagctggtccctgctgtgggtggcgctggggacctaggggctccttctgaggttggccttgtggcctctgggctgtatgcctctggggtgtagggaagaggcgggaggagtcatggggatggggagcggcagggggagagaggggccctcgacaaaggcttgggaaatgaggggaggtggaggcagggcaggggaagcgaagagtcagccttggagagagcaccctggggcctccgtgtcggggtacacccagcactttgcgacctgcggcccagcaggcgcggaggatggcggggaggaagccagcagcccctgtgtttactgtcgtcagaaaggtcttgtgttttggttttggggtttttgttttgtttgtgttttgtttggcttgtttgttttttaaggggaaaaaagtttgtaattatttcatccaaatctcccgttatatatctgtgaataataagagattttataatagcaagaaaatgatgtatattttagtttgttgacaaataagtcatcatgatcacgaaggacactgagaaaaaataatttagaaccctggtttttgtgaatttttttgttttgtgtttctttgttttgagatttgtgtttggtttggtttttgcactgcactaaggcaggagggttggagggctgggtgcagcctgggagtccgatggttttcagcaggagacggggtgtcccctgcagggggctaaactgcaggggcctgagattagctgtgaacatgtgggagcccgatgcatgtgggtcagggatctgggggcccccccagctggcgggaaccccaaatggacacaaactgtacatttgccaatgggtttttttcagaccatggtttttacttgcaaataaacctgagttcttttctgcaaaaaaaaaaaaaaa

SEQ ID NO: 11695 - DNA, 2381 bp, Homo sapiens
ggtgatggcggcggcaggagcaggacctggccaggaagcgggtgccgggcctggcccaggagcggtcgcaaatgcaacaggggcagaagagggggagatgaagccggtggcagcgggagcagccgctcctcctggagaggggatctctgctgctccgacagttgagcccagttccggggaggctgaaggcggggaggcaaacttggtcgatgtaagcggtggcttggagacagaatcatctaatggaaaagatacactagaaggtgctggggatacatcagaggtgatggatactcaggcgggctccgtggatgaagagaatggccgacagttgggtgaggtagagctgcaatgtgggatttgtacaaaatggttcacggctgacacatttggcatagatacctcatcctgtctacctttcatgaccaactacagttttcattgcaacgtctgccatcacagtgggaatacctatttcctccggaagcaagcaaacttgaaggaaatgtgccttagtgctttggccaacctgacatggcagtcccgaacacaggatgaacatccgaagacaatgttctccaaagataaggatattataccatttattgataaatactgggagtgcatgacaaccagacacagacctgggaaaacgacttggccaaataacattgttaaaacaatgagtaaagaaagagatgtattcttggtaaaggaacacccagatccaggcagtaaagatccagaagaagattaccccaaatttggacttttggatcaggaccttagtaacattggtcctgcttatgacaaccaaaaacagagcagtgctgtgtctactagtgggaatttaaatgggggaattgcagcaggaagcagcggaaaaggacgaggagccaagcgcaaacagcaggatggagggaccacagggaccaccaagaaggcccggagtgaccctttgttttctgctcagcgccttccccctcatggctacccattggaacacccgtttaacaaagatggctatcggtatattctagctgagcctgatccgcaagcccctgaccccgagaagctggaaattgactgctgggcagggaaacctatttctggagacctttacagagcctgcttgtatgaacgggttttgttagccctacatgatcgagctccccagttaaagatctcagatgaccggctgactgtggttggagagaagggctactctatggtgagggcctctcatggagtacggaagggtgcctggtattttgaaatcactgtggatgagatgccaccagataccgctgccagactgggttggtcccagcccctaggaaaccttcaagctcctttaggttatgataaatttagctattcttggcggagcaaaaagggaaccaagttccaccagtccattggcaaacactactcttctggctatggacagggagacgtcctgggattttatattaatcttcctgaagacacagagacagccaagtcattgccagacacatacaaagataaggctttgataaaattcaagagttatttgtattttgaggaaaaagactttgtggataaagcagagaagagcctgaagcagactccccatagtgagataatattttataaaaatggtgtcaatcaaggtgtggcttacaaagatatttttgagggggtttacttcccagccatctcactgtacaagagctgcacggtttccattaactttggaccatgcttcaagtatcctccgaaggatctcacttaccgccctatgagtgacatgggctggggcgccgtggtagagcacaccctggctgacgtcttgtatcacgtggagacagaagtggatgggaggcgcagtcccccatgggaaccctgaccaggtccctcttttctgtcaaggactttctgggaataatactgggggttttgtttttgtttttgaactgtctcaaatgttctcccaaagatgctaaaaacacagcctctccttttagcaagttaaaaggctgggtaggactgcgggagactgcctgcctttcaccattttctccccacttccagtgactgctcttattttgtgtaccataagccaacaaccgctgactccaggattgcataagccccctgtgaaatcggtgctgtactgcataccctgccagctgtgacttgttatcctactatattttctaaggagtgaataatattgtccgagtaactaacttatttaaaagacatttccttctgtgggcattgactgtatcccacctgttttccaaggaaatggtaacctgtttctgagaacacctgaaatcaatggctatacattccaaaccaatctaaacgctaaaaaaaaaaaaaaaaaaaaa

SEQ ID NO: 11696 - DNA, 7694 bp, Homo sapiens
ccaactctcattcatttcgccggttaacatgagagatcatggccgccttcgggcttctcagctatgagcagagaccgctgaagcgcccccggctcgggccgcccgacgtctacccacaggaccccaagcagaaggaggatgaacttactgctgtgaatgtaaagcaaggcttcaataatcagccagccttcactggagatgaacatggctcagccagaaatattgtaattaacccatcaaagattggagcttattttagcagcatattagctgagaaactgaagcttaacactttccaggacacgggaaagaagaaaccacaagttaatgctaaagataattattggctggttactgctcgatcccagagtgcaattcatagttggttttctgacttagcaggaaataagccactttctattttggcaaaaaaggttcctatccttagtaaaaaagaggatgtttttgcatatttagctaaatattctgtgccaatggttcgagcaacgtggctgatcaagatgacttgtgcctattattctgctatatctgaagctaaaattaagaaacgtcaggctcctgatccgaatttggagtggacacagatatctaccagatatcttcgagagcagttggccaagatttctgacttttaccacatggcctccagcacgggcgatggccctgtccctgtgccaccagaggtggagcaagccatgaagcaatgggaatacaacgaaaagctagcatttcacatgttccaggaaggaatgttagaaaaacacgaatatttgacatggatcctggatgttttagaaaagatcagaccaatggatgatgatcttcttaaactcttgctaccactaatgctgcagtattcagatgagtttgttcagtcggcctacctgtctcgtcgtcttgcctacttttgtgcccggcgtctttccttgctgctgagcgatagccccaacctccttgctgcccactcaccccacatgatgataggaccaaacaactcgagtatcggggcccccagccctggcccccccggccctggcatgagccccgtgcagctggccttctcagattttctttcctgtgcacagcatggtcccctggtttatggacttagttgtatgttgcagactgtcactctctgttgcccaagtgccttggtgtggaattattccacaaatgaaaataagagcgcaaacccaggctcacccctggatctgctgcaggtggccccgtccagcctccccatgccgggtgggaacacggctttcaatcagcaggttcgggcaaggatttatgaagtagaacaacagataaaacaaagaggccgtgcagtggaagttcggtggtcatttgacaagtgccaagaatccacagcaggggtgactattagtcgggttttgcacacgttggaagttttggatcgtcactgttttgaccgaactgattccagcaattccatggagacactttatcataagattttctgggcaaaccaaaacaaagataaccaagaggttgcgcccaacgatgaagctgtggtgacgctgttatgtgaatgggccgtgagctgcaaacggtctggcaagcacagggccatggctgtggcaaaactcctggagaagaggcaagcagaaattgaggcagagagatgtggtgaatcagaagtcttagatgagaaggagtctatttcttcatcctctcttgctggatccagtttgcctgttttccagaatgtgctgttaaggtttttagatacacaggccccctctttgtcggacccaaacagtgaatgtgaaaaggtggaatttgtgaacctggtgctgctcttctgcgagttcatccgccatgatgtcttctcccatgacgcatacatgtgtaccctcatatctcgaggagatttgtcagtcactgcctcaactcggccgcggtcaccagtaggggaaaatgcagatgaacactattcaaaggaccatgatgtgaaaatggagattttttctcctatgcctggagaatcctgtgagaatgccaacacttcgttgggcagaagaatgtcagttaattgtgagaagttggtgaagagggaaaagccaagggaattaatttttccatctaattatgacctccttcgccacttacagtatgcaacacattttcctatacctctggatgaatcttcaagtcatgaatgtaaccagcgcacaatccttctctatggagtcggcaaagagcgtgatgaagcaaggcatcagctgaagaagattaccaaagatatcctgaaaattctaaataagaagagcaccacagagacaggggttggggacgaaggacaaaaagccaggaagaacaaacaggagacatttccaacactggagactgtgttcactaaactccagctcctttcatattttgatcaacatcaagtgacatctcagatttctaacaatgtgctagaacaaatcacaagctttgcgtcaggaacatcctatcatctccctttggctcaccacattcagctcatctttgatctcatggagccagcactgaacatcaacggactaattgacttcgcaatacagttactaaatgaactgagtgttgtggaagctgaactgctcctaaaatcctccagcctggcaggaagttatacaacaggactgtgtgtctgcatcgtggctgttctcaggcgctatcacagttgtctaatcttgaatcctgatcagacagcccaggtgtttgaagggttgtgtggtgtggtcaagcatgtcgtaaacccctcagaatgttcttcccctgaaagatgcattttagcctacctctatgatctctatgtgtcatgtagccacctcagaagtaaatttggagacctcttcagtagtgcctgttcaaaagtaaagcaaaccatatataataacgtgatgcctgcaaattcgaacttgcgatgggatccagacttcatgatggattttattgagaatccctcagcccgcagcatcaactactcaatgctgggcaagatcctcagtgacaatgcggccaatcgctacagctttgtctgcaatacactcatgaatgtatgtatgggccatcaggatgctggcaggattaacgacatagccaatttctcctctgagcttacggcttgctgcactgttcttagttcagaatggctgggggttctgaaggctctttgttgttcttcaaatcacgtgtgggggtttaatgatgtactttgcactgtagatgtgagtgacctttcattccatgattcattagctactttcattgctattctgatagcacgacagtgtttttccctggaggacgtcgtgcagcatgtcgcacttccctctcttctagcagcagcttgtggggatgcggacgccgagcctggggcgagaatgacatgccgactcttgcttcatctcttccgagctccccaggcctgcttcttacctcaagcaacgggcaaacctttccctggaataagatcatcttgtgatagacacctcttagccgctgctcacaacagcattgaagtgggagccgtgtttgctgtcttaaaagcaattatgatgcttggagatgccaaaattggcaataacagtgtcagctctttaaagaatgatgacttcaccatgagaggtttgcgatgtgatgggaatgctgatgatatctggactgcctcacaaaatccaaaatcctgtgggaaaagcatttccatagaaactgccaatttaagagaatacgctagatatgtactgaggactatctgtcaacaggaatgggtaggagagcattgcttaaaagaacctgaaagattatgtacagacaaagaacttatattggaccctgtgctttcaaatatgcaagcacagaaattactgcagcttatctgttatcctcatggcattaaagaatgtaccgagggggacaatctgcaaagacagcacattaagcgtattcttcagaatcttgagcagtggacactgaggcaatcctggttagaactccagctaatgatcaaacagtgcttgaaggaccctggctctggttctgtggccgaaatgaacaacttactggacaatattgcaaaggcaacaatagaggtattccagcagtctgcagacctaaataattcttctaattctggcatgagcctcttcaacccaaacagtattggaagtgctgatacaagtagcacgagacagaatggaataaagacattcctaagttcctccgaacgcaggggtgtatggttggtggcccccctcatcgccaggttgccaacttctgtgcaaggaagagtgctgaaagccgctggggaagagctggagaagggacagcacttgggttcttcttccaaaaaggaaagggacagacagaaacagaaaagtatgtctcttttgagtcaacaacccttcctctcactggtacttacctgccttaagggacaagatgaacaaagggaaggcctcctaacatctctccagaatcaagttaaccagattttaagtaactggagagaagaacgataccaagatgacataaaagcgcggcagatgatgcacgaagcattgcaactccgcctaaatttggtaggaggaatgtttgacacggtgcagaggagcacccagtggactacagactgggccctgctactccttcagatcattacttcaggaactgttgacatgcacactaacaatgaattattcacaacagttcttgacatgctgggtgttttaatcaatggaacgttagcctctgacctatcaaatgcatcccctgggggatctgaagagaacaagcgtgcatacatgaatttagtaaagaaactgaaaaaagagctaggagacaagcgatcagaaagtattgacaaagttcgacagttactacctttgccgaaacagacatgtgatgtcatcacttgtgaacctatgggttccttgattgacacaaaaggaaacaaaattgctggatttgactctatagataaaaaacagggtctccaggtctctacgaagcagaaggtgtccccgtgggacttgtttgagggtcagaagaacccagctcctttgtcctgggcctggtttgggacagtccgagtggaccgaagagtgatcaagtacgaggagcagcatcacctcctgctgtatcacacacaccccatgcccaagccccgcagttactacctccagccactgcccctgcctcctgaggaggaagaggaagagcccacatctccagtttctcaggaaccagaaaggaagtccgctgagctgtcagatcagggaaaaaccacaacagatgaagaaaagaaaacaaaaggaaggaagcgcaagacgaaatctagctcaagagttgatgaatatccacagagcaacatataccgagtgcctcctaattactcgcctatctcctcccaaatgatgcaccatccacagtccaccttgtggggttacaacctcgtgggccagccccagcagcccggctttttccttcagaaccaatctcttactccaggtggctccagattggaccctgcaggctcctttgtcccaaccaacaccaaacaagctctgtcaaacatgctacagcggcgctcaggcgccatgatgcagccgccttctcttcatgcaatcacatcgcagcagcagttgatacagatgaagcttctgcagcagcagcagcaacagcgacttctcaggcaagcccagactcggcctttccaacagggccagccgggggaccaggctgctctctttgctgcgcaagcacggccctcccctcagctccctcagtatccagggctgcagcaagcacagaccatgccacagggctatacaatgtatgggacacagatgcctttgcagcagacatcgcagcagcaggctggcagtgtggtcctgtctcccagctataactccagagcctatccggccgcacattccaaccccgtgctaatggaaagactcagacagattcagcagcagccgagtggctatgttcagcagcaggcctcgccgtacctgcagcccctgactggctctcagagactgaaccatcaggctctacagcagagccctctggtgggcgggggaattgatgctgtgctgacttctgcacatccaaaccttccctccgtgcccctgcctcaggatcccatgagacccagacagccgcaagttcgacagcagcagagactcctccagatgcagcagccccagcagccccagccccagcagcctccccagccccagcagtcctcgcagtcccagagtcagacccttggtctccaagcaatgcagccccagcagcccttgtttcccaggcaaggcttgcagcagacccagcagcagcagcagacggccgccttggtgcggcagctccagaagcagctttccagcaaccagccacagcaaggagtgactccgtatgggcatccttcacacttctgaatctgcaagaggagaagacatgacgttttatgtttgcactgaaaaacagaaaatcaaatttaatgcattagtcatcttaaaaatgtccctttttttcatttctttgacattttactatattttatgctacatctcacaaaaaaaaaaaaaggtgtttaaacaaaaagccaaggagaagttgtggtttgattttgttgaattcacctttaaagtaggtttacaaatgtgaatcatgcaggcaggcctactcccggaagagtgtgctagcagaccttttgaaattggtgctttttttgaatctcacatttctagaaagaatggattatgatggatctaaggtatttatgtatttcattcattaatgatgacgttgtttttttttttttaattttattttccaaactgtgctggaccaaactactgatttgaaaggcatgtcagatcttgacagaaacatggcctgtttattctgcattcacctgtgatggtgaaacggacatttatttgcatcgctctaatttgaaatgtttgtaatctcataagcactttataaactttgttcttatttatgtaggactcttctttgcttttgttgtggtcaaaaggtgctgaaacagattgttgcttcgtacttaaacttcttaaaccaagaacctaaaccaaggtttctttgagagccgccctaagatgtgcggaaacctgttagaagtagctgtactcaaatttgttttgaggcaagatcattgatgagagtcattgtgaaggtacaacatgtaaatcctaaaggcctgaaagaactgcagtggaatcgtccaactatttattgccagttttggttctcctgaaccttatgccaccttaaggggaaaaaaaaatccagtagctggcttgagattccagtgctcacacttgacatggtttccagagaatctggccccaaagtccagaaggctctggttttcataaaaggtgtatttgctgtttattttgtatggtaagtatttgctcttttgaatttaattattactgtcagtgtcagtcttggttgtgtattgcatatactgtatttataaattggtgcaaaaagcacaagtaaattatacatcaaatttattataaagaaatagtaactattttaactttgttcaagtatgtggtaatttgctcctattagagtaaaaaagaaaccagtaaattatcagtttgtgtaacttaaga

SEQ ID NO: 11697 - DNA, 1298 bp, Homo sapiens
cattaatatctggcaggggctctcaaatgtgccatagcaagctacttgattacacgtatgttatttagttaaatttgtgaaaattatgagatgctcaccaacccggtgataaacttgctccctcgccattggctggcctggtcacatggctgcccaactttattcagttgacagcaagtaggagggccctatggaaggagaaaaaaagacaacacgagaaaaattagtattttctaccttctgaaattaatggtcatgagttcgtatatggtgaactccaagtatgtggaccccaagttccctccgtgcgaggagtatttgcagggcggctacctaggcgagcagggcgccgactactacggcggcggcgcgcagggcgcagacttccagcccccggggctctacccacggcccgacttcggtgagcagcctttcggaggcagcggccccgggcctggctcggcgctgcctgcgcggggtcacggacaagagccaggcggccccggcggtcactacgccgctccaggagagccttgcccagctcccccggcgcctccgccggcgcccctgcctggcgcccgggcctacagtcagtccgaccccaagcagccgccctccgggacggcactcaagcagccggccgtggtctacccctggatgaagaaggtgcacgtgaattcggtgaaccccaactacaccggtggggaacccaagcggtcccgaacggcctacacccggcagcaagtcctagaactggaaaaagaatttcattttaacaggtatctgacaaggcgccgtcggattgaaatcgctcacaccctgtgtctgtcggagcgccagatcaagatctggttccagaaccggaggatgaagtggaaaaaagatcataagctgcccaacactaaaggcaggtcatcgtcctcatcttcctcctcatcttgctcctcctcagtcgcccccagccagcatttacagccgatggccaaagaccaccacacggacctgacgaccttatagaagtggggaccctgggcccatctctccctgcgcaccaggctgagccgaagctgcgggggcaggccgggcctgctgtcacctcgctgggctctaaggtactgtggggtggacctgggacaagcaggccgccctcggactaggttagcatcctgcccgagggcagccccctccctagagcgggatggggatgggagggggggcgggattctctctctaagtatattatatggcaggagctactgagaacataaaatcttggcgagtcattaaacttatgaaaa

SEQ ID NO: 11698 - DNA, 6682 bp, Homo sapiens
gcggcggcggcatcgcgggcggcggcggcgatgagcgacatagtggagaagacgctgacggcgctgccgggactctttctgcagaaccagcccggtggtgggcccgcggccgccaaggcgtccttctcctcgaggctgggcagccttgtccgcggcatcacagccctcacctccaagcacgaagaagaaaaattaatccagcaggaactgagtagtctgaaagcgactgtttctgctcctactacaacactgaaaatgatgaaggaatgtatggtgagacttatatattgtgaaatgcttggatatgatgcttcctttggctatattcatgcaatcaagttagcccaacaaggaaacctcttagaaaaaagagtaggttatttggctgtttccttatttctacatgaaagtcatgaattattgcttctccttgtgaatacagttgtaaaggatctgcagagcactaacctagtagaagtgtgtatggcactgactgttgttagccagattttcccctgcgaaatgattccagctgttcttccattaatagaagataaacttcaacattctaaggagattgtacgaagaaaagctgttctggcattatacaaattccatctcattgctcctaatcaagtacaacatattcatattaagtttcggaaagcactttgtgacagagatgttggggtcatggctgcctccttgcatatatatcttagaatgattaaggagaattcatctggatataaagacttgactgggagttttgtaaccattttgaagcaagtagttggaggaaagctcccagtagaattcaattaccacagtgtgccagcaccatggttacaaattcagctcttgagaatactgggacttctaggaaaagatgatcaaaggacaagtgaattaatgtatgatgttcttgatgaatccttacgaagagctgagttaaatcacaatgtcacatatgctattttgtttgaatgtgtgcatacagtctattctatttatcctaaatcggaattacttgagaaggctgccaagtgcattggaaaatttgttctgtcacctaaaataaatctaaaatatttaggactgaaggctcttacctatgttatccaacaggatcctactctggctcttcaacaccagatgacaataattgaatgtttagatcatcctgatcccattattaaaagagagactctggaacttctttacagaattactaatgcacagaatataacagttattgtccagaaaatgcttgaatatttacatcagagcaaagaagagtatgtcatcgtcaatttggtcggcaaaatagcagagctggctgagaaatatgctcctgataatgcatggtttattcagacaatgaatgctgtgttttcagtaggaggagatgtaatgcatcctgatattcccaataactttctgagactactagcggaaggttttgatgatgaaacagaagatcagcaattaagactctatgcagttcagtcttatctcactttactggatatggaaaatgtgttctatccacagagatttcttcaagttatgagttgggtattaggggaatattcctacctcttagataaggaaacgccagaggaagttatagctaagctctacaagttacttatgaatgactctgtgtcttcagaaacaaaagcctggttaattgctgctgtgaccaaattgacatctcaggcgcactcttctaatacagttgagagattaatccatgaatttaccatatctttggatacttgtatgagacaacatgcatttgaattaaaacatttgcatgagaatgtggaacttatgaagagcttgcttccagttgacaggagttgtgaagacttggtggtagatgcttctttatcttttctggatggttttgtggctgaaggactcagtcagggtgcagcgccttacaaacctccccatcaacgccaggaggaaaagctttctcaggaaaaagttctcaattttgaaccatatggactctccttttcttcatctggcttcactggacgacagtctcctgctggcatttctcttggttcagatgtatctgggaatagtgctgagacaggactgaaagagacaaatagcttgaagctggaaggtataaagaaattgtgggggaaagaaggctatcttcccaagaaggaaagcaaaactggtgatgaaagtggagctctgcctgttcctcaagagagtataatggagaatgtagatcaagctataactaaaaaggatcaatctcaagttcttacccaatctaaagaggagaaagaaaagcagctgctggcatcatcattatttgttggtctaggatcagaaagtacaatcaacctgctgggaaaagcagatactgtctctcacaagttcagaaggaaatcaaaagtcaaagaagctaaaagtggcgaaacaaccagtactcataatatgacctgttcttcctttagttctttgtcaaatgtggcatatgaagatgattattattcgaatactttgcacgatacaggagacaaggaattaaagaaattttctctcacttcagaacttttggattctgagtcactcacagaactgcccttggttgagaaattctcatattgtagtctgtctacaccttcattgtttgctaataacaacatggaaatttttcaccctcctcaatctactgcagcctcagttgccaaggaaagctctttagcttcatcttttttggaagaaactactgaatacatacactcaaatgctatggaagtctgtaataatgaaactatatcagtgtcttcttataaaatttggaaagatgattgtttattgatggtctggtcagtcactaataagagtggtttggaattgaaaagtgctgacttagaaatttttcctgcagaaaatttcaaggtgactgagcaacctggatgctgtttgcctgtaatggaagcagaaagcaccaaaagctttcaatatagtgtgcagatagaaaaaccttttacagaaggaaatcttactggttttattagttatcatatgatggatactcattctgctcagctggaattttctgtaaacttatcactattagatttcattagaccattaaaaatctcaagtgacgactttgggaaactctggttatccttcgcaaatgatgtgaaacaaaatgtaaaaatgtcagaatctcaagctgcacttccttctgcactaaagactctgcaacagaaactaagactccatattattgagattataggcaatgaagggctattggcctgtcagctgctcccatccatcccctgcttactgcattgccgagttcatgcagatgtattagccctgtggttcagatcctcctgttctactcttcctgactatttactgtatcagtgtcaaaaggtgatggagggatcctagcagaagccctgctaaattttactccatcaagatcaatggtttacatagataaacttatttaccaaagtaaaaagaactcatggtacttctaatgaaaatggggattattacaagtgtggtttatatgttttctttgtgattcctggtcaagaaagatccccaaaactgtatccctaacctttaactcaggattgtacagtatgtttaggtccctcaaaaagtgacctaagctaatgttataaactgctaatgatttatatatcacttagtgtgtagagggactgaaaatatttattttgttataaataattttatagcacgtttactctagtgctagctaatttgtaataaagccaagtctcagttttctgcattaaatggaagggagacatgaaattgataatctcaaacttaattcatatttggctttggaatgtagtgtatggtttttggtagggaagtcaatattttcgattatgttttgcttagatcagtgttgaactaagttggcatagcacacactaacagttgtaggagatccatgagcatgctggatattgaggggatccaatctgtgatctattttttattatagataactgttacacataatttcagatcgtttggctgtaaaatttgtctgttttccacttggagttattttaaaattcaaagtaaatcactctattcttattttgaaaactcagagccattttatatagaaacaaaacccataagagcacacagtaacaaagcaaacagatacaaaaatgactttttagttatgacaaatattttagttggttactacttaggtccttttggcaaatgaaaatttgtgattagagtataaatggcaaaactatcttttcctggcctttgaatccactagtacttaatggatatagctgaagcagagactaagtataacatacaggttcttcagtaaaatatatcattttcatgttatagttatgcctgtgtggcctctgtcagaactattatcagtaaaagaggttaagcctatatatgaatgatggaccaaaaccttgaggttgtacattaactgaaatagtattttataaaatcttatggtgctgtggaaaatatttattatttcaccttttctgacacttcaccatggagactattcaggtaatacaattttaagtcattgcagttaatactctggttaattggtactgttaatcacccaggtcaggaattctgattttaggttatctcattaatcatggctgataaagaagctaaggggattctccagatctaatagatttcattagtcatttgtgtcgagtattcctccctaaaaacaaaagcagtattttctttctcaattaatttttaagttattcattaaaaaatatataacatcttaattttattcttttaaaaacatacagtgaagccttgctacaagagtcataagtgactggaatttcttgcataataggttcctccttttgaatagatcagattcatccccaggctctcagcagtgtcatgatgaaatgagtgtgctgacttcaggggtgtggtggacactggtagctagccttatcagctccctccttattcctacctctgtcagcagcatgcctcgccccttacctaattctgctgtgactctgacagagaggaagtgccttctcactttgcaaaggaatgcagcatgtcacaaaggaggtgctccaattttttgtgtccttacttccctatgtttgcctagttactgaggctaggtcgagtgtgaagcaataggtgtaagatgctgagagcacatggacagctaccagggagatctgttgcttggttacagggtgtattcatgagtggtagctgcagttgtcgtgagagacatgcttggcatacagagctgtctaatgggtgggagacatgtaatggtagatttagggctgggagcatgattttgggtctgcccaaaggaacatggtgtcacttttgttctttctgacccactaaataaaaagtagtgtaacagggtttcactggaatgtttattagaaagtttacactttttatatttttatgattttaaaaacaaacaataatagaaaaacagattttaaggaacttcagagcagtatatattctgtctaaactcactgaatattttaagttgtaaatcaggtgtccaccaacctttatttttgcattgcaggagatgtgactgtaaagtagggagtttttttttttgagacagagtttcacccttgttgcccaggctagagtgtaatggtgcaatctccgctcactgcaacctctgcctcccaggttcaagcgattctcctgcctcagcctccctagtagctgggattacaggcatgcaccaccacacccggctaatttttttatatttttagtagagacaaggtttctccatgttggtcaggctggtctcgaactcccgacctcaggtgatctgcccgcctcagcctcccaaagtgctgggattacaggcgtgagccactgcgcccggccaaattatttttgtgggtagattcattctctttacctaatagtcataatttagtcagtgaagggacaacatctggggtaagagctatggaggaggtgctcagctttgtgagttttgtgccaggcatctttgctgaaaatggagatggcagcaagtgtgaatctgggggaatataagggaagacagaaaagccttaagagtagacggaggaagaagggtaccagaatagtccctgtggaggcaggcagatcagagctcagggtttgaaagtgggcctgagtaagggtcctgctagagaaactgcagatggaagctgagcagttaccaactgctaatgtgccaagtataccaagcacagcatgtgtcctgtagaggagcattattttaaacaatgttctactatcatctaccaaaataattgtggtaaaagtgtagtattttattttttccttttatgtcagcaatattttaaaatattgatctgtttatcttatatttttatggataaatgtagtatttgcctcatgattgtgagccactgagagtgcactgaacctattcacatgtctttaagatgttttgctgtgttaaaattttaggagagaaaaatacaagtgaataattatttaataggcatttattactttattttggagttgaattctgtcatttgaaaaagttcagtaatgtaataaatacaaagtgatctgcactgtt

SEQ ID NO: 11699 - DNA, 2556 bp, Homo sapiens
atggccaaatcagctctaagagagaatggcactaactctgagaccttccgacagcgtttcaggagattccattaccaggaggtggctgggccgcgggaggctttcagccaactctgggaactttgctgtcggtggctaaggccggaggtgcgcaccaaggagcagattgtagaactgttggtgctagagcagttcctgaccgtcttacctggggagatccagaattgggtacaggaacaatgtccagaaaatggagaggaggcagtgactctcgtggaagatttagaaagagagcctggaagacctagatcttcggtcacagtctctgtgaaggggcaggaagtgcgcttggagaagatgacacccccgaaatcatcacaagagttattaagtgttcggcaggagtcagtggaaccccagcccaggggtgtacccaagaaagagagggcaagaagcccagacctgggaccacaggagcagatgaacccaaaggagaagctcaaaccttttcaaaggagcggattgccatttcctaaatccggtgtggtctccaggttggagcaaggagagccatggatcccagatctgctgggctctaaggagaaagaacttccaagtggcagccacataggagacagacgagtgcatgctgatctgttaccatccaagaaagatagaagaagctgggtggaacaggatcactggagctttgaagatgagaaggtggcaggtgtgcactggggctatgaagagaccagaacgctcctcgcaattctcagccagactgagttttatgaggctctcagaaactgccataggaacagccaagtgtatggggctgtggctgagcggctcagggaatatggcttcctccggaccctggaacagtgtcggaccaagttcaaaggtctccagaagagctatcggaaagtcaagagcggccacccacctgagacctgccccttctttgaagagatggaagccctgatgagtgctcaggtcattgccctgcccagtaatggcctggaagcagcagcctctcactctggcctggtaggcagcgatgctgagactgaagagccagggcagaggggctggcagcatgaggagggagcagaagaggctgtggctcaggagtctgacagtgatgacatggatctagaggcgaccccccaggaccccaactcagctgcacctgttgtgttcagaagcccaggtggtgtacactggggctatgaagagaccaagacttaccttgcaattcttagtgagacccagttttatgaagccctccggaactgtcaccgcaacagccagctgtatggagcagtggctgagaggttatgggaatatggctttcttaggaccccagaacagtgtcggaccaagtttaaaagcctgcaaaccagctatcggaaagttaagaatggccaggcaccagagacctgtcccttctttgaagagatggatgctttggtgagtgtccgggttgctgccccacccaatgatggccaggaagagactgcttcttgccccgtccaggggaccagtgaggctgaagctcagaagcaagctgaggaagcagacgaggccacagaggaagattctgatgatgatgaagaggatactgagatacccccaggggctgtcataacccgtgctccagtgttattccaaagcccccgtggttttgaagctggatttgagaatgaagataattcaaaacgggatatttctgaggaagtacaactgcataggacattacttgcaagatctgaaaggaaaattccccggtatcttcatcagggtaaaggcaatgagagtgactgtagatcaggaagacagtgggcaaagacctcaggggagaaaagaggaaaactgacactcccggagaagagcttaagtgaagtcctaagtcaacagagaccttgcttgggagagagaccctataaatatctcaaatacagcaaaagctttggtccaaactcccttctcatgcatcaggtatcccaccaggtggaaaatccatataaatgtgctgattgtgggaaaagcttcagtcggagtgcacgactcattagacaccggagaatccacactggagagaaaccttataaatgtcttgactgtggaaaaagtttccgtgacagttcaaatttcatcacccataggagaatccacacaggagagaaaccttatcaatgtggtgagtgtgggaaatgcttcaatcagagctcaagccttatcattcaccagagaacccacacaggagaaaagccctatcaatgtgaagagtgtggaaaaagcttcaataacagttctcattttagtgcacatcggaggatacacacaggagagagaccccatgtgtgtcctgactgtggaaagagtttcagtaagagttctgacttacgtgcacatcatagaacccacacaggagagaaaccctatgggtgtcatgactgtggtaagtgcttcagtaaaagctctgcccttaataagcacggagaaatccatgcacgggaaaagcttctgacacagtcagctcccaagtaa

SEQ ID NO: 11700 - DNA, 4284 bp, Homo sapiens
ggccaaggcggcgaccggagcgcgatggcgggggcggcgggactcacggcagaagtgagctggaaggtcttggagcgaagagctcggaccaagcgctcaggctcagtttatgaacctcttaaaagcattaatcttccaagacctgataatgaaactctctgggataagttggaccattattacagaattgtcaagtcaacattgctgctgtatcaaagtccaactaccggtctctttcccactaaaacatgcggtggtgaccagaaggccaagatccaggacagcctatactgcgctgctggggcctgggctttggctcttgcatacaggcgaattgatgatgacaagggaaggacccatgagctggagcactcagctataaaatgcatgagaggaattctctactgctatatgcgtcaggccgataaggtccagcagtttaagcaggatccacgcccaacaacatgtcttcactctgttttcaatgtgcatacaggagatgagttgctttcctatgaggaatatggtcatcttcagataaatgcagtgtcactttatctcctttaccttgtggaaatgatttcctcaggactccagattatctacaacactgatgaggtctcttttattcaaaaccttgtattttgtgtggaaagagtttaccgtgtgcctgactttggtgtctgggaaagaggaagcaaatataataatggcagcacagagctacattcgagctcggttggtttagcaaaagcagctctagaagcaattaatggattcaacctttttggcaaccagggctgttcgtggtcagttatatttgtggatctcgatgctcacaatcgcaacaggcaaactttgtgctcgctgttacccagagaatcaagatcacataatacagatgctgccctgctcccctgcatcagttatcctgcatttgccctggatgatgaagttctttttagccagacacttgataaagtggttagaaaattaaaaggaaaatatggatttaaacgtttcttgagagatgggtatagaacatcattggaagatcccaacagatgctactacaagccagctgaaattaagctatttgatggcattgaatgtgaatttcccatatttttcctttatatgatgattgatggagtttttagaggcaatcctaagcaagtacaggaatatcaggatcttttgactccagtacttcatcataccacagaaggatatcctgttgtaccaaagtactattatgtgccagctgactttgtagaatatgaaaaaaataaccctggtagtcaaaaacgatttcctagcaactgtggccgtgatggaaaactgtttctttggggacaagcactttatatcatcgcaaaactcctggctgatgaacttattagtcctaaagacattgatcctgtccagcgctatgtcccactaaaggatcaacgtaacgtgagcatgaggttttccaatcagggcccactggaaaatgacttggtagttcatgtggcacttatagcagaaagccaaagacttcaagtttttctgaacacatatggtattcaaactcaaactcctcaacaagtagaacccattcagatatggcctcagcaggagcttgtgaaagcttatttgcagctgggtatcaatgaaaagttaggactctctggaaggccagacaggcccattggctgcctcgggacatcaaagatttatcgcattctaggaaagactgtggtttgttacccgattattttcgacctaagtgatttctacatgtctcaggatgttttcctgctgatagatgacataaagaatgcgctgcagttcattaaacaatattggaaaatgcatggacgtccacttttccttgttctcatccgggaagacaatataagaggtagccggttcaaccccatattagatatgctggcagcccttaaaaaaggaataattggaggagtcaaagttcatgtggatcgtctacagacactaatatctggagctgtggtagaacaacttgatttcctacgaatcagtgacacagaagagcttccagaatttaagagttttgaggaactagaacctcccaaacattcaaaagtcaaacggcaaagcagcacccctagtgctcctgaactgggacagcagccggatgtcaacattagtgaatggaaggacaaacccacccacgaaattcttcaaaaactgaatgattgcagttgtctggctagccaagccatcctgctgggtatactgctcaaaagagaaggccccaacttcatcacaaaggaaggtaccgtttctgatcacattgagagagtctatagaagagctggcagccaaaaactttggttggcggtgcgctacggggctgcatttacccagaaattttcttcctctatagccccacacattactacttttctggtacatgggaaacaggtaactctgggtgcctttgggcatgaagaagaagttatctctaatcctttgtctccaagagtgattcaaaacatcatctattataagtgtaacacccatgatgagagggaagcggtcattcagcaagaactggtcatccatattggctggatcatctccaataaccctgagttattcagtggcatgctgaaaatacgaatcgggtggatcatccatgccatggagtatgaacttcagatccgtggcggagacaagccagccttggacttgtatcagctgtcacctagtgaagttaaacagcttctgctggatattctgcagcctcaacagaatggaagatgttggctgaacaggcgtcagatcgatgggtctttgaatagaactcccaccgggttctatgaccgagtgtggcagattctggagcgcacgcccaatgggatcattgttgctgggaagcatttgcctcagcaaccaaccctgtcagatatgaccatgtatgagatgaatttctctctccttgttgaagacacgttgggaaatattgaccagccacagtacagacagatcgttgtagagttacttatggttgtatccattgtactggaaagaaaccccgagctagaatttcaagacaaagtagatctagacagactggtcaaagaagcatttaatgaatttcaaaaagatcagagtcggctaaaggaaattgaaaaacaagatgacatgacttccttttacaacactcctcccctgggaaaaagaggaacatgcagctatttgacaaaggcggtgatgaatctgctgctggaaggagaagtcaagccaaacaatgatgacccgtgtctgattagctagtggggaaggtgtaggaagctctgttgagacacatgttctgaagtgtgttgtgtttcatgttcaagcttaatcaaggcagccattaatatacgaactgagcatgctggggaggtgaatgccacatccttggcggggttatggacctcttgcatgtcatagccaatctaacggtaatggtaaatgcttttaatcaagcaggaaaaagttctcatgattatgccaactataatagtaatcctcactgagtgataaaaatagtttatgaattgaaaatttgccgctgcatgttgtatgatcaaatagttcatcaaaatgaatctttgctctttggactgaattcttaccatactgccattaaaataaatttgccaactagtaatgcatactggaaatcaaaagatactgaaagaatggtgaacttctcttagtggtattgtcatgctaaaagatgttaatatacatcataaaagcaaagtcagccagctgatattttggttctcaaaaactgcattattaataatattttagtatacagagctattctacagtttttacattgtaaacatgactgtggttttgtatttgctaaatataggggttggactaaaatataataaatctgtaccttatcaaacattttctttgagctcctgctaaaaataggacatgtctatgattgttcaaaaatatgttaaatttaggctcagcacagtagctcacacctgaaatcttagcacttcgggaggctgaggcaggtggatcacttgaggttaggagttcaagaccagcccagccaacatggtgaaaaccctgtctctactaaaaatacaaaaattagccaggcatgatggtgcatgccttttaaacccagctactgaggaggctgaggcatgagaattgcttgaaccaggagacggaggttgcagtgagctgaaatcctgccactgcacaccagcctgggtgacagagcgagactcc

SEQ ID NO: 11701 - DNA, 4566 bp, Homo sapiens
cggtcccatcccaagaaccgactaaggctgtgagtgtccgggaaccagacccgcttggaggccacagccccgacgtcccgcgcccacgcggcagatcgggcgctgcggcctgggagcctcggggagatgcggagcaggagcaattccggggtccgcttggacgggtacgcgcggctggtgcagcaaaccatcctgtgttaccagaatcccgtcacggggctgctgtcagccagccatgagcagaaggatgcctgggtgcgggataacatctacagtatcctggccgtgtggggcctgggcatggcctaccgtaagaatgcagaccgcgatgaggacaaggccaaggcctacgagctggagcagaacgtggtgaagctgatgcgaggtcttctccagtgcatgatgagacaggtggccaaagtggagaagttcaaacacactcagagcaccaaggacagcctgcacgccaagtacaacaccgccacctgtggcacggtggtgggcgacgaccagtggggccacctccaggtggatgccacctctctcttcctcctgttcctggcccagatgaccgcctcaggcttacgtatcattttcactctcgatgaggtggccttcatacagaatcttgtcttttacatagaagctgcatataaagtcgctgattatggaatgtgggagcgtggagataagactaatcagggcatcccggaattgaatgcaagctccgtaggaatggccaaggcagctcttgaggcaattgatgaactggacctttttggagcccatggaggacgcaagtcagtgattcatgttctgccagatgaggtcgagcactgccagtctattctgttctccatgctgccaagagcgtcgacatctaaagaaattgatgctggacttctttccattatttccttcccggcctttgcagtggaagatgtaaaccttgtaaatgtgaccaaaaatgaaattatttctaagctccaggggcgttatggatgctgtcgcttccttcgagatggttataaaactccaagagaggaccctaatcgactgcattatgaccctgctgaactcaagctcttcgaaaacattgaatgtgagtggcctgtgttttggacatattttataatagatggagtcttcagtggtgatgctgttcaggtccaagaataccgagaggccctggagggaatactcatcagaggcaagaatgggatccgcctggtgcctgaactctacgctgtcccgcctaacaaggtagatgaagagtacaagaatcctcacacagtagaccgagttcctatggggaaggtgcctcatctgtggggccaatccttgtacatcctcagctcgctgttggcagagggattccttgccgctggtgaaatcgatcccttaaatagaagattttccacttcagtcaaacctgatgttgtagtacaagttactgttttggcagaaaacaatcacattaaggacttattgaggaaacacggggtgaacgtccagagtatcgcggacattcatccaattcaagtccagccgggccggattcttagtcacatatatgccaagcttggacggaataagaatatgaatttgagtgggcgaccgtatcgacatattggtgtccttggaacctctaaactatatgtgattaggaaccaaatctttacttttacaccccagttcaccgaccagcatcacttctacctggccctcgacaatgagatgatcgtggagatgctaaggatcgagctggcctacctgtgcacctgctggaggatgacgggcagacccacactcaccttccccatcagtcgcaccatgctcacaaatgatggctcagacattcattctgctgtgctctccacaattagaaaactagaggatggatattttggaggagccagagtaaaattagggaacctttcggaatttctcaccacatcgttctacacatatctgacttttctggatccagactgtgatgagaagttgtttgacaatgccagcgaagggactttcagtcctgatagtgattcagatttggtaggatatctggaagacacctgtaatcaagaaagccaagacgaacttgaccattatatcaaccaccttctgcaaagcacatcgttgaggtcctatctgcctcctctttgtaagaacacagaagaccgccatgtcttcagtgctatccactccacgcgggacatactttctgtgatggcaaaagcaaagggtttggaagttccatttgttcccatgactttgccgactaaagttctaagtgcccaccgtaaatcactgaatcttgttgattctcctcagccactcctagaaaaggttcctgaaagtgactttcagtggcccagagatgaccatggtgacgtggactgtgagaagctggttgagcagctaaaagattgttcgaacctacaggaccaagcagacattctgtacattctttatgtcataaagggtcccagctgggacacaaatctctctggacagcacggggtcaccgttcaaaaccttcttggtgagctctatgggaaagccggcttgaaccaggagtggggtctgattcgctacatctcaggccttctcaggaagaaagtggaggtcctggctgaggcctgcacagacctgctttcgcaccagaagcagctcaccgtgggcctgccgcccgagccccgggagaagatcatctctgcgccccttcccccagaggagctcacaaaactcatctacgaggccagtgggcaggacatcagcattgccgtcctcacgcaggagattgtggtttacctggccatgtatgtcagggcgcagcccagcctctttgtggagatgctgagactccggattggactgatcattcaggtgatggccacggagctggcacggagcctgaactgctcaggagaagaggcttctgaaagtttgatgaacctcagccctttcgatatgaaaaatctcctgcaccatattctaagtgggaaagagtttggcgttgaaagaagtgtgcgccctatccactcctccacatccagccctaccatctccatccacgaggtgggccataccggagtcaccaaaactgagaggagtggcattaacagactgaggagtgaaatgaaacagatgactaggcggtttagtgctgatgaacagttcttttctgtgggccaggccgcgtccagcagtgcgcattcctccaagtctgcgaggtccagcaccccatcctcgcccactggcacgtcatcctcagactcgggaggacatcacatcggctggggtgagcggcagggccagtggctgcgcaggagaaggctggatggggccatcaacagggtccccgtgggattctaccagagggtgtggaagatcctccagaagtgccacggtctctccatcgatggttatgtcctcccatcctcgacgacccgagagatgaccccgcatgagatcaagtttgctgtccatgtcgaatcggtgctgaaccgcgtgccgcagcccgagtaccggcagctgctggtggaagccatcatggtgctgacgctgctctcggacacggagatgaccagcatcgggggcatcatccacgtggaccagatcgtgcagatggccagtcagctgttcttgcaggaccaggtgtcaattggtgccatggacaccctggagaaagaccaagccacaggaatctgccacttcttttatgacagcgctccgagtggggcttatgggacgatgacctacctaacaagagcagtggcttcttatttgcaggaattgttgcccaattcgggctgccagatgcaatagggtctcacctggaaacatgatcacactctcaatctgtcacgtgccccctagccttactgggaaccttctgtcccccaagatcccctgtgctatcaggaaagcatgtcccatcagaaacactctcggggggcaatggtagcactcaccctgaaactgatgtatgttaaagccacagagatagagctgaggagtcctgtgttcccccgcaaggagcaccccgggatcattttctaggttcatttctctggaacatttgctgtagcatctggtctcacggactctgaggaggaattggaaattggtctcttttgagtgcagagggaactgagacgccagcttaaattggctcttgcagagagttacagaaatagtttcgatgagctagtgacacatcctaaagatgcaaagatcctcctggcggcagtagccttgacaagggccacctcttcacaggatgcagtctgtctgtgcaccaaactcttcaccaaatagaacacttgtgtctctctgtggaatggggggttttcttgtgccttgcttgctttcatagccttccattttattggcatggctgccttgatgtaacataattctctgtccccaagatttagaaaattcctcttcgttcaccttggctcatggtcttccagggtttttatcctggctgtctatgaactagggttttctcctgccttaggaaaaatactgcatcttctggaatctagaaaaaaa

SEQ ID NO: 11702 - DNA, 3616 bp, Homo sapiens
gcccgcgtcgggcgcctggctctgtacgcgagcccggggatctgcggccttcgtgccccccctcccccgcccgccctctcgtggagcccggcgccggcggcggctgcccgggcggggggttgcggcgctcaggagaggccccggctccgccccgggcctgcccagggggagagcggagcggtccgcagccgggtcgggtcggggcccctcccgggaggagcgtggagcggcggcggcggcggcggcagaaatgatggaagaattgcatagcctggacccacgacggcaggaattattggaggccaggtttactggagtaggtgttagtaagggaccacttaatagtgagtcttccaaccagagcttgtgcagcgtcggatccttgagtgataaagaagtagagactcccgagaaaaagcagaatgaccagcgaaatcggaaaagaaaagctgaaccatatgaaactagccaagggaaaggcactcctaggggacataaaattagtgattactttgagtttgctgggggaagcgcgccaggaaccagccctggcagaagtgttccaccagttgcacgatcctcaccgcaacattccttatccaatcccttaccgcgacgagtagaacagcccctctatggtttagatggcagtgctgcaaaggaggcaacggaggagcagtctgctctgccaaccctcatgtcagtgatgctagcaaaacctcggcttgacacagagcagctggcgcaaaggggagctggcctctgcttcacttttgtttcagctcagcaaaacagtccctcatctacgggatctggcaacacagagcattcctgcagctcccaaaaacagatctccatccagcacagacagacccagtccgacctcacaatagaaaaaatatctgcactagaaaacagtaagaattctgacttagagaagaaggagggaagaatagatgatttattaagagccaactgtgatttgagacggcagattgatgaacagcaaaagatgctagagaaatacaaggaacgattaaatagatgtgtgacaatgagcaagaaactccttatagaaaagtcaaaacaagagaagatggcgtgtagagataagagcatgcaagaccgcttgagactgggccactttactactgtccgacacggagcctcatttactgaacagtggacagatggttatgcttttcagaatcttatcaagcaacaggaaaggataaattcacagagggaagagatagaaagacaacggaaaatgttagcaaagcggaaacctcctgccatgggtcaggcccctcctgcaaccaatgagcagaaacagcggaaaagcaagaccaatggagctgaaaatgaaacgttaacgttagcagaataccatgaacaagaagaaatcttcaaactcagattaggtcatcttaaaaaggaggaagcagagatccaggcagagctggagagactagaaagggttagaaatctacatatcagggaactaaaaaggatacataatgaagataattcacaatttaaagatcatccaacgctaaatgacagatatttgttgttacatcttttgggtagaggaggtttcagtgaagtttacaaggcatttgatctaacagagcaaagatacgtagctgtgaaaattcaccagttaaataaaaactggagagatgagaaaaaggagaattaccacaagcatgcatgtagggaataccggattcataaagagctggatcatcccagaatagttaagctgtatgattacttttcactggatactgactcgttttgtacagtattagaatactgtgagggaaatgatctggacttctacctgaaacagcacaaattaatgtcggagaaagaggcccggtccattatcatgcagattgtgaatgctttaaagtacttaaatgaaataaaacctcccatcatacactatgacctcaaaccaggtaatattcttttagtaaatggtacagcgtgtggagagataaaaattacagattttggtctttcgaagatcatggatgatgatagctacaattcagtggatggcatggagctaacatcacaaggtgctggtacttattggtatttaccaccagagtgttttgtggttgggaaagaaccaccaaagatctcaaataaagttgatgtgtggtcggtgggtgtgatcttctatcagtgtctttatggaaggaagccttttggccataaccagtctcagcaagacatcctacaagagaatacgattcttaaagctactgaagtgcagttcccgccaaagccagtagtaacacctgaagcaaaggcgtttattcgacgatgcttggcctaccgaaaggaggaccgcattgatgtccagcagctggcctgtgatccctacttgttgcctcacatccgaaagtcagtctctacaagtagccctgctggagctgctattgcatcaacctctggggcgtccaataacagttcttctaattgagactgactccaaggccacaaactgttcaacacacacaaagtggacaaatggcgttcagcagcgggtttggaacatagcgaatccgaatggatctgatgaaacctgtaccaggtgcttttattttcttgcttttttcccatccatagagcatgacagcatcgattctcattgaggagaaaccttgggcagctccggccaggccttgtaggaaaaggccccgcccgaggttccagcgtcaacggccactgtgtgtggctgctctgagtgaggaaaaaattaaaaagaaaaactggttccatgtactgtgaacttgaaaacttgcagactcaggggggtccctgatgcagtgcttcagatgaagaatgtggacttgaaaatacagactgggctagtccagtgtctatatttaaacttgttcttttcttttaataaagtttaggtaacatctcctgaaaagcttgtagcacaaaggctcagctggggatggtgtttgacttcggaggaaaaaagttgctattgcccgttaaaggcactagagttagtgttttatccctaaataatttcaatttttaaaaacatgcagcttccctctccccttttttatttttgaaagaatacatttggtcataaagtgaaacccgtattagcaagtacgtggcaatgttcattccaatcagatgcagctttctcctccgtctggtctcctgtttgcaattgcttccctcatctcagtagggaaaaaattgagtgggagtactgagatgtgtgggtttttgccattggacaaagaatgaggttagaagactgcagcttggagtctctctaggttttcaactatttcttcacaatttgaacacttgacggttgtcccttttaatttatttgaagtgctatttttttaaataaaggttcatctgtccatgcagtcctcttggattctctgaatgtagtaactatgaagctatgccaaaggtaggcagaaaatgggcttgggagccagacactccagggatcagtagttcctacccatagtctttgtgtgcttgctaaatggtgtacatttcttgttaaccacgttattaaaacttgatcagcacataaaaaaaaaaaaaa

SEQ ID NO: 11703 - DNA, 2323 bp, Homo sapiens
aactaacctttgaacgtgccagtaagtaagatggcgagaaaagcaagagagagtgggaccgatcgatagcgcagcggtcggcttggcgccctttcagcgtgcgcagtgaacgtgcgctcggagcggtagattgggcaggattcgcgcctccatttttccaggagagagcgggataccaagagaaccggaccagctgctggcagggaaactgtcttccttttctccaagatgtacagaaccaaagtgggcttgaaggaccgccagcagctctacaagctgatcattagccagctgctatatgacggctacatcagcatcgccaatggcctcatcaatgaaatcaagcctcagtctgtgtgtgcaccctcggagcagctcctgcatctcatcaaactcggaatggaaaacgatgacaccgcagttcagtatgcaattggtcgttcagatactgttgcccctggcacagggattgacctggaatttgatgcagatgttcagactatgtccccagaggcttctgagtacgaaacatgctatgtcacatcacataaaggaccatgccgtgtagctacctatagtagagatggacagttaatagctactgggtctgctgatgcttcgataaagatacttgacacagagaggatgttggccaaaagtgccatgccaatagaggtcatgatgaatgagaccgcacaacaaaatatggaaaaccacccagtgattcgaactctttatgaccatgtggatgaagtcacgtgccttgctttccacccaacagaacagatcctggcttctggttcaagggattatactcttaaattatttgattattccaaaccatcagcaaaaagagccttcaaatacattcaggaagctgaaatgttacgttccatctcttttcatccttctggagactttatacttgtcggaactcagcatcctactcttcgcctttatgatatcaacacctttcaatgttttgtctcttgcaatcctcaagatcaacacaccgatgctatatgttccgttaattacaattctagtgccaatatgtacgtaactggaagcaaggacggctgcatcaaattatgggatggtgtttcaaatcgatgcatcacaacttttgagaaagcacatgacggtgctgaagtttgttctgccattttttccaaaaattctaaatacattctctcaagtggaaaagactctgtagctaaactttgggaaatatcaacgggacgaacactggtcagatacacgggcgcgggtttaagtggacgccaggtgcaccggacacaggctgtgtttaaccacaccgaggactatgtgttgctgcccgacgagaggacgatcagtctttgctgctgggactcgaggacagccgagcggagaaacctgctgtcgttggggcacaacaatattgtacgctgcatagtgcactcccccaccaaccccgggttcatgacgtgcagcgatgacttcagagcgcggttttggtaccggagatcgaccactgactgagccaccctctccgtagggttctttctcgaggactctaccctcctcccccacgtcctgtctcagctgcagtcgtaagtccgtgcaccatccttgacgttttgctgccacctctgtccacattcttcttggatttgtataaaagaatctttttttaccttgatgtagaatcatggtggaaaaagttggaaacacagatctgtgcagttctacattcactgattattacagtgtgattttcatcggttttgtaagtacaggacttgccgtttcttttgatctcttgattgaaggaggatagggcattaaagtgcttttgacatgaggaattttcatttggttcttctgtcaactttcttgcttattctgctgaaccctctgtgtatttcccttccaggtatatttgaacagataagcaggcatgcagctctgagactcctgagttttatgccattatcaaaagcattttcaagaatccctcaattctatcctgaaatgatgttattctgataataaagctcagatctgcaactttattgttatatatttttcacttctgtaaaattaatggccagtttttcctgacaatttataggaacagtatctttcaacatactccctacattatccttcaatatctgcaatacttgtctttagtaactgtatttctggtaagattatgatttcatgagaaacaattgaaaatatatccgatctaattaaattaggtcagcctgctattgctctcaggtgttgcctgtcttcacgaatgattagtatcgattgacctctttcttaggtg

SEQ ID NO: 11704 - DNA, 1942 bp, Homo sapiens
caggaactgtgaagggtagatttgctgaaatggagaaacaaagacaagaggaacaaaggaagagaacggaggaggaacgaaaacgcagaattgagcaggatatgttagaaaagaggaaaatacagcgtgaattagcaaaaagggctgaacagattgaggacataaacaatacgggaactgaatcagcatcagaggaaggagatgattcactacttataactgtggtacctgtcaaatcatataaaacatctggaaaaatgaaaaagaattttgaggatctagaaaaagaacgtgaagagaaagaaaggatcaagtacgaggaagataaaagaataagatatgaagaacaacgaccatctctcaaggaagcaaagtgtctttcattagttatggatgatgaaatagaaagtgaagcaaaaatttttaaagggtaccgccctggtaaactcaaactcagttttgaagaaatggaaaggcaaagaagagaagatgaaaaaaggaaagcagaagaagaagccagaaggagaatagaggaagaaaagaaggcgtttgctgaagcaaggagaaatatggtagtagatgatgactccccagagatgtataagacaatctctcaagaatttcttacaccgggaaaactggaaattaattttgaagaattattaaaacaaaaaatggaagaagaaaaacgacgaacagaggaggaacggaagcataagctagaaatggagaaacaagaatttgaacaactgagacaggaaatgggagaggaagaggaagaaaatgaaacctttggattgagcagagaatatgaagaactgatcaaattaaaaaggagtggctctattcaagctaaaaacctaaaaagcaagtttgaaaaaattggacagttgtctgaaaaagaaatacagaaaaaaatagaagaagagcgagcaagaaggagaacaattgaccttgaaattaaagagcgagaagctgaaaattttcatgaggaagatgatgttgatgttaggcctgcaagaaaaagcgaggctccatttactcacaaagtgaatatgaaagctagatttgaacaaatggctaaggcaagagaagaagaagaacaaagaagaattgaagaacaaaagttactacgcatgcagtttgaacaaagggaaattgatgcagcactacaaaagaaaagagaagaggaggaggaggaagaaggtagcatcatgaatggctccactgctgaagatgaagagcaaaccagatcaggagctccatggttcaagaagcctcttaaaaacacatcagttgtagacagtgagccagtcagatttacggttaaagtaacaggagaacccaaaccagaaattacatggtggtttgaaggagaaatactgcaggatggagaagactatcaatatattgaaaggggagaaactcactgcctttacttaccagaaactttcccagaagatggaggagagtatatgtgtaaagcagtcaacaataaaggatctgcagctagtacctgtattcttaccattgaaagtaagaattaatcactctttttatcttttattctattaatttttttttccttaaaatcacttttcttcttctcttttttagctgatgactactagctcccctcccctctccctggaactttctctttcactccaactttcttactacatccatcttttctgtggcggggccaaaaaaggaaaccaggagtgccactatgctgacttcttattccttttcataacagtcttcaaagcacagctcatctaaagaatgcctacttcttttccaaataagcatcagatttatcgcctattatgcagtaacagtcaataaaatgtacttatgggggggaattactcaattattctatcagaacctattataaagactgtatttcccatagacgtttacagcaactatgttt

SEQ ID NO: 11705 - DNA, 4524 bp, Homo sapiens
aggtgtctggaactggattacagtttcttctgattgaacgcagcctttgaatactgcctggcctatcgcgaatacatccctgccttggacaagacgcagctgaatctctaagtgatgctactgccactaccaccccagagctccaaacctgtgcctaagaaatctcagtccagcaaaattgtgcccagtcatcatgacccatctgaaaagacgggggagaattgccaaacgaagatatctccatcttcacttcaggagtctccatcttcacttcagggagcactcaaaaagagatcagcttttgaagatctcactaatgcttctcaatgtcaacctgtccagcccaagaaagaagccaataaagagtttgtaaaagttgtttccaagaagataaacaggaacacacatgctcttggactggccaaaaagaataagcggaatctaaaatggcataagctggaagtcacaccagtagtagcctctactaccgtggtaccaaacattatggagaaaccactcattctagacatatccaccacctccaaaacacccaacactgaggaggcatctctcttcagaaagccattagttttaaaggaggaacccactattgaggatgaaacccttatcaataagtcattatctttaaaaaagtgctcaaatcatgaggaggtgtccttactggaaaagctacagcccctgcaggaggagagtgacagtgatgatgcgtttgttatagagccaatgacttttaagaagacacataaaactgaggaggcagccatcaccaagaagacattatccttaaagaagaagatgtgtgcaagtcagcggaagcagtcctgccaggaagagtcgttggctgtgcaggatgtcaatatggaagaggattccttctttatggagtcaatgagttttaagaagaagcctaaaactgaggagtcaatccccacccataagttatcatctttaaagaagaaatgtaccatttatgggaagatatgccactttaggaagccaccagtattgcagacaaccatctgtggagcaatgtcctccattaagaagcctaccactgagaaggagacacttttccaagagctatctgtattgcaagagaaacacaccactgagcatgagatgtccatcttgaagaaatcattggccttgcagaagaccaactttaaagaggattcccttgttaaggagtcgttagcctttaagaagaagcctagcactgaggaggcaatcatgatgccagtaatattgaaggagcagtgcatgactgaggggaagaggtcccgtctgaagccattagtattgcaggagatcacctctggagagaagtcgctcattatgaagccattgtccattaaagaaaagccatctactgagaaggagtccttttcccaggaaccatctgcattgcaaaagaagcacaccactcaggaggaggtttccatcttaaaggagccctcgtccttgctaaagtctccaactgaggagtcaccttttgatgaggctttggcttttacaaagaagtgtaccattgaggaggcaccccccaccaagaagcctttaattttaaagaggaagcatgccactcaggggacaatgtcccacttgaagaaaccactaatattacagaccacctctggagaaaagtcacttattaaggagccactgccctttaaagaagaaaaagtgtctttaaagaaaaagtgtaccacacaagagatgatgtccatctgtccagaactgttggactttcaggatatgattggtgaagataagaattctttctttatggagccaatgtcatttaggaagaaccctacaactgaggagacagtacttaccaagacatcgttgtctttacaggaaaagaaaattactcaggggaagatgtcccacttaaagaagccactggtcttgcagaagatcacttctgaggaggagtcattctataagaagctgttgccctttaagatgaaatctacaacggaagaaaagttcctctcccaggaaccatctgcattgaaagagaagcataccaccttgcaggaagtgtccctctcaaaagagtcattggccatccaagagaaggctaccactgaggaggaattctctcaggaactattttcattgcatgttaagcataccaacaaaagtgggtccctcttccaggaggctttggtcttgcaagagaagactgatgccgaagaggattccttgaagaacttgttggctttgcaggagaaaagcaccatggaagaagagtcccttatcaataagctattggctctgaaggaggagctttctgctgaggcagccacaaacatacagacacaattatctttaaagaagaagtccacttctcatggaaaagtgttcttcctgaagaagcagttggctttgaatgagaccatcaatgaagaggagttccttaataagcagccactggccttggaggggtatcccagcattgcggagggggagaccctcttcaagaagcttttggccatgcaggaggagcccagcattgagaaggaagctgtcctcaaggagcccactattgacacagaagctcactttaaggaacctttggccttgcaggaggagcccagcactgagaaggaggctgtcctcaaggagcccagtgttgacacagaagctcactttaaggaaactttggccttgcaggagaagcccagcattgagcaggaggccctctttaagcgacactcagctttgtgggagaagcccagcactgagaaggagaccatcttcaaggagtctttggacttgcaagagaagcccagcattaagaaagagaccctcctcaaaaagccattagccttgaagatgtctaccatcaatgaggcagtcctcttcgaagatatgatagctctgaatgagaaacccaccactgggaaggagttgtccttcaaggagccattagccttacaagagagtcccacctacaaggaagacacctttctcaaaacattgttggtcccccaagttggaaccagcccaaatgtgtctagcactgcccctgaatccataaccagcaagtccagcattgctaccatgaccagtgtgggcaaatctggtaccatcaatgaggcattcctcttcgaagatatgataactctgaatgagaaacccaccactgggaaggagttgtccttcaaggagccattggccttacaagagagtcccacctgcaaggaagacacctttctggaaacattcttgatcccccaaattggaaccagcccatatgtgtttagcaccacccctgaatccataacagagaagtccagcattgcaaccatgaccagcgtgggcaagtccaggaccaccaccgagtccagtgcatgtgaatctgcttctgataaacctgtctcaccacaggccaagggaacaccaaaggagataaccccacgggaagatattgatgaggacagcagtgatccaagtttcaacccaatgtatgccaaggaaatcttcagttacatgaaagagagagaggaacagtttatacttacagattacatgaacaggcagattgaaatcaccagtgacatgagggccattcttgtggactggttggtggaggtgcaggtgtcctttgagatgacccatgagaccctgtacttggcagtgaagctggtggatctctacctaatgaaggcagtatgcaagaaggataagttacaactccttggtgccactgcctttatgattgcagcaaaatttgaggagcacaactcacctcgtgtggatgactttgtgtacatctgtgatgataattatcagcgatctgaggtactcagcatggaaatcaacatcctgaacgtcctcaaatgtgacattaacattcccatcgcctaccattttctgcgcagatatgctaggtgtatccacaccaacatgaagacactgaccttgtcccgctacatctgcgagatgaccctgcaggaataccactatgtccaggagaaggcttccaagctagctgctgcctccttactcctggccctctacatgaagaagctcggatactgggttcccttcctggagcattacagtggctacagtatctctgagcttcaccccttggtcagacagctgaacaaactgctgactttcagttcttacgatagtctcaaggctgtgtattacaagtattctcacccggtcttctttgaagtcgccaaaatccctgccttggatatgttgaagctggaggagattttgaactgtgattgtgaggctcagggcctggtactctagcagcagccacagggctaagcatgcatgttaacagggtatatttattctatgttcgaatttgtcttttgatcgcttttattcatttttcctttctttgtcttttcccaaactgataatgttataaatatttatgttgcttgtttttatgaaagaaaaaatattgtcatatttgactacaaatttaataaaaaattaatggttattgttaaaaaaaaaaaaaaa

SEQ ID NO: 11706 - DNA, 4994 bp, Homo sapiens
acagtccctggtaaacacaagtagtattacaagtcgggagctcttcaagtcttggatgagactgtagagcggtcttgtgcggcaatgtgctaccttaaaataaataaataaataaacccctgttatgtccggagtttgtttccacccggagaggaatggaagagcaccagagagcgcttagctttctggttggatgttttgggttcatcagacttaacttctgctagaaattgttaccagcctctattagaaaatcccatggtgtcagaaagtgatttttctaaagacgttgcagtgcaagtgttgcctttggataaaatagaagagaacaacaagcaaaaagcaaatgacatcttcatttctcagtatacaatgggacagaaagatgctctaagaacagttttaaagcaaaatgtctcactttgtctcacaggctggagtgatcacagtggggtgatcacaactcactgcagtctctacctcctcaggctcatgagatcctcccacctcagcctcccgagtagctgggactacagagctcaaagcatgcctgtttttaaggaagtaaaggtacatctgttagaagatgcaggcatagagaaggatgctgttactcaggagactagaatttcacccagtggaattgattcagctacaaccgtggctgcagcaactgctgctgccattgcaaccgcagctccgttgataaaggtgcagagtgatttggaagcaaaagtcaattctgttacagaattacttagtaaattacaggagactgataaacacctgcaacgtgttacagagcagcaaacaagcattcagaggaaacaagagaaattacattgtcatgatcacgaaaagcaaatgaatgtgtttatggagcagcacataaggcatcttgaaaagttacaacaacaacaaatagatattcagactcattttattagtgctgcactcaagactagtagttttcagcctgttagtatgccctcctccagagcagtggaaaagtattccgtaaaaccagaacaccctaatcttggtagctgtaatccatctttatataacacatttgcttccaaacaagcacctttaaaagaagttgaagatacgagttttgataaacagaaatctcctttggagacaccagcacctcgcagatttgctcctgtacctgtttcaagggatgatgaactatcaaagagggaaaatcttttggaagaaaaagaaaatatggaagtgtcgtgtcacagaggaaatgtaagactattggaacaaattttgaataataatgattctttgacaagaaaaagtgaatcatcaaacaccacctcactaactaggtcaaaaataggatggactcctgagaaaacaaacagatttccttcctgtgaagagctagaaacaactaaagtgactatgcagaagtctgatgatgttcttcatgaccttggccaaaaagagaaagaaacaaatagcatggtccagccaaaagaatctctgagtatgttgaagcttccagatcttccacagaattctgttaagcttcaaacaaccaatacaacaagatctgtattgaaagatgctgagaagattttgagaggagtacaaaacaataaaaaagtacttgaagaaaacctggaagctattattcgtgcaaaagatggagctgccatgtattcgcttatcaatgctttatctaccaacagagagatgtcagagaaaattaggatcagaaagacagtggatgaatggattaaaactatttctgcagaaattcaggatgaactgtcaagaacagattatgaacaaaaaagatttgatcagaagaatcagagaaccaagaaaggtcagaatatgactaaagatattagaaccaacacacaagataaaactgtcaacaaatctgtaattccaagaaaacattctcaaaagcaaatagaagagcattttagaaatctacctatgaggggcatgcctgcttcaagtttacagaaagagagaaaggaagggcttttgaaagcaaccacagtaatacaagatgaagattatatgttacaagtctatggaaagccagtttatcagggccatcgaagcactcttaaaaaaggaccatatctcagatttaattctccatctcctaagtccagaccacagagaccaaaagtaatagaacgagttaaaggcactaaggtaaagtcaataagaacacagactgacttctatgcaacaaaacctaagaagatggattctaaaatgaaacattctgttcctgtgttacctcatggcgatcagcaatatttgttcagcccaagtagagaaatgcctactttttcaggtacattggaaggtcatctgattcctatggcaattcttttaggacaaacccaaagtaatagtgataccatgccacctgctggagtgattgtcagcaagccacaccctgtaactgtgactacttctattcctccatcatctcgaaaagtagaaactggagtaaagaaacctaacatagccattgtagaaatgaagtcagaaaaaaaggatcctcctcagcttactgtgcaggtattacccagtgtagatattgacagcatttcaaatagtagtgctgatgtcctttcacctctgtctagccccaaagaagcatctcctcctcctgtgcaaacttggataaagactccagaaattatgaaggtagatgaagaagaggtgaagtttccaggaactaactttgatgaaataatcgatgtcatacaggaagaagaaaaatgtgatgaaattccagactctgaaccaattctggagtttaacagaagtgttaaagctgattctacaaaatataatggtcctccatttccgccagttgcttctacttttcagcccactgctgatattctggataaagtaattgagagaaaagaaacactggaaaatagcttaattcaatgggtagagcaagaaataatgtcaagaattatctctgggctctttccagtccagcaacagattgcacctagtatcagtgtttcagtcagtgagacaagtgaaccactgacttctgacattgtggaaggaacaagcagtggcgccctccagctttttgttgatgctggtgttcctgtgaactcaaatgtgattaaacattttgttaacgaagctcttgctgagaccattgctgtcatgctgggtgacagagaagcaaagaagcaaggtcctgttgctacaggtgtttctggggatgcttcaacaaatgaaacatatttgccggcaagagtgtgcaccccactgcctaccccacagcctacgcctccttgctcaccttcatcacctgctaaggagtgtgttttggtaaagactccagattcttctccctgtgattcggatcatgatatggcttttcctgtgaaagaaatatgtgctgaaaaaggagatgatatgcctgccatcatgcttgttaatactccaacagttacccctactactacacctcctccagcggcggcagtttttaccccaactttgtcagatatttccattgataaattgaaggtatcaagcccagagcttcccaagccatggggtgatggagacctgccactggaagaagagaaccctaactcacctcaagaagaacttcatccaagagctattgtaatgtctgtggctaaggatgaagaaccagagagtatggatttccctgctcagcctccacctccagagccagttccctttatgccatttcctgccggcaccaaggccccttccccctcacagatgccaggttctgattcatcaacactggagagcacattgagtgttactgtcactgaaactgaaactttagataaacccatctctgaaggagagattttatttagctgtggtcaaaaattggcccccaagattttagaagatataggactgtacctgacaaaccttaatgatagcttatccagcactctgcatgatgccgttgaaatggaggatgatcctcctagtgaagggcaagtgattaggatgtcccataaaaaatttcatgcagatgcaattctttcttttgctaaacaaaaccaggagtcagcagtttcccagcaagcagtctatcattcagaggacttggaaaacagtgtgggtgaacttagtgaaggacaaagaccccagctaacagcggcagcagagaacatcttaatgggacattctctctatatgcagccacctgtcactaatacacagtctttggatcaacaatgtgatcctaaaccattatctcggcaatttgacacagtttcaggtagtatttatgaagattcatgtgctagtcatggtccaatgagtttgggagaattggagttggagccaaattctaagctggttcttcccacaacacttctgacagcacaagaaaatgatgttaatttaccagtagccgctgaagatttttcccagtaccaactaaagcaaaatcaggatgttaagcaagttgaacacaaaccatcacaaagttacctacgtgttagaaataaatctgatattgcaccttcacagcaacaagtttcaccaggtgatatggatcggacacaaattgagcttaatccgtacctcacatgtgtattttcaggtgggaaagcagtgccactctccgcttcacagatgccccctgccaagatgtcagtgatgctgccgtcagtgaacctcgaggactgctctcagtctctgagtctcagcacaatgcaggaggacatggagtcttcgggggcagataccttctgaacgggaagagacagccagcacagtgtttatgccactggttttaaagtcattttaccttggcttaaaaccctctctcagactgtttggtttttgagcatattctgaaaaaaaaattccaatattttaaaataaaacaaaaagcataatttgggtatttaaagtttttaaataaaataagtataagtcattataaaaaaaaaaaaaaaaaaaaaaaaaaaaaa

SEQ ID NO: 11707 - DNA, 4523 bp, Homo sapiens
atgagaccccggggagcagcgtttgcagcgggcccgccaggtgacctgcacctgggcaccgccatcggcttcgcaggggccatctggaggagtcggtcacccgccatgtcgaccttgctggacattaagagcagcgtgctcaggcaggtgcaggtgtgcccgtccttccgccgcaggactgagcaggacccagggagtgccagcgccgacccgcaggagcctgccacgggggcctggaaacccggggatggcgtggagttctttgcccacatgcgcctcatgctgaagaagggggaaggcagacagggcttgccgtgcctcgaggtccccctgcgcagtggctcgccagcacccccggagcctgtggatcccagcctcggcctgagagccctggccccagaggaggtggagatgctctacgaggaggccctgtacacggtgctttaccgcgcgggtaccatgggccctgaccaggtggacgacgaggaggccctgctcagctatctccagcaggtgtttggcaccagccttgaggagcacactgaggccatcgagcgagtgaggaaggccaaggcccccacgtatgccctgaaagtctctgtcatgcgtgccaagaaccttctggccaaggaccccaacggcttcagcgacccatactgcatgctgggcatcctgcctgcctcggacgccacgcgggagccccgtgcacagaaggagcagcgcttcggcttccgcaagggcagcaagcgcggtggacccctgcctgccaagtgcatccaggtcaccgaggtgaagagcagcaccctgaaccccgtctggaaggagcacttcctcttcgagattgaggatgtgagcacggaccagctgcacctggacatctgggatcatgacgacgatgtatccctggtagaagcgtgcaggaagctgaatgaagtcatcggcctgaagggcatgggcaggtacttcaaacagatcgtcaagtcagcccgcgcaaacgggacagcaggacccaccgaggaccacaccgatgacttcctggggtgcctcaacatacctgtccgggaggtgcctgtggctggcgtcgaccgctggttcaagctggagccacgctccagtgcctcgcgtgtgcagggacactgccacctggttctcaagctgatcactacgcagagggatacggccatgagccagcgcgggcgatccggcttcctgtcccacctgctgctgctcagccatctgctgcggttggagcactcagcagaggagcccaactccagcagctggcgaggagagctcagcacaccagccgccaccatcctctgcctgcacggagcccagagcaacctgtcacccttgcagctggccgtgctgcactggcaggtcagcagccgccaccatcaaacctgcacgctggactacagctacctgctggggctgctggaggacatgcaggcacactgggaagaggctccttcactgccccaggagcaggaggagagcctggctgatagcctttccgccttctctgagttcgggctgcagctgctgcgccagctccgagactacttccctgccaccaacagcaccgctgtccaccgcctggagctgctgctgaagtgtctgggcaagctgcagctcttccaaccctcctttgagatctgccccttcgagtcggagctgaacatggacattgctgcggccctgaagagaggcaaccgtgagtggtacgacaggatcctgaatgacaagagtccccgagagcagccaggaccacagcgcctgcctgggctggttgtgctggctgacgccgtctatgatgaccttcagttctgctacagtgtgtacgccagcctcttccacagcatcctcaatgtggacgtcttcaccctgaccttccggcagctggagcgtctggtggctgaggaggcgtgggtgctgacggaggagctgagccccaagatgaccctggaggtggcctcggggctctttgagctctacctgaccctggctgacctccagcgcttctgggatagcatccctggccgggacagccgctctctggccctggctggcatccacgcccccttcctgcctgctgtgaagctctggttccaagtgctgagggaccaggccaagtggaggcttcagggagccgtggacatggacacgctggagcccgtggacgcctcctccaggcacagcagctccgcagccactgctggtctctgcctcagccacatccaggagttgtgggtgcgcctggcgtggcctgaccctgcccaggctcaggggctgggcacccagcttggccaggacgtgtgtgaggccaccctcttctatacggagctgcttcggaagaaggtggacactcagccaggggcggccggtgaagcagtgagcgaggcgctctgcgtggtcctcaacaatgtggagctcgtgcgcaaggctgctgggcaggccttgaagggcctggcatggccagagggggccacggggcccgagggggtgctcccccgccctctgctcagctgcacacaggccctggacgatgatctgcaacgggaggcccacacggtgacagcgcacctgacctctaagatggtgggcgacatccgcaagtatgtacagcacatcagtctctcgcctgactccatccagaacgatgaggccgtggccccgctcatgaagtacctggatgagaagctggccctgctgaacgcctcgctggtgaaggggaacctgagcagggtgctggaggccctgtgggagctactcctccaggccattctgcaggcgctgggtgcaaaccgtgacgtctctgctgatttctacagccgcttccatttcacgctggaggccctggtcagttttttccacgcagagggtcagggtttgcccctggagagcctgagggatggaagctacaagaggctgaaggaggagctgcggctgcacaaatgttccacccgcgagtgcatcgagcagttctacctggacaagctcaaacagaggaccctggagcagaaccggtttggacgcctgagcgtccgttgccattacgaggcggctgagcagcggctggccgtggaggtgctgcacgccgcggacctgctccccctggacgccaacggcttaagtgacccctttgtgatcgtggagctgggcccaccgcatctctttccactggtccgcagccagaggacccaggtgaagacccggacgctgcaccctgtatacgacgaactcttctacttttccgtgcctgccgaggcgtgccgccgccgcgcggcctgtgtgttgttcaccgtcatggaccacgactggctgtccaccaacgacttcgctggggaggcggccctcggcctaggtggcgtcactggtgtcgcccggccccaggtgggcgggggtgcaagggctgggcagcctgtcaccctgcacctgtgccggcccagagcccaggtgagatctgcgctgaggaggctggaaggccgcaccagcaaggaggcgcaggagttcgtgaagaaactcaaggagctggagaagtgcatggaggcggacccctgagtccatcagctgccagccccggccctggcccccaccccaagttccctgaagcatcctccagctcactgtggccagctttgtgcaaccagggcccacggcgcccctcctgtgctgtgacgtgtgtgtcgtggctggccccgcggcgcctaccgccctggccgtgtctgtctggtgtgtgctgtgaacccctgcacccaaccccacatctgggtggccaacttggcaggacttggccagcagctgcccaggacacagtgcaggccagagcgggcttgaccacctggtgggcctccctgcccgcttccttgggctccccggccctgggtgggcggtgggcagctggtctccagggactcagtgagtggctgtgctctctgcacaacgggcaatgtgcagacgcatttttggtaatcacagctggggagtgaaaagggtgccactggcaccactgggtggatggtccagagcctccacccacagaggggatgcaaagggcaggtgagtcaagaaccgcataggtctccagtccccacggggctcccaggccggggaaaggttcccctgaggtcactctgaggccagggacgtcacccaaggctggtggtcagtgtgaagggctccgtgccaactggtcagctgtccttcacgcacatatccgtggccacctgagacctgctccacgacccttccaggcagagccgagagttcgccccaacccttccccaggcccagtgtgaaaaacagactcacaaggggcttcttggcctgcagcttcatttgcgagagcgccgaggcaggacacagagcacagctgtgctggaagtgtggggagaacccggacagctcagtcctgccagcagccgcaaagagccgaggctgccaggcccatttatgtccctcatgtctctagattttctcgtcacccagcctcaaaaatatatgtgtctgcaaccctcagt

SEQ ID NO: 11708 - DNA, 2110 bp, Homo sapiens
gcttcctggggagaagcacggaccgcgcacctctgagctgccagggtggggacgctgccctagcgggatctgaagggattttgaaaggaatcatgtcttcagcctggaagactccccgtggatcagatgcaatgcctgagatcatggtgaaaatcattggaagtaaacactttcaatacctcgtggagaagccaaagatcaaggagaatgacagcttgaaaacagaaacccaaacaatgcaccagaaaccaatgactgataatgcaaggcagatgagcagagacaccccagttcccattaacttcactgatcagcaaaccactgataatccagatgatgtgaaagagaaaaagcacccagagaacaaccagaaatcagaaaacaaccagaaactactaacaggggcaaacagtagcagattcctggatggcaatattcccagtcaagcaaatgtccactgcagctctgtaccaaccggagaccagtccttatcctatgtgcatggcattcccaggagaaagcttagagactggtccttggaacagatggtgagaggcagctctgaccaacctgaggatattggccagagcccaagtgggacaacaaatgaagacgcttttcttcttgccctggtcagaagagaactcaagtcacgtcctttgagttccaacttattagaaaagcttcagaaagagctgaagatcctggacccaatctcttcaggatttcttctccaatctcagctgagccgcctctttttgaagcatgaagtccctctacagttaccaacagttaaaatcctttgtcagagattttctaagaggggttctcctgaaatggtgaattatgaaaagctactctggtttttaaacagtgcagcatcagattatccacagcaaaataaagcagctgcagacctgagaaaaactgagagtcatggcactcatagccaaagcactccacctcagcactccagctcacagccagaagtgaacaggagtctgttggagattttgaagatggcactaaggacaaccaatggcagactcaacatagacaatctcaatctgagttttcgaaaagaagatcgctcgttctctggctgcctccctctacctaaggtcagggctatatgtgggaagcatggattatatctgaccctgagcctgctggaaacattgcttaaccatcaagatttgggttaccaaaatgaaataaaatggcagaattttgttgagatgctgaccagagcttcttctgatttgttatctgatttgcctacagggaagaatgaaaagaaagcccctgcccctccaatggagcctgaagtccccgagatgtctcaaagcaaaactgaacatatgaaaactccagaagaggagctgcagccagaaagctctcctgctgaaacttcagcctgcaaagatcctctgaaacctttaaagatcaggccagtctcccagcccttcgtgaatccagctgtgaagaacaaggctgaggaatgtgagacgtggatagacaggttcaggaagctggaaaatgccctctacctgtgtgatctgagtaacacaggagttctggagaaggaacgagccagacgcctcattcacaactacaatctcatttacaacctgtccctgagccctcagaaaatcgaccaggccttgcgcagattccgttcgggagaaaatatgctcttggagccagcactgcggtacttaaaggagctatgataacaagcccatattgtgagaacagatgtttcccttatctccctttttacccagacacatgtttctccccagcctaagtgtagtggcggaggcattgtcagagtggaggccgatgcagctattgtagatgcttttgatttggacttagtttctggctatgatgctcactcataagcagttcaaagtgatcagaggaaacctagttttatcttttgatgtggcaagaacccagctacttagaatctccttctgttttaataaaacttattattaatattaaaaaaaaaaaaaaaaaaaaaaaaaaaaaaaaaaaaaaaaaaaaaaaaaaaaaaaaaaaaaaaaaaaaaaaaaaaaaaaaaaaaaaaaaaaaaaaaaaa

SEQ ID NO: 11709 - DNA, 2961 bp, Homo sapiens
aagagatgatttctccatcctgaacgtgcagcgagcttgtcaggaagatcggaggtgccaagtagcagagaaagcatcccccagctctgacagggagacagcacatgtctaaggcccacaagccttggccctaccggaggagaagtcaattttcttctcgaaaatacctgaaaaaagaaatgaattccttccagcaacagccaccgccattcggcacagtgccaccacaaatgatgtttcctccaaactggcagggggcagagaaggacgctgctttcctcgccaaggacttcaactttctcactttgaacaatcagccaccaccaggaaacaggagccaaccaagggcaatggggcccgagaacaacctgtacagccagtacgagcagaaggtgcgcccctgcattgacctcatcgactccctgcgggctctgggtgtggagcaggacctggccctgccagccatcgccgtcatcggggaccagagctcgggcaagagctctgtgctggaggcactgtcaggagtcgcgcttcccagaggcagcggaatcgtaaccaggtgtccgctggtgctgaaactgaaaaagcagccctgtgaggcatgggccggaaggatcagctaccggaacaccgagctagagcttcaggaccctggccaggtggagaaagagatacacaaagcccagaacgtcatggccgggaatggccggggcatcagccatgagctcatcagcctggagatcacctcccctgaggttccagacctgaccatcattgaccttcccggcatcaccagggtggctgtggacaaccagccccgagacatcggactgcagatcaaggctctcatcaagaagtacatccagaggcagcagacgatcaacttggtggtggttccctgtaacgtggacattgccaccacggaggcgctgagcatggcccatgaggtggacccggaaggggacaggaccatcggtatcctgaccaaaccagatctaatggacaggggcactgagaaaagcgtcatgaatgtggtgcggaacctcacgtaccccctcaagaagggctacatgattgtgaagtgccggggccagcaggagatcacaaacaggctgagcttggcagaggcaaccaagaaagaaattacattctttcaaacacatccatatttcagagttctcctggaggaggggtcagccacggttccccgactggcagaaagacttaccactgaactcatcatgcatatccaaaaatcgctcccgttgttagaaggacaaataagggagagccaccagaaggcgaccgaggagctgcggcgttgcggggctgacatccccagccaggaggccgacaagatgttctttctaattgagaaaatcaagatgtttaatcaggacatcgaaaagttagtagaaggagaagaagttgtaagggagaatgagacccgtttatacaacaaaatcagagaggattttaaaaactgggtaggcatacttgcaactaatacccaaaaagttaaaaatattatccacgaagaagttgaaaaatatgaaaagcagtatcgaggcaaggagcttctgggatttgtcaactacaagacatttgagatcatcgtgcatcagtacatccagcagctggtggagcccgcccttagcatgctccagaaagccatggaaattatccagcaagctttcattaacgtggccaaaaaacattttggcgaatttttcaaccttaaccaaactgttcagagcacgattgaagacataaaagtgaaacacacagcaaaggcagaaaacatgatccaacttcagttcagaatggagcagatggttttttgtcaagatcagatttacagtgttgttctgaagaaagtccgagaagagatttttaaccctctggggacgccttcacagaatatgaagttgaactctcattttcccagtaatgagtcttcggtttcctcctttactgaaataggcatccacctgaatgcctacttcttggaaaccagcaaacgtctcgccaaccagatcccatttataattcagtattttatgctccgagagaatggtgactccttgcagaaagccatgatgcagatactacaggaaaaaaatcgctattcctggctgcttcaagagcagagtgagaccgctaccaagagaagaatccttaaggagagaatttaccggctcactcaggcgcgacacgcactctgtcaattctccagcaaagagatccactgaagggcggcgatgcctgtggttgttttcttgtgcgtactcattcattctaaggggagtcggtgcaggatgccgcttctgctttggggccaaactcttctgtcactatcagtgtccatctctactgtactccctcagcatcagagcatgcatcaggggtccacacaggctcagctctctccaccacccagctcttccctgaccttcacgaagggatggctctccagtccttgggtcccgtagcacacagttacagtgtcctaagatactgctatcattcttcgctaatttgtatttgtattcccttccccctacaagattatgagaccccagagggggaaggtctgggtcaaattcttcttttgtatgtccagtctcctgcacagcacctgcagcattgtaactgcttaataaatgacatctcactgaacgaatgagtgctgtgtaagtgatggagatacctgaggctattgctcaagcccaggccttggacatttagtgactgttagccggtccctttcagatccagtggccatgccccctgcttcccatggttcactgtcattgtgtttcccagcctctccactcccccgccagaaaggagcctgagtgattctcttttcttcttgtttccctgattatgatgagcttccattgttctgttaagtcttgaagaggaatttaataaagcaaagaaactttttaaaaacgt

SEQ ID NO: 11710 - DNA, 3331 bp, Homo sapiens
cagagggcaccgcccaggcctcggaaggtgtcagggagaactttccgtggtttcagcgtcgtcgcctggagcggcggtttagagagccgagcctgatgggcgccaaggccggctggctgcttggagcgctgcctcgaagggactgcgtaaggaagctaatccggagaacccaggccagagcctgaaatatggcgacctgcatcggggagaagatcgaggattttaaagttggaaatctgcttggtaaaggatcatttgctggtgtctacagagctgagtccattcacagtggtttggaagttgcaatcaaaatgatagataagaaagccatgtacaaagcaggaatggtacagagagtccaaaatgaggtgaaaatacattgccaattgaaacatccttctatcttggagctttataactattttgaagatagcaattatgtgtatctggtattagaaatgtgccataatggagaaatgaacaggtatctaaagaatagagtgaaacccttctcagaaaatgaagctcgacacttcatgcaccagatcatcacagggatgttgtatcttcattctcatggtatactacaccgggacctcacactttctaacctcctactgactcgtaatatgaacatcaagattgctgattttgggctggcaactcaactgaaaatgccacatgaaaagcactatacattatgtggaactcctaactacatttcaccagaaattgccactcgaagtgcacatggccttgaatctgatgtttggtccctgggctgtatgttttatacattacttatcgggagaccacccttcgacactgacacagtcaagaacacattaaataaagtagtattggcagattatgaaatgccaacttttttgtcaatagaggccaaggaccttattcaccagttacttcgtagaaatccagcagatcgtttaagtctgtcttcagtattggaccatccttttatgtcccgaaattcttcaacaaaaagtaaagatttaggaactgtggaagactcaattgatagtgggcatgccacaatttctactgcaattacagcttcttccagtaccagtataagtggtagtttatttgacaaaagaagacttttgattggtcagccactcccaaataaaatgactgtatttccaaagaataaaagttcaactgatttttcttcttcaggagatggaaacagtttttatactcagtggggaaatcaagaaaccagtaatagtggaaggggaagagtaattcaagatgcagaagaaaggccacattctcgataccttcgtagagcttattcctctgatagatctggcacttctaatagacagtctcaagcaaaaacatatacaatggaacgatgtcactcagcagaaatgctttcagtgtccaaaagatcaggaggaggtgaaaatgaagagaggtactcacccacagacaacaatgccaacatttttaacttctttaaagaaaagacatccagtagttctggatcttttgaaagacctgataacaatcaagcactctccaatcatctttgtccaggaaaaactccttttccatttgcagacccgacacctcagactgaaaccgtacaacagtggtttgggaatctgcaaataaatgctcatttaagaaaaactactgaatatgacagcatcagcccaaaccgggacttccagggccatccagatttgcagaaggacacatcaaaaaatgcctggactgatacaaaagtcaaaaagaactctgatgcttctgataatgcacattctgtaaaacagcaaaataccatgaaatatatgactgcacttcacagtaaacctgagataatccaacaagaatgtgtttttggctcagatcctctttctgaacagagcaagactaggggtatggagccaccatggggttatcagaatcgtacattaagaagcattacatctccgttggttgctcacaggttaaaaccaatcagacagaaaaccaaaaaggctgtggtgagcatacttgattcagaggaggtgtgtgtggagcttgtaaaggagtatgcatctcaagaatatgtgaaagaagttcttcagatatctagtgatggaaatacgatcactatttattatccaaatggtggtagaggttttcctcttgctgatagaccaccctcacctactgacaacatcagtaggtacagctttgacaatttaccagaaaaatactggcgaaaatatcaatatgcttccaggtttgtacagcttctaagatctaaatctcccaaaatcacttattttacaagatatgctaaatgcattttgatggagaattctcctggtgctgattttgaggtttggttttatgatggggtaaaaatacacaaaacagaagatttcattcaggtgattgaaaagacagggaagtcttacactttaaaaagtgaaagtgaagttaatagcttgaaagaggagataaaaatgtatatggaccatgctaatgagggtcatcgtatttgtttagcactggaatccataatttcagaagaggaaaggaaaactaggagtgctccctttttcccaataatcataggaagaaaacctggtagtactagttcacctaaggccttatcacctcctccttctgtggattcaaattacccaacgagagatagagcatctttcaacagaatggtcatgcatagtgatgcttctccaacacaggcaccaatccttaatccctctatggttacaaatgaaggacttggtcttacaactacagcttctggaacagacatctcttctaatagtctaaaagattgtcttcctaaatcagcacaacttttgaaatctgtttttgtgaaaaatgttggttgggctacacagttaactagtggagctgtgtgggttcagtttaatgatgggtcccagttggttgtgcaggcaggagtgtcttctatcagttatacctcaccaaatggtcaaacaactaggtatggagaaaatgaaaaattaccagactacatcaaacagaaattacagtgtctgtcttccatccttttgatgttttctaatccgactcctaattttcattgattaaaactcctttcagacatataagtttaataaataacttttttgttgactttcaagtaaagtgattttttttaatttaacataaagtcttcagaaagcctttctatgaaagaattttaacctataatgtaaaccatgtatctgagataacaaagcagaatgaaacttgagtcacttactaaatatagtggatataaaatagaacacctgactttgctcttagaccataa

SEQ ID NO: 11711 - DNA, 6183 bp, Homo sapiens
ctttttgtagggagaagggcaggatgtttttaactgaatgtgacctcaggggaatactagagaaaataataaaatttctgaatggggcagcgtggagaaatcctaagagaaatagcataagagcattttggaacacatccaggaaaagataactttcgacacacctgtagacgttcgccaggtaaaggagtgatggaaactctccagttcagatccagtagcttttagggaaggaactacagttgctgacttaagttgaagaagcatctatttaatgtctggtcaaatcctacaagaaacacagaaatctatgattaaaaagctgagcactttgatatactgcaaagggtagagaaggcaggacggtagaaattttctgcaagaaagaatgaatttcaggatttatcactaaataagacaaagtcatttatttagtccccctgacacagcagggcaaactgagttgacatacaagttacctggagaaaaagagagcaattccaggacttcctcttcagcctaaaagaaggtaccagatctgtgcactggggcgatgtggaagagacctgcttattgcccctgatgtaagctccagtaagaaaagacgtcaagtacaagtactaggaaatcactttatacatctgtttataggaatgacctcaggactttgtgttcatgttatagatggatgcagaggctgaagataaaacgctgcgtactcgctctaaaggaaccgaggtgccaatggattcactaatccaggagctcagtgttgcctatgattgctccatggcaaagaagagaacagctgaagatcaggctttgggggttccagtcaacaaaaggaaatccctgctaatgaagccccgacactacagcccaaaagcagactgccaagaagaccgcagtgacaggacagaggacgatggccccttggaaacacatggtcactctaccgcagaggaaatcatgataaaacctatggatgaaagtcttctttcaactgcacaagaaaactccagtaggaaggaagacagatactcttgttatcaagagctcatggtcaagtctttaatgcacttggggaaatttgaaaaaaatgtatctgttcagactgtaagtgaaaatttaaatgacagtggcatccagtctttaaaagcagagagcgatgaagcagacgagtgctttctgattcattctgatgatggaagagacaagattgatgattctcagccacccttctgctcctctgatgacaatgaaagtaactctgaaagtgcagaaaatggctgggacagtggctccaacttctcagaagaaaccaaaccacctagagtcccaaagtatgttttaacagatcataaaaaagacctattggaagttcctgaaataaaaactgaaggtgacaaatttatcccttgtgagaacaggtgtgattctgaaacagaaaggaaagacccgcagaatgctctcgcagaacccctggatggcaatgcccagccctcattccctgacgttgaggaggaagatagcgagagcctggcagtaatgacggaagagggtagtgacctggaaaaggccaaggggaatttaagtttgctggagcaggcaattgctctgcaggctgagcgaggttgtgttttccataacacctacaaagagctggataggttcctgctggagcacctagcaggggaaaggaggcaaaccaaagttatcgacatgggtggaagacaaatctttaacaataaacattcaccaaggcctgaaaagagggagaccaagtgcccgatccctggatgtgatggcacgggacacgtgacagggctctacccgcaccaccgcagcctttcggggtgcccccacaaagtgcgggttcccctggaaattcttgccatgcatgaaaatgtgctcaagtgtcccacgccgggatgcacaggaaggggtcatgtgaacagcaaccgcaacacccacaggagtctttctggttgtccaattgctgcagctgaaaaattggcaatgtcccaggataaaaatcagcttgattctccccaaactgggcagtgtcctgaccaggcccacaggacaagtttggtgaagcaaattgaattcaatttcccgtcacaagccatcacctctcccagagccacagtgtcaaaagaacaagagaagtttggaaaagtaccatttgattatgccagttttgatgcccaagttttcggtaaacgccctctcatacaaacagtgcaaggacgaaaaacaccaccatttcctgaatcaaagcattttccaaatccagtgaaatttcctaatcgactgcctagtgcaggcgcccacacccagagccctggccgtgccagctcttatagctacggtcaatgtagtgaagacacccacatagcagcagctgctgccatcctgaacctttccacccgctgcagggaagccacagacatcctctccaacaagccacagagtctgcatgccaagggagccgaaatagaagtggatgaaaatggcacattggacttaagcatgaaaaaaaatcgaatcctggacaagtctgcacccctaacttcctctaacacttctattccaactccttcctcttccccattcaaaacaagcagcattctggtcaatgcagcattctatcaggctctttgtgaccaagagggctgggacactcctatcaactatagcaaaactcacgggaagacagaggaggagaaagagaaagacccagtgagctctctagaaaatttagaggaaaaaaagtttcctggagaggcctctataccaagccctaaacccaagcttcatgcaagagatctcaaaaaggaactaatcacctgtccaacaccaggatgtgatggaagtggccacgtgacaggaaactatgcatctcatcgcagtgtttctggatgtcctttagcagataagactctaaaatccctcatggctgccaactctcaggagcttaagtgtccaaccccaggctgcgatggctcggggcacgtgactggaaactatgcttcccacagaagcttgtccggatgccctcgtgcaaggaaaggtggtgtcaaaatgacccctaccaaggaagaaaaagaagaccctgaactgaaatgtcctgtgatagggtgtgatggccaaggtcacatatcaggtaaatacacatcacaccgcacagcttctggctgtcctctggctgccaagagacagaaggagaatcctctcaatggagcctccctctcctggaaactgaacaaacaagagctaccacattgtcccttgccaggctgcaatgggctgggccatgtaaataatgtttttgtcacccaccgaagcttatctggatgtcctctcaatgcacaagttatcaaaaagggcaaggtttctgaagaactcatgaccatcaagctcaaagcaactgggggaatagagagtgatgaagaaattaggcatttggatgaagaaataaaggaactgaatgaatccaaccttaaaattgaagcagatatgatgaaacttcagacccagatcacatctatggagagcaacttaaagacgatagaggaggagaacaaactcatagaacagaacaatgaaagtctgctgaaagagctggcaggtctaagccaagctctcatttcaagccttgctgacatccagcttccacagatgggacctatcagtgagcagaattttgaagcatatgtaaatacactcacagatatgtacagcaatctggaacgggactattccccggaatgcaaagctctactggaaagtatcaaacaggcagtgaagggtatccatgtgtaggatcacagcgctgccgggcaacagaagttaccaacagcagtaaactccagatggatctgttagaggttcatgtactgctaaggcgtggaggttgccgtactgcatttacaatttgcaacattgcactaattttattttccccagctgatataaaaaggaaagaaaaactatgatagacttcttggattaaaagcaatgcagtcaattattagatcttatttattttcatatgtttttcttttatttcttcattgtactcttcttttgtaaagtatatgtaaaataaatgtgacatttttataatttatttattactaatcaaagagttttttatcttttaactgcattttgaagtctgccgtatttttacaagtgtgtttattaatttattttccaataggatttaaatagaaatgctattctcaagtcatctttcttgctgggttttaatgaggaaacaggaaagggtgaaggaaatccttgtctaaggactgcactatagttgagtttgatttttattgcacacttcttcccccacctttcactgatttttgtatttataaatgaatttgcggtaaggtgagctgcacggaaggaataagaagacaaatggcgcccactagtggggaatccgcactcacaaaagcacaggatgctggaaaacagcctgctcagaatttgttagcaataattaaatatagcaatcagcaaagtattcgacttggctggacggttttcgttaatatgaattatttatttgaaatgttttaaagaaacataagcctttttagtgatgcagatttgtctgtttgtttttcaagtcatatcagatcgttggcaactcgtatcccaagatgaaaaataagacttggtgtgaccagccaggctttcctgccatatgttggtacaatatacaagtgacaatattggtgtagatttgtacttagcaaatacaaacacatccaaatgaaaaattttgtagataccatatcccctgaaatagcatttatcttactgggttgactggaaaggaatggaaaatatagtaacacatgaaaaaatgctactccaatctgaatgattacttcaaacactggcaccttgggtctcacccaccataggaaacaagacaacattcaatttgatagaaatcttgccacaaaacttcaaatgctacaaaatatacacacacactcacacacacaggcatactcacacacagacacacacacacacacacacacagactcatccacacttcaaattgagcccacaatcttgaatttctgaacggatcagagtttcatagtttctatagtaaaggcaatgtctatttcagggattgtaaagtagttaagcattgtttcaaaagtttttttatatttattttttttaaggaaaaggtatagacaaccagctaaactgcctttttggtgtgcacacacatttcatgtgcagacgtgcctctgtgtaaatgtacacatgaacttcatgtgggcttaattttctgtgctataaacaaaagtgtttattttttattaacctcatggatatttagatggaaagtgatggcattcacaggcttgatgtattccactgttattactgttacctgcacaaatgaaaaacaatactcaacagtaattccactcccatgaaactttggtcattgttatgcattaagtggggcttatctttggtttggagttcatttgaactcttgaaccttagtttagtgaagatgaactgtctgttcttaggtagaaacggtgtttatttaaaaatcagttttaaaaaatgagctaccatatgtgctgtctattataaatgggacaccaaacaaaattttctattacagttgtgtacttgcaaacattttgctatacagtacttcatagatgcatacaaatgagctcacttattacaaagacaaacgtttaatttgctaaatattttaacaagtttgttatatattttatttaatttaaaagaaatctcttaccaacctacatatttattactataatttgctatgacttcaggttaatttatttgtgtttgcatagtttgagcaggatgttttgtgaagtatgtttgtatttatttgcctactttgtacttgatgtgttttgtaatgtgcactgaatttgttttcttttcaactatgttaatgatcaatactgtaaattgggtcttttgtaaacaaaaaggcaatgatgtatgcattttttttaatttgaggtagtttgtttgtatactgtttctccaaacacttaatatttcttacatcaaagcaacaaaattgtgttcagtgctgtacatttggtgtatggtaggaaataaaaattgataacg

SEQ ID NO: 11712 - DNA, 11558 bp, Homo sapiens
tcggcgggggcccgctcccaggcccgctcccgagcccgttccgctcccgtccgccttcttctcgccttctctccgcgtggctcctccgtcccggcgtctccaaaactgaatgagcgagcggcgcgtagggcgcgcggcggcggcggcggcggcggcggcatggagcgcagtggctgggcccggcagactttcctcctagcgctgttgctgggggcgacgctgagggcgcgcgcggcggctggctattacccccgcttttcgcccttctttttcctgtgcacccaccacggggagctggaaggggatggggagcagggcgaggtgctcatttccctgcatattgcgggcaaccccacctactacgttccgggacaagaataccatgtgacaatttcaacaagcaccttttttgacggcttgctggtgacaggactatacacatctacaagtgttcaggcatcacagagcattggaggttccagtgctttcggatttgggatcatgtctgaccaccagtttggtaaccagtttatgtgcagtgtggtagcctctcacgtgagtcacctgcccacaaccaacctcagtttcatctggattgctccacctgcgggcacaggctgtgtgaatttcatggctacagcaacacaccggggccaggttattttcaaagatgctttagcccagcagttgtgtgaacaaggagctccaacagatgtcactgtgcacccacatctagctgaaatacatagtgacagcattatcctgagagatgactttgactcctaccaccaactgcaattaaatccaaatatatgggttgaatgtaacaactgtgagactggagaacagtgtggcgcgattatgcatggcaatgccgtcaccttctgtgaaccatatggcccacgagaactgattaccacaggccttaatacaacaacagcttctgtcctccaattttccattgggtcaggttcatgtcgctttagttattcagaccccagcatcatcgtgttatatgccaagaataactctgcggactggattcagctagagaaaattagagccccttccaatgtcagcacaatcatccatatcctctaccttcctgaggacgccaaaggggagaatgtccaatttcagtggaagcaggaaaatcttcgtgtaggtgaagtgtatgaagcctgctgggccttagataacatcttgatcatcaattcagctcacagacaagtcgttttagaagatagtctcgacccagtggacacaggcaactggcttttcttcccaggagctacagttaagcatagctgtcagtcagatgggaactccatttatttccatggaaatgaaggcagcgagttcaattttgccaccaccagggatgtagatctttccacagaagatattcaagagcaatggtcagaagaatttgagagccagcctacaggatgggatgtcttgggagctgtcattggtacagaatgtggaacgatagaatcaggcttatcaatggtcttcctcaaagatggagagaggaaattatgcactccatccatggacactaccggttatgggaacctgaggttttactttgtgatgggaggaatttgtgaccctggaaattctcatgaaaatgacataatcctgtatgcaaaaattgaaggaagaaaagagcatataacactggataccctttcctattcctcatataaggttccgtctttggtttctgtggtcatcaatcctgaacttcagactcctgctaccaaattttgtctcaggcaaaagaaccatcaaggacataataggaatgtctgggctgtagactttttccatgtcttgcctgttctcccttctacaatgtctcacatgatacagttttccatcaatctgggatgtggaacgcatcagcctggtaacagtgtcagcttggaattttctaccaaccatgggcgctcctggtccctccttcacactgaatgcttacctgagatctgtgctggaccccacctcccccacagcactgtctactcctctgaaaactacagtgggtggaaccgaataacaattccccttcctaacgcagcactaacccggaacaccaggattcgctggagacaaacaggaccaatccttggaaacatgtgggcaattgataatgtttatattggcccgtcatgtctcaaattctgttctggcagaggacagtgcactagacatggttgcaagtgtgaccctggattttctggcccagcttgtgagatggcatcccagacattcccaatgtttatttctgaaagctttggcagttccaggctctcctcttaccataacttttactctatccgtggtgctgaagtcagctttggttgtggtgtcttggccagtggtaaggccctggttttcaacaaagatgggcggcgtcagctaattacatctttccttgacagctcacaatccaggtttctccagttcacactgagactggggagcaaatctgttctgagcacgtgcagagcccctgatcagcctggtgaaggagttttgttgcattattcttatgataatgggataacttggaaactcctggagcattattcatatctcagctatcatgagcccagaataatctccgtagaactaccaggtgatgcaaagcagtttggaattcagttcagatggtggcaaccgtatcattcttcccagagagaagatgtatgggctattgatgagattatcatgacatctgtgcttttcaacagcattagtcttgactttaccaatcttgtggaggtcactcagtctctgggattctaccttggaaatgttcagccatactgtggccacgactggaccctttgttttacaggagattctaaacttgcctcaagtatgcgctatgtggaaacacaatcaatgcagataggagcatcctatatgattcagttcagtttggtgatgggatgtggccagaaatacaccccacacatggacaaccaggtgaagctggagtactcaaccaaccacggccttacctggcacctcgtccaagaagaatgccttccaagtatgccaagttgtcaggaatttacatcagcaagtatttaccatgccagtgagtttacacagtggaggagagtcatagtgcttcttccccagaaaacttggtccagtgctacccgtttccgctggagccagagctattacacagctcaagacgagtgggctttggacagcatttacattgggcagcagtgccccaacatgtgcagtgggcatggctcatgcgatcatggcatatgcaggtgtgaccaggggtaccaaggcactgaatgccacccagaagctgcccttccgtccacaattatgtcagattttgagaaccagaatggctgggagtctgactggcaagaagttattgggggagaaattgtaaaaccagaacaagggtgtggtgtcatctcttctggatcatctctgtacttcagcaaggctgggaaaagacagctggtgagttgggacctggatacttcttgggtggactttgtccagttctacatccagataggcggagagagtgcttcatgcaacaagcctgacagcagagaggagggcgtcctccttcagtacagcaacaatgggggcatccagtggcacctgctagcagagatgtacttttcagacttcagcaaacccagatttgtctatctggagcttccagctgctgccaagaccccttgcaccaggttccgctggtggcagcccgtgttctcaggggaggactatgaccagtgggcagtcgatgacatcatcattctgtccgagaagcagaagcagatcatcccagttatcaatccaactttacctcagaacttttatgagaagccagcttttgattaccctatgaatcagatgagtgtgtggttgatgttggctaatgaaggaatggttaaaaatgaaaccttctgtgctgccacaccatcagcaatgatatttggaaaatcagatggagatcgatttgcagtaactcgagatttgaccctgaaacctggatatgtgctacagttcaagctaaacataggttgtgccaatcaattcagcagtactgctccagttcttcttcagtactctcatgatgctggtatgtcctggtttctggtgaaagaaggctgttacccggcttctgcaggcaaaggatgcgaaggaaactccagagaactaagtgagcccaccatgtatcacacaggggactttgaagaatggacaagaatcaccattgttattccaaggtctcttgcatccagcaagaccagattccgatggatccaggagagcagctcacagaaaaacgtgcctccatttggtttagatggagtgtacatatccgagccttgtcccagttactgcagtggccatggggactgcatttcaggagtgtgtttctgtgacctgggatatactgctgcacaaggaacctgtgtgtcaaatgtccccaatcacaatgagatgttcgataggtttgaggggaagctcagccctctgtggtacaagataacaggtgcccaggttggaactggctgtggaacacttaacgatggcaaatctctctacttcaatggccctgggaaaagggaagcccggacggtccctctggacaccaggaatatcagacttgttcaattttatatacaaattggaagcaaaacttcaggcattacctgcatcaaaccaagaactagaaatgaagggcttattgttcagtattcaaatgacaatgggatactctggcatttgcttcgagagttggacttcatgtccttcctggaaccacagatcatttccattgacctgccacaggacgcgaagacacctgcaacggcatttcgatggtggcaaccgcaacatgggaagcattcagcccagtgggctttggatgatgttcttataggaatgaatgacagctctcaaactggatttcaagacaaatttgatggctctatagatttgcaagccaactggtatcgaatccaaggaggtcaagttgatattgactgtctctctatggatactgctctgatattcactgaaaacataggaaaacctcgttatgctgagacctgggattttcatgtgtcagcatctacctttttgcagtttgaaatgagcatgggctgtagcaagcccttcagcaactcccacagtgtacagctccagtattctctgaacaatggcaaggactggcatcttgtcaccgaagagtgtgttcctccaaccattggctgtctgcattacacggaaagttcaatttacacctcggaaagattccagaattggaagcggatcactgtctaccttccactctccaccatttctcccaggacccggttcagatggattcaggccaactacactgtgggggctgattcctgggcgattgataatgttgtactggcctcagggtgcccttggatgtgctcaggacgagggatttgtgatgctggacgctgtgtgtgtgaccggggctttggtggaccctattgtgttcctgttgttcctctgccctcgattcttaaagacgatttcaatgggaatttacatcctgacctttggcctgaagtgtatggtgcagagagggggaatctgaatggtgaaaccatcaaatctggaacatctctaatttttaaaggggaaggactaaggatgcttatttcaagagatctagattgtacaaatacaatgtatgtccagttttcacttagatttatagcaaaaagtaccccagagagatctcactctattctgttacaattctccatcagtggaggaatcacttggcacctgatggatgaattttactttcctcaaacaacgaatatacttttcatcaatgttcccttgccatacactgcccaaaccaatgctacaagattcagactctggcaaccttataataacggtaagaaagaagaaatctggattgttgatgacttcattatcgatggaaataatgtaaacaaccctgtgatgctcttggatacatttgattttgggcccagagaagacaattggtttttctatcctggtggtaacatcggtctttattgtccatattcttcaaagggggcacctgaagaagattcagctatggtgtttgtttcaaatgaagttggtgagcattccattaccacccgtgacctaaatgtgaatgagaacaccatcatacaatttgagatcaacgttggctgttcgactgatagctcatccgcggatccagtgagactggaattttcaagggacttcggggcgacctggcaccttctgctgcccctctgctaccacagcagcagccacgtcagctctttatgctccaccgagcaccaccccagcagcacctactacgcaggaaccatgcagggctggaggagggaggtcgtgcactttgggaagctgcacctttgtggatctgtccgtttcagatggtaccagggattttaccctgccggctctcagccagtgacatgggccattgataatgtctacatcggtccccagtgtgaggagatgtgtaatggacaggggagctgtatcaatggaaccaaatgtatatgtgaccctggctactcaggtccaacctgtaaaataagcaccaaaaatcctgattttctcaaagatgatttcgaaggtcagctagaatctgatagattcttattaatgagtggtgggaaaccatctcgaaagtgtggaatcctttctagtggaaacaacctctttttcaatgaagatggcttgcgcatgttgatgacacgagacctggatttatcacatgctagatttgtgcagttcttcatgagactgggatgtggtaaaggcgttcctgaccccaggagtcaacccgtgctcctacagtattctctcaacggtggcctctcgtggagtcttcttcaggagttccttttcagcaattccagcaatgtgggcaggtacattgccctggagatacccttgaaagcccgttctggttctactcgccttcgctggtggcaaccgtctgagaatgggcacttctacagcccctgggttatcgatcagattcttattggaggaaatatttctggtaatacggtcttggaagatgatttcacaacccttgatagtaggaaatggctgcttcacccaggaggcaccaagatgcccgtgtgtggctctactggtgatgccctggtcttcattgaaaaggccagcacccgttacgtggtcagcacagacgttgccgtgaatgaggattccttcctacagatagacttcgctgcctcctgctcagtcacagactcttgttatgcgattgaattggaatactcagtagatcttggattgtcatggcacccattggtaagggactgtctgcctaccaatgtggaatgcagtcgctatcatctgcaacggatcctggtgtcagacactttcaacaagtggactagaatcactctgcctctccctccttataccaggtcccaagccactcgtttccgttggcatcaaccagctccttttgacaagcagcagacatgggcaatagataatgtctatatcggggatggctgcatagacatgtgcagtggccatgggagatgcatccagggaaactgcgtctgtgatgaacagtggggtggcctgtactgtgatgaccccgagacctctcttccaacccaactcaaagacaacttcaatcgagctccatccagtcagaactggctgactgtgaacggagggaaattgagtacagtgtgtggagccgtggcgtcgggaatggctctccatttcagtgggggttgtagtcgattattagtcactgtggatctaaacctcactaatgctgagttcatccaattttacttcatgtatgggtgcctgattacaccaaacaaccgtaaccaaggtgttctcttggaatattctgtcaatggaggcattacctggaacctgctcatggagattttctatgaccagtacagtaagcccgggtttgtgaatatccttctccctcctgatgctaaagagattgccactcgcttccgctggtggcagccaagacatgacggcctggatcagaacgactgggccattgacaatgtcctcatctcaggctctgctgaccaaaggaccgttatgctggacaccttcagcagcgccccagtaccccagcatgagcgctcccctgcagatgccggccctgtcgggaggatcgcctttgacatgtttatggaagacaaaacttcagtgaatgagcactggctattccatgatgattgtacagtagaaagattctgtgactcccctgatggtgtgatgctctgtggcagtcatgatggacgggaggtgtatgcagtgacccatgacctgactcccactgaaggctggattatgcaattcaagatctcagttggatgtaaggtgtctgaaaaaattgcccagaatcaaattcatgtgcagtattctactgacttcggtgtgagttggaattatctggtccctcagtgcttgcctgctgacccaaaatgctctggaagtgtttctcagccatctgtattctttccaactaaagggtggaaaaggatcacctacccacttcctgaaagcttagtgggaaatccggtaaggtttaggttctatcagaagtactcagacatgcagtgggcaatcgataatttctacctgggccctggatgcttggacaactgcaggggccatggagattgcttaagggaacagtgcatctgtgatccgggatactcagggccaaactgctacttgacccacactctgaagactttcctgaaggaacgctttgacagtgaagaaatcaaacctgacttatggatgtccttagaaggtggaagtacttgcactgagtgtggaattcttgccgaggacactgcactctattttgggggatccactgtgagacaagcggttacacaagatttggatcttcgaggtgcaaagttcctgcaatactgggggcgcatcggtagtgagaacaacatgacctcttgccatcgtcccatctgccggaaggaaggcgtgctgttggactactctaccgatggaggaattacctggactttgctccatgagatggattaccagaaatacatttctgttagacacgactacatacttcttcctgaagatgccctcaccaacacaactcgacttcgctggtggcagccttttgtgatcagcaatggaattgtggtctctggggtggagcgtgctcagtgggcactggacaacattttgattggtggagcagaaatcaatcccagccaattggtggacacttttgatgatgaaggcacttcccatgaagaaaactggagtttttaccctaatgctgtaaggacagcaggattttgtggcaatccatcctttcacctctattggccaaataaaaagaaggacaagactcacaatgctctctcctcccgagaactcattatacagccaggatacatgatgcagtttaaaattgtggtgggttgtgaagccacttcttgtggtgaccttcattccgtaatgctggaatacactaaggatgcaagatcggattcctggcagctcgtacagacccagtgccttccttcctcttctaacagcattggctgctcccctttccagttccatgaagccaccatctacaactctgtcaacagctcaagctggaaaagaatcaccatccagctgcctgaccatgtctcctctagtgcaacacagttccgctggatccagaagggagaagaaactgagaagcaaagctgggcaattgaccacgtgtacattggagaggcttgccccaagctctgcagcgggcacggatactgcacgaccggtgccatctgcatctgcgacgagagcttccaaggtgatgactgctctgttttcagtcacgaccttcccagttatattaaagataattttgagtccgcaagagtcaccgaggcaaactgggagaccattcaaggtggagtcataggaagtggctgtgggcagctggccccctacgcccatggagactcactgtactttaatggctgtcagatcaggcaagcagctaccaagcctctggatctcactcgagcaagcaaaatcatgtttgttttgcaaattgggagcatgtcgcagacggacagctgcaacagtgacctgagtggcccccacgctgtggacaaggcagtgctgctgcaatacagcgtcaacaacgggatcacctggcatgtcatcgcccagcaccagccaaaggacttcacacaagctcagagagtgtcttacaatgtccccctggaggcacggatgaaaggagtcttactgcgctggtggcaaccacgccacaatggaacaggtcatgatcaatgggctttggaccatgtggaggtcgtcctcactcgcaaacaaaattacatgatgaatttttcacgacaacatgggctcagacatttctacaacagaagacgaaggtcacttaggcgatacccatgaagaatcaaaaagtttattttttttcttccaacatgtgatgtgttgctctccattcttttaaatctcgcactacatctgatatcaggaaatatctgtgaaggacttggtgattacctgaaagcccttctcaagaccgagtgtacaccactttcccacactgtgaactaatgacaagtgacttatttgctcataagtaaatgtcttcatgttgatgtgtccgtgaaagttgtgatctgttgtaatatcagttacagtggcagtattgacaataagaaacagtttaacagaaaaatgaaatttaagcacaaaaaatttaagagattttatgtttaaaatggcatttagcacagtatttaacattcttggtcacaaagctatttaagtggactgtatttcggctatgtctcatgttttatatgattaaattatcattgtttgtcctttatgtattctcttctacaatacaacacattgaaactgtatttacttgttatgttgtaatattttgctgctgaatttggggctacttatattctgcagaaaattaattgaaatacctattcaagaagatagttgtaaagatattgtatctcctttaatatactccttaaaaatgtatgttggtttagcgttgttttgtggataagaaaaatgcttgaccctgaaatattttctactttaaattgtggatgaagaccctatctcccacaaataagttcccatttccttgtctaaagatctttttttaagtgttctgtggctgatttactaacagtaactgccattttttgtctgtgataacagagtgatttgtaaaacagtggttgttttttcattgtgttttcttcgtggattgttttttctgcgggtcatattcataccttctgatgaagttgtacaacaccagcaacattataatggccctgtagctctgaatgctatttgtgtaactgaaaggttgcactctagggtgaaccaagctataaaagcccatgcttaaataaaaattatgtccaaaagcc

SEQ ID NO: 11713 - DNA, 11564 bp, Homo sapiens
tcggcgggggcccgctcccaggcccgctcccgagcccgttccgctcccgtccgccttcttctcgccttctctccgcgtggctcctccgtcccggcgtctccaaaactgaatgagcgagcggcgcgtagggcgcgcggcggcggcggcggcggcggcggcatggagcgcagtggctgggcccggcagactttcctcctagcgctgttgctgggggcgacgctgagggcgcgcgcggcggctggctattacccccgcttttcgcccttctttttcctgtgcacccaccacggggagctggaaggggatggggagcagggcgaggtgctcatttccctgcatattgcgggcaaccccacctactacgttccgggacaagaataccatgtgacaatttcaacaagcaccttttttgacggcttgctggtgacaggactatacacatctacaagtgttcaggcatcacagagcattggaggttccagtgctttcggatttgggatcatgtctgaccaccagtttggtaaccagtttatgtgcagtgtggtagcctctcacgtgagtcacctgcccacaaccaacctcagtttcatctggattgctccacctgcgggcacaggctgtgtgaatttcatggctacagcaacacaccggggccaggttattttcaaagatgctttagcccagcagttgtgtgaacaaggagctccaacagatgtcactgtgcacccacatctagctgaaatacatagtgacagcattatcctgagagatgactttgactcctaccaccaactgcaattaaatccaaatatatgggttgaatgtaacaactgtgagactggagaacagtgtggcgcgattatgcatggcaatgccgtcaccttctgtgaaccatatggcccacgagaactgattaccacaggccttaatacaacaacagcttctgtcctccaattttccattgggtcaggttcatgtcgctttagttattcagaccccagcatcatcgtgttatatgccaagaataactctgcggactggattcagctagagaaaattagagccccttccaatgtcagcacaatcatccatatcctctaccttcctgaggacgccaaaggggagaatgtccaatttcagtggaagcaggaaaatcttcgtgtaggtgaagtgtatgaagcctgctgggccttagataacatcttgatcatcaattcagctcacagacaagtcgttttagaagatagtctcgacccagtggacacaggcaactggcttttcttcccaggagctacagttaagcatagctgtcagtcagatgggaactccatttatttccatggaaatgaaggcagcgagttcaattttgccaccaccagggatgtagatctttccacagaagatattcaagagcaatggtcagaagaatttgagagccagcctacaggatgggatgtcttgggagctgtcattggtacagaatgtggaacgatagaatcaggcttatcaatggtcttcctcaaagatggagagaggaaattatgcactccatccatggacactaccggttatgggaacctgaggttttactttgtgatgggaggaatttgtgaccctggaaattctcatgaaaatgacataatcctgtatgcaaaaattgaaggaagaaaagagcatataacactggataccctttcctattcctcatataaggttccgtctttggtttctgtggtcatcaatcctgaacttcagactcctgctaccaaattttgtctcaggcaaaagaaccatcaaggacataataggaatgtctgggctgtagactttttccatgtcttgcctgttctcccttctacaatgtctcacatgatacagttttccatcaatctgggatgtggaacgcatcagcctggtaacagtgtcagcttggaattttctaccaaccatgggcgctcctggtccctccttcacactgaatgcttacctgagatctgtgctggaccccacctcccccacagcactgtctactcctctgaaaactacagtgggtggaaccgaataacaattccccttcctaacgcagcactaacccggaacaccaggattcgctggagacaaacaggaccaatccttggaaacatgtgggcaattgataatgtttatattggcccgtcatgtctcaaattctgttctggcagaggacagtgcactagacatggttgcaagtgtgaccctggattttctggcccagcttgtgagatggcatcccagacattcccaatgtttatttctgaaagctttggcagttccaggctctcctcttaccataacttttactctatccgtggtgctgaagtcagctttggttgtggtgtcttggccagtggtaaggccctggttttcaacaaagatgggcggcgtcagctaattacatctttccttgacagctcacaatccaggtttctccagttcacactgagactggggagcaaatctgttctgagcacgtgcagagcccctgatcagcctggtgaaggagttttgttgcattattcttatgataatgggataacttggaaactcctggagcattattcatatctcagctatcatgagcccagaataatctccgtagaactaccaggtgatgcaaagcagtttggaattcagttcagatggtggcaaccgtatcattcttcccagagagaagatgtatgggctattgatgagattatcatgacatctgtgcttttcaacagcattagtcttgactttaccaatcttgtggaggtcactcagtctctgggattctaccttggaaatgttcagccatactgtggccacgactggaccctttgttttacaggagattctaaacttgcctcaagtatgcgctatgtggaaacacaatcaatgcagataggagcatcctatatgattcagttcagtttggtgatgggatgtggccagaaatacaccccacacatggacaaccaggtgaagctggagtactcaaccaaccacggccttacctggcacctcgtccaagaagaatgccttccaagtatgccaagttgtcaggaatttacatcagcaagtatttaccatgccagtgagtttacacagtggaggagagtcatagtgcttcttccccagaaaacttggtccagtgctacccgtttccgctggagccagagctattacacagctcaagacgagtgggctttggacagcatttacattgggcagcagtgccccaacatgtgcagtgggcatggctcatgcgatcatggcatatgcaggtgtgaccaggggtaccaaggcactgaatgccacccagaagctgcccttccgtccacaattatgtcagattttgagaaccagaatggctgggagtctgactggcaagaagttattgggggagaaattgtaaaaccagaacaagggtgtggtgtcatctcttctggatcatctctgtacttcagcaaggctgggaaaagacagctggtgagttgggacctggatacttcttgggtggactttgtccagttctacatccagataggcggagagagtgcttcatgcaacaagcctgacagcagagaggagggcgtcctccttcagtacagcaacaatgggggcatccagtggcacctgctagcagagatgtacttttcagacttcagcaaacccagatttgtctatctggagcttccagctgctgccaagaccccttgcaccaggttccgctggtggcagcccgtgttctcaggggaggactatgaccagtgggcagtcgatgacatcatcattctgtccgagaagcagaagcagatcatcccagttatcaatccaactttacctcagaacttttatgagaagccagcttttgattaccctatgaatcagatgagtgtgtggttgatgttggctaatgaaggaatggttaaaaatgaaaccttctgtgctgccacaccatcagcaatgatatttggaaaatcagatggagatcgatttgcagtaactcgagatttgaccctgaaacctggatatgtgctacagttcaagctaaacataggttgtgccaatcaattcagcagtactgctccagttcttcttcagtactctcatgatgctggtatgtcctggtttctggtgaaagaaggctgttacccggcttctgcaggcaaaggatgcgaaggaaactccagagaactaagtgagcccaccatgtatcacacaggggactttgaagaatggacaagaatcaccattgttattccaaggtctcttgcatccagcaagaccagattccgatggatccaggagagcagctcacagaaaaacgtgcctccatttggtttagatggagtgtacatatccgagccttgtcccagttactgcagtggccatggggactgcatttcaggagtgtgtttctgtgacctgggatatactgctgcacaaggaacctgtgtgtcaaatgtccccaatcacaatgagatgttcgataggtttgaggggaagctcagccctctgtggtacaagataacaggtgcccaggttggaactggctgtggaacacttaacgatggcaaatctctctacttcaatggccctgggaaaagggaagcccggacggtccctctggacaccaggaatatcagacttgttcaattttatatacaaattggaagcaaaacttcaggcattacctgcatcaaaccaagaactagaaatgaagggcttattgttcagtattcaaatgacaatgggatactctggcatttgcttcgagagttggacttcatgtccttcctggaaccacagatcatttccattgacctgccacaggacgcgaagacacctgcaacggcatttcgatggtggcaaccgcaacatgggaagcattcagcccagtgggctttggatgatgttcttataggaatgaatgacagctctcaaactggatttcaagacaaatttgatggctctatagatttgcaagccaactggtatcgaatccaaggaggtcaagttgatattgactgtctctctatggatactgctctgatattcactgaaaacataggaaaacctcgttatgctgagacctgggattttcatgtgtcagcatctacctttttgcagtttgaaatgagcatgggctgtagcaagcccttcagcaactcccacagtgtacagctccagtattctctgaacaatggcaaggactggcatcttgtcaccgaagagtgtgttcctccaaccattggctgtctgcattacacggaaagttcaatttacacctcggaaagattccagaattggaagcggatcactgtctaccttccactctccaccatttctcccaggacccggttcagatggattcaggccaactacactgtgggggctgattcctgggcgattgataatgttgtactggcctcagggtgcccttggatgtgctcaggacgagggatttgtgatgctggacgctgtgtgtgtgaccggggctttggtggaccctattgtgttcctgttgttcctctgccctcgattcttaaagacgatttcaatgggaatttacatcctgacctttggcctgaagtgtatggtgcagagagggggaatctgaatggtgaaaccatcaaatctggaacatctctaatttttaaaggggaaggactaaggatgcttatttcaagagatctagattgtacaaatacaatgtatgtccagttttcacttagatttatagcaaaaagtaccccagagagatctcactctattctgttacaattctccatcagtggaggaatcacttggcacctgatggatgaattttactttcctcaaacaacgaatatacttttcatcaatgttcccttgccatacactgcccaaaccaatgctacaagattcagactctggcaaccttataataacggtaagaaagaagaaatctggattgttgatgacttcattatcgatggaaataatgtaaacaaccctgtgatgctcttggatacatttgattttgggcccagagaagacaattggtttttctatcctggtggtaacatcggtctttattgtccatattcttcaaagggggcacctgaagaagattcagctatggtgtttgtttcaaatgaagttggtgagcattccattaccacccgtgacctaaatgtgaatgagaacaccatcatacaatttgagatcaacgttggctgttcgactgatagctcatccgcggatccagtgagactggaattttcaagggacttcggggcgacctggcaccttctgctgcccctctgctaccacagcagcagccacgtcagctctttatgctccaccgagcaccaccccagcagcacctactacgcaggaaccatgcagggctggaggagggaggtcgtgcactttgggaagctgcacctttgtggatctgtccgtttcagatggtaccagggattttaccctgccggctctcagccagtgacatgggccattgataatgtctacatcggtccccagtgtgaggagatgtgtaatggacaggggagctgtatcaatggaaccaaatgtatatgtgaccctggctactcaggtccaacctgtaaaataagcaccaaaaatcctgattttctcaaagatgatttcgaaggtcagctagaatctgatagattcttattaatgagtggtgggaaaccatctcgaaagtgtggaatcctttctagtggaaacaacctctttttcaatgaagatggcttgcgcatgttgatgacacgagacctggatttatcacatgctagatttgtgcagttcttcatgagactgggatgtggtaaaggcgttcctgaccccaggagtcaacccgtgctcctacagtattctctcaacggtggcctctcgtggagtcttcttcaggagttccttttcagcaattccagcaatgtgggcaggtacattgccctggagatacccttgaaagcccgttctggttctactcgccttcgctggtggcaaccgtctgagaatgggcacttctacagcccctgggttatcgatcagattcttattggaggaaatatttctggtaatacggtcttggaagatgatttcacaacccttgatagtaggaaatggctgcttcacccaggaggcaccaagatgcccgtgtgtggctctactggtgatgccctggtcttcattgaaaaggccagcacccgttacgtggtcagcacagacgttgccgtgaatgaggattccttcctacagatagacttcgctgcctcctgctcagtcacagactcttgttatgcgattgaattggaatactcagtagatcttggattgtcatggcacccattggtaagggactgtctgcctaccaatgtggaatgcagtcgctatcatctgcaacggatcctggtgtcagacactttcaacaagtggactagaatcactctgcctctccctccttataccaggtcccaagccactcgtttccgttggcatcaaccagctccttttgacaagcagcagacatgggcaatagataatgtctatatcggggatggctgcatagacatgtgcagtggccatgggagatgcatccagggaaactgcgtctgtgatgaacagtggggtggcctgtactgtgatgaccccgagacctctcttccaacccaactcaaagacaacttcaatcgagctccatccagtcagaactggctgactgtgaacggagggaaattgagtacagtgtgtggagccgtggcgtcgggaatggctctccatttcagtgggggttgtagtcgattattagtcactgtggatctaaacctcactaatgctgagttcatccaattttacttcatgtatgggtgcctgattacaccaaacaaccgtaaccaaggtgttctcttggaatattctgtcaatggaggcattacctggaacctgctcatggagattttctatgaccagtacagtaagcccgggtttgtgaatatccttctccctcctgatgctaaagagattgccactcgcttccgctggtggcagccaagacatgacggcctggatcagaacgactgggccattgacaatgtcctcatctcaggctctgctgaccaaaggaccgttatgctggacaccttcagcagcgccccagtaccccagcatgagcgctcccctgcagatgccggccctgtcgggaggatcgcctttgacatgtttatggaagacaaaacttcagtgaatgagcactggctattccatgatgattgtacagtagaaagattctgtgactcccctgatggtgtgatgctctgtggcagtcatgatggacgggaggtgtatgcagtgacccatgacctgactcccactgaaggctggattatgcaattcaagatctcagttggatgtaaggtgtctgaaaaaattgcccagaatcaaattcatgtgcagtattctactgacttcggtgtgagttggaattatctggtccctcagtgcttgcctgctgacccaaaatgctctggaagtgtttctcagccatctgtattctttccaactaaagggtggaaaaggatcacctacccacttcctgaaagcttagtgggaaatccggtaaggtttaggttctatcagaagtactcagacatgcagtgggcaatcgataatttctacctgggccctggatgcttggacaactgcaggggccatggagattgcttaagggaacagtgcatctgtgatccgggatactcagggccaaactgctacttgacccacactctgaagactttcctgaaggaacgctttgacagtgaagaaatcaaacctgacttatggatgtccttagaaggtggaagtacttgcactgagtgtggaattcttgccgaggacactgcactctattttgggggatccactgtgagacaagcggttacacaagatttggatcttcgaggtgcaaagttcctgcaatactgggggcgcatcggtagtgagaacaacatgacctcttgccatcgtcccatctgccggaaggaaggcgtgctgttggactactctaccgatggaggaattacctggactttgctccatgagatggattaccagaaatacatttctgttagacacgactacatacttcttcctgaagatgccctcaccaacacaactcgacttcgctggtggcagccttttgtgatcagcaatggaattgtggtctctggggtggagcgtgctcagtgggcactggacaacattttgattggtggagcagaaatcaatcccagccaattggtggacacttttgatgatgaaggcacttcccatgaagaaaactggagtttttaccctaatgctgtaaggacagcaggattttgtggcaatccatcctttcacctctattggccaaataaaaagaaggacaagactcacaatgctctctcctcccgagaactcattatacagccaggatacatgatgcagtttaaaattgtggtgggttgtgaagccacttcttgtggtgaccttcattccgtaatgctggaatacactaaggatgcaagatcggattcctggcagctcgtacagacccagtgccttccttcctcttctaacagcattggctgctcccctttccagttccatgaagccaccatctacaactctgtcaacagctcaagctggaaaagaatcaccatccagctgcctgaccatgtctcctctagtgcaacacagttccgctggatccagaagggagaagaaactgagaagcaaagctgggcaattgaccacgtgtacattggagaggcttgccccaagctctgcagcgggcacggatactgcacgaccggtgccatctgcatctgcgacgagagcttccaaggtgatgactgctctgttttcagtcacgaccttcccagttatattaaagataattttgagtccgcaagagtcaccgaggcaaactgggagaccattcaaggtggagtcataggaagtggctgtgggcagctggccccctacgcccatggagactcactgtactttaatggctgtcagatcaggcaagcagctaccaagcctctggatctcactcgagcaagcaaaatcatgtttgttttgcaaattgggagcatgtcgcagacggacagctgcaacagtgacctgagtggcccccacgctgtggacaaggcagtgctgctgcaatacagcgtcaacaacgggatcacctggcatgtcatcgcccagcaccagccaaaggacttcacacaagctcagagagtgtcttacaatgtccccctggaggcacggatgaaaggagtcttactgcgctggtggcaaccacgccacaatggaacaggtcatgatcaatgggctttggaccatgtggaggtcgtcctagtaagcactcgcaaacaaaattacatgatgaatttttcacgacaacatgggctcagacatttctacaacagaagacgaaggtcacttaggcgatacccatgaagaatcaaaaagtttattttttttcttccaacatgtgatgtgttgctctccattcttttaaatctcgcactacatctgatatcaggaaatatctgtgaaggacttggtgattacctgaaagcccttctcaagaccgagtgtacaccactttcccacactgtgaactaatgacaagtgacttatttgctcataagtaaatgtcttcatgttgatgtgtccgtgaaagttgtgatctgttgtaatatcagttacagtggcagtattgacaataagaaacagtttaacagaaaaatgaaatttaagcacaaaaaatttaagagattttatgtttaaaatggcatttagcacagtatttaacattcttggtcacaaagctatttaagtggactgtatttcggctatgtctcatgttttatatgattaaattatcattgtttgtcctttatgtattctcttctacaatacaacacattgaaactgtatttacttgttatgttgtaatattttgctgctgaatttggggctacttatattctgcagaaaattaattgaaatacctattcaagaagatagttgtaaagatattgtatctcctttaatatactccttaaaaatgtatgttggtttagcgttgttttgtggataagaaaaatgcttgaccctgaaatattttctactttaaattgtggatgaagaccctatctcccacaaataagttcccatttccttgtctaaagatctttttttaagtgttctgtggctgatttactaacagtaactgccattttttgtctgtgataacagagtgatttgtaaaacagtggttgttttttcattgtgttttcttcgtggattgttttttctgcgggtcatattcataccttctgatgaagttgtacaacaccagcaacattataatggccctgtagctctgaatgctatttgtgtaactgaaaggttgcactctagggtgaaccaagctataaaagcccatgcttaaataaaaattatgtccaaaagcc

SEQ ID NO: 11714 - DNA, 1263 bp, Homo sapiens
atgctgcccgggctcaggcgcctgctgcaagctcccgcctcggcctgcctcctgctgatgctcctggccctgcccctggcggcccccagctgccccatgctctgcacctgctactcatccccgcccaccgtgagctgccaggccaacaacttctcctctgtgccgctgtccctgccacccagcactcagcgactcttcctgcagaacaacctcatccgcacgctgcggccaggcacctttgggtccaacctgctcaccctgtggctcttctccaacaacctctccaccatctacccgggcactttccgccacttgcaagccctggaggagctggacctcggtgacaaccggcacctgcgctcgctggagcccgacaccttccagggcctggagcggctgcagtcgctgcatttgtaccgctgccagctcagcagcctgcccggcaacatcttccgaggcctggtcagcctgcagtacctctacctccaggagaacagcctgctccacctacaggatgacttgttcgcggacctggccaacctgagccacctcttcctccacgggaaccgcctgcggctgctcacagagcacgtgtttcgcggcctgggcagcctggaccggctgctgctgcacgggaaccggctgcagggcgtgcaccgcgcggccttccgcggcctcagccgcctcaccatcctctacctgttcaacaacagcctggcctcgctgcccggcgaggcgctcgccgacctgccctcgctcgagttcctgcggctcaacgctaacccctgggcgtgcgactgccgcgcgcggccgctctgggcctggttccagcgcgcgcgcgtgtccagctccgacgtgacctgcgccacccccccggagcgccagggccgagacctgcgcgcgctccgcgaggccgacttccaggcgtgtccgcccgcggcacccacgcggccgggcagccgcgcccgcggcaacagctcctccaaccacctgtacggggtggccgaggccggggcgcccccagccgatccctccaccctctaccgagatctgcctgccgaagactcgcgggggcgccagggcggggacgcgcctactgaggacgactactgggggggctacgggggtgaggaccagcgaggggagcagatgtgccccggcgctgcctgccaggcgcccccggactcccgaggccctgcgctctcggccgggctccccagccctctgctttgcctcctgctcctggtgccccaccacctctga

SEQ ID NO: 11715 - DNA, 6072 bp, Homo sapiens
ggtggtcggcggggaggcccccgcgctttaaaataatgcccgcggcgcccgcgcgaccatgcaatggcgagcgctcgtcctggggctggtgctcctccggcttggcctccatggagtattgtggctcgtcttcgggctggggcccagcatgggcttctaccagcgctttccgctcagcttcggcttccagcgtctgaggagccccgacggccccgcgtcgcccacctcggggcccgtgggccggcctgggggggtatccgggccgtcgtggctgcagccgccggggaccggggcagcgcagagcccgcgcaaggctccgcggcgtcctgggccggggatgtgcggcccagccaactggggctacgtgctgggcggccggggccgcggcccggacgagtacgagaagcgctacagcggcgccttccctccgcagctgcgtgcccagatgcgcgacctggcacggggcatgttcgtctttggctacgacaactacatggctcacgccttcccccaggacgagctcaaccccatccactgccgcggccgtgggcccgaccgcggggacccttcaaatctgaacatcaatgatgtactagggaactactcattgactcttgttgatgcattggatacacttgcaataatgggaaattcatccgagttccagaaagcagtcaagttagtgatcaacacagtttcatttgacaaagattccaccgtccaagtctttgaggccacgataagggtcctgggaagcctcctttctgctcacagaataataactgactccaagcagccctttggtgacatgacaattaaggactatgataatgagttgttatacatggcccatgacctggcggtgcggctcctccctgcttttgaaaacaccaagacagggattccatatcctcgggtgaatctaaagacaggagttcctcctgacaccaataatgagacatgcacagcgggagccggttccctcctggtggaatttgggattctgagtcgactcctgggggactccacatttgagtgggtggccagacgagcagtgaaagccctttggaacctccggagcaatgatacaggattactaggcaatgtcgtgaacattcagacgggccactgggttggaaagcagagtggcctgggtgccgggctggactccttctatgaatacctcttgaaatcttacattctctttggagaaaaagaagacctagaaatgtttaatgctgcatatcagagtattcagaactacttaagaagagggcgggaagcctgcaatgaaggagaaggagaccctccactctatgtcaacgtgaacatgttcagtgggcagctgatgaacacctggattgactctctgcaggcctttttccctggactgcaggtgctgataggagatgtggaagatgccatctgccttcatgccttctactatgccatatggaaacgatatggtgccctccctgagagatataactggcagctgcaggcccctgacgttctcttctacccactgagaccagagttagtggaatccacatatctcctctaccaggcaaccaagaatcccttctacctccatgtaggaatggatattctgcagagtctggaaaagtacacaaaagtcaagtgtgggtacgccacgctgcatcacgtcattgacaagtccacagaagaccggatggagagcttctttctcagtgagacctgtaaatatttgtatctgctgtttgatgaagacaatccagtacacaagtctggaaccagatacatgttcacaacagagggacacattgtatctgtggatgagcatcttcgggaattgccatggaaggaattcttctctgaagagggagggcaggaccaagggggaaagtctgtgcacaggccgaaacctcatgagttaaaagtcatcaactccagctccaactgcaatcgtgtacctgatgagaggaggtactccctgcccttaaagagcatctacatgcgacagattgaccagatggttggtttgatttgatctgctctctgtgaggcctcatcttgaaccagaccttaacgaccaaacccagaccatgccaaagtccagtctgaaatgaaaggggacagaagtcttgctgtccatggtggtgtaggaatttctgtgcaacacctcaccacgtctggttaatccttgcacacttcagtgtttctctcctgttcaataaaatgccctgttaaggatataatttgaagtgagaagatacatggaaattgccctcttatgacatgttgatgttataagcacaatagatggggcatctttggattgatgttcacagctttatacttcagaacctaagtctcttcactttgctggcacctgctatactggagtattgctatgtctttaaaaaatttttttttattatattttatttttttgagacagggtcttgatatttttttgggacagggttacctgggctcaagtgatccttctgcctcagcctcccgagtagctgggattacaggtgagcaccactgtacctggctagctacttctttgttagaggattgagaatgaaatttctgcaaaagggcccatggttcatttggtatccctatttaattgcattgaaaatgtcatcctttctgttgttagataattggggtcttcccctgatatccaaccgtgattttggatcacatgggagaaaaagtcatccagtttttcatgtttgcctcaagtaatctttacagtgttacaaattatttgcttaagaagaatggtcttaaccagaattcttaacagatagtctcttaggttattatgttatggtctaagaggttaactgacatcttttggatggtattttgcattttgaatatgaacttacctgaggaactcccatagttccagaatcaggtgccttttagggagagaacaatacctaagattgtctgagcttccatctttctcatatttcctaagcaaggattctcacttatgaccatatttgggttagagttctgttttgtttctgttttctgtgtctagtgccaattagctaaatcagggagaaagaaatgatcacatgacttttagcatccttgagccatttctctgtgtaatacaggctttagattagtgccttatattggttttggtttggggcactggatgtcgcagctactgctatggtttcaggaggcctgtttagccacatggtgagaccgtggtgaaagggggatggaaattgcttggccagtctttgcctttcatcctgtaaaagtaagcatgtagaaggaggaagttgtgctaaaatgcctttgtttttttgttattattttcttagccagaacatctctctttgaactcacactgatacacacctgctactcttacacagtgcagcagggctgactcttagtctggcttccatgaagcgtcatgggtggaaacgcattctagtaaaaaaggtaggaaatccctaaaacttccagcctcacatagcacggttctcacctgtcactgttttcccacctctaaggatttcatgtacatcttttcaaagctagaaataagcactgtctaagtttatgttgcatttttagtcaaaagggagaaatcttattccttcttgaaaattttaagtgttatggttttatatagttcagttctttgagatttttgaaaagagtattttcagtaataaacgtgccatctctatctcttaaacatttattacaacaattgttttaaaatagaaaaaataaaatgcttctattttaccttttttcatttcagaagcattattctgtttattaacagtgtcccatctactgaatagaaaactttgagaataatatatatatatattttaaatgttttcactgactcattgaaaatgttaattacacacacatgcatgcatgcacacacgagcatacttgtacctttgtctctgggcaaacaggtgggactgttagtgacccatttgggaaaatagagcatctcagagaaggaggtgagttcttcctgcctgtgatttctcttggcgctcccctcctctcccgctctggcttctgtggcggcagtggtgggtaagcactccagtgttctcttaatgaggcactttgcctgtcactcgagcaagcctgggtgttccttcctcctcatgctcctggaatagggaatagggatctcatgcttgcaaactacacaatgctgcaggtgcttcccaggggccacaggctgtcaggaaacgtgttttatgttaagtcacaaacccacttgacttctgggtactggaattaataccagtgggtgagactgagggtgagtgagttagtacatattaatcctggttgttgagcttccagactaccccgtccaaagtttgatgctatgtagtcagtggtttgtggggctggatgccagaaggttctttgagccagtttcaaaggttacttgtttttttttttttttttttaagtcagaatgttaacagctgtgatatatcctgcagggcttttgcagtttcttctgttctgtgttctgaaatcctgggtagagaatggctgaggaggagattaccagagaagttgctttgctcagtgctttgccccaggattgcctcaaatctgagtggacttcatcctttgcggcggctctgagcctggcccatcttcctattcccacgtgtagctagtgtctagtgtcagctttgctcaatgtggtggaaacattttgcagaactgttgtagaaagctgccttatagttggcttgacaaagcataattctctcataacaaactttcaaatcattacagtagcttagctactttagttgatgtgaccgaggaatcccttctagaatcataggtggcaagggagggtttgctagctctccatttgcactggccattgtgaaaaaccagcttctgtattcaaatctttccttcatttttttaaattttttttttggcagcgcttgtgctggaacttactcattgtaactgaatcctcagggcttttcttgttttagatcatggactgtgcacgtgacacttaaataattttctatgtatttaaagaaaaatgcaccaggatggtgtctgtgcacgtgactattagaggagcgtctgtagaagtacctggtttggtcagtgcagttgtgcaatctgagggccttgtttcctcctcccctttccccttctccccaccaaaggaaaatatccctcttaatgatttcgtagttcagtttactgaatgattaccacctgtaattcctctttggattgtgtagactcaacatgagacattcctttctgctttctggagggcaccaggggcctttctctttgataaattttttttgtctgttgacaaaaacaaaaatcttttttcaaatgtagtgctggtgaaaaggtagggctgagtgattaccttagccacagggtggctgagcaggaactttagaagaaaatcctgagctttcctgtccattcccagcatccagctcctattctagtgcctcttccctgcagggcagggaccccttgggaaatcgaggaggtgggacgggctgggccctgtgtcccaggtttcacagggctcagggttatgctcccgcttgaatctggacgtgaatctggtaaaaatatcaagtacctgtggaactccctgattctataccctcttccttctttctgcaaggcagaggaataatatttttaaaggttattttgttttagttttaaatagcaaaacacaagctgcatttttatttattttgcataagaaaggtaaatctttttacaaaaaaaagtatagagttggaaactctgggaaaacttacggaaatacacaaatgcttctctgtaatgtgcaatatgctttgcaactgtagatgatattttatgtttaatctgtaaataagaaatgtatttaaattaaaagggatctttttgtaaaaggaccaaatgttcttttataaatgtaataaggaatatcttgctctttaaaatttattaggatttttatgagtaatttttattaaaagatttctttttttg

SEQ ID NO: 11716 - DNA, 1702 bp, Homo sapiens
aaattttccagccgatcactggagctgacttccgcaatcccgatggaataaatctagcacccctgatggtgtgcccacactttgctgccgaaacgaagccagacaacagatttccatcagcaggatgtgggggctcaaggttctgctgctacctgtggtgagctttgctctgtaccctgaggagatactggacacccactgggagctatggaagaagacccacaggaagcaatataacaacaaggtggatgaaatctctcggcgtttaatttgggaaaaaaacctgaagtatatttccatccataaccttgaggcttctcttggtgtccatacatatgaactggctatgaaccacctgggggacatgaccagtgaagaggtggttcagaagatgactggactcaaagtacccctgtctcattcccgcagtaatgacaccctttatatcccagaatgggaaggtagagccccagactctgtcgactatcgaaagaaaggatatgttactcctgtcaaaaatcagggtcagtgtggttcctgttgggcttttagctctgtgggtgccctggagggccaactcaagaagaaaactggcaaactcttaaatctgagtccccagaacctagtggattgtgtgtctgagaatgatggctgtggagggggctacatgaccaatgccttccaatatgtgcagaagaaccggggtattgactctgaagatgcctacccatatgtgggacaggaagagagttgtatgtacaacccaacaggcaaggcagctaaatgcagagggtacagagagatccccgaggggaatgagaaagccctgaagagggcagtggcccgagtgggacctgtctctgtggccattgatgcaagcctgacctccttccagttttacagcaaaggtgtgtattatgatgaaagctgcaatagcgataatctgaaccatgcggttttggcagtgggatatggaatccagaagggaaacaagcactggataattaaaaacagctggggagaaaactggggaaacaaaggatatatcctcatggctcgaaataagaacaacgcctgtggcattgccaacctggccagcttccccaagatgtgactccagccagccaaatccatcctgctcttccatttcttccacgatggtgcagtgtaacgatgcactttggaagggagttggtgtgctatttttgaagcagatgtggtgatactgagattgtctgttcagtttccccatttgtttgtgcttcaaatgatccttcctactttgcttctctccacccatgacctttttcactgtggccatcaggactttccctgacagctgtgtactcttaggctaagagatgtgactacagcctgcccctgactgtgttgtcccagggctgatgctgtacaggtacaggctggagattttcacataggttagattctcattcacgggactagttagctttaagcaccctagaggactagggtaatctgacttctcacttcctaagttcccttctatatcctcaaggtagaaatgtctatgttttctactccaattcataaatctattcataagtctttggtacaagtttacatgataaaaagaaatgtgatttgtcttcccttctttgcacttttgaaataaagtatttatctcctgtctacagtttaataaatagcatctagtacacat

SEQ ID NO: 11717 - DNA, 4776 bp, Homo sapiens
cccacgcgcagcggccggagatgcagcggggcgccgcgctgtgcctgcgactgtggctctgcctgggactcctggacggcctggtgagtgactactccatgacccccccgaccttgaacatcacggaggagtcacacgtcatcgacaccggtgacagcctgtccatctcctgcaggggacagcaccccctcgagtgggcttggccaggagctcaggaggcgccagccaccggagacaaggacagcgaggacacgggggtggtgcgagactgcgagggcacagacgccaggccctactgcaaggtgttgctgctgcacgaggtacatgccaacgacacaggcagctacgtctgctactacaagtacatcaaggcacgcatcgagggcaccacggccgccagctcctacgtgttcgtgagagactttgagcagccattcatcaacaagcctgacacgctcttggtcaacaggaaggacgccatgtgggtgccctgtctggtgtccatccccggcctcaatgtcacgctgcgctcgcaaagctcggtgctgtggccagacgggcaggaggtggtgtgggatgaccggcggggcatgctcgtgtccacgccactgctgcacgatgccctgtacctgcagtgcgagaccacctggggagaccaggacttcctttccaaccccttcctggtgcacatcacaggcaacgagctctatgacatccagctgttgcccaggaagtcgctggagctgctggtaggggagaagctggtcctcaactgcaccgtgtgggctgagtttaactcaggtgtcacctttgactgggactacccagggaagcaggcagagcggggtaagtgggtgcccgagcgacgctcccaacagacccacacagaactctccagcatcctgaccatccacaacgtcagccagcacgacctgggctcgtatgtgtgcaaggccaacaacggcatccagcgatttcgggagagcaccgaggtcattgtgcatgaaaatcccttcatcagcgtcgagtggctcaaaggacccatcctggaggccacggcaggagacgagctggtgaagctgcccgtgaagctggcagcgtaccccccgcccgagttccagtggtacaaggatggaaaggcactgtccgggcgccacagtccacatgccctggtgctcaaggaggtgacagaggccagcacaggcacctacaccctcgccctgtggaactccgctgctggcctgaggcgcaacatcagcctggagctggtggtgaatgtgcccccccagatacatgagaaggaggcctcctcccccagcatctactcgcgtcacagccgccaggccctcacctgcacggcctacggggtgcccctgcctctcagcatccagtggcactggcggccctggacaccctgcaagatgtttgcccagcgtagtctccggcggcggcagcagcaagacctcatgccacagtgccgtgactggagggcggtgaccacgcaggatgccgtgaaccccatcgagagcctggacacctggaccgagtttgtggagggaaagaataagactgtgagcaagctggtgatccagaatgccaacgtgtctgccatgtacaagtgtgtggtctccaacaaggtgggccaggatgagcggctcatctacttctatgtgaccaccatccccgacggcttcaccatcgaatccaagccatccgaggagctactagagggccagccggtgctcctgagctgccaagccgacagctacaagtacgagcatctgcgctggtaccgcctcaacctgtccacgctgcacgatgcgcacgggaacccgcttctgctcgactgcaagaacgtgcatctgttcgccacccctctggccgccagcctggaggaggtggcacctggggcgcgccacgccacgctcagcctgagtatcccccgcgtcgcgcccgagcacgagggccactatgtgtgcgaagtgcaagaccggcgcagccatgacaagcactgccacaagaagtacctgtcggtgcaggccctggaagcccctcggctcacgcagaacttgaccgacctcctggtgaacgtgagcgactcgctggagatgcagtgcttggtggccggagcgcacgcgcccagcatcgtgtggtacaaagacgagaggctgctggaggaaaagtctggagtcgacttggcggactccaaccagaagctgagcatccagcgcgtgcgcgaggaggatgcgggaccgtatctgtgcagcgtgtgcagacccaagggctgcgtcaactcctccgccagcgtggccgtggaaggctccgaggataagggcagcatggagatcgtgatccttgtcggtaccggcgtcatcgctgtcttcttctgggtcctcctcctcctcatcttctgtaacatgaggaggccggcccacgcagacatcaagacgggctacctgtccatcatcatggaccccggggaggtgcctctggaggagcaatgcgaatacctgtcctacgatgccagccagtgggaattcccccgagagcggctgcacctggggagagtgctcggctacggcgccttcgggaaggtggtggaagcctccgctttcggcatccacaagggcagcagctgtgacaccgtggccgtgaaaatgctgaaagagggcgccacggccagcgagcagcgcgcgctgatgtcggagctcaagatcctcattcacatcggcaaccacctcaacgtggtcaacctcctcggggcgtgcaccaagccgcagggccccctcatggtgatcgtggagttctgcaagtacggcaacctctccaacttcctgcgcgccaagcgggacgccttcagcccctgcgcggagaagtctcccgagcagcgcggacgcttccgcgccatggtggagctcgccaggctggatcggaggcggccggggagcagcgacagggtcctcttcgcgcggttctcgaagaccgagggcggagcgaggcgggcttctccagaccaagaagctgaggacctgtggctgagcccgctgaccatggaagatcttgtctgctacagcttccaggtggccagagggatggagttcctggcttcccgaaagtgcatccacagagacctggctgctcggaacattctgctgtcggaaagcgacgtggtgaagatctgtgactttggccttgcccgggacatctacaaagaccccgactacgtccgcaagggcagtgcccggctgcccctgaagtggatggcccctgaaagcatcttcgacaaggtgtacaccacgcagagtgacgtgtggtcctttggggtgcttctctgggagatcttctctctgggggcctccccgtaccctggggtgcagatcaatgaggagttctgccagcgcgtgagagacggcacaaggatgagggccccggagctggccactcccgccatacgccacatcatgctgaactgctggtccggagaccccaaggcgagacctgcattctcggagctggtggagatcctgggggacctgctccagggcaggggcctgcaagaggaagaggaggtctgcatggccccgcgcagctctcagagctcagaagagggcagcttctcgcaggtgtccaccatggccctacacatcgcccaggctgacgctgaggacagcccgccaagcctgcagcgccacagcctggccgccaggtattacaactgggtgtcctttcccgggtgcctggccagaggggctgagacccgtggttcctccaggatgaagacatttgaggaattccccatgaccccaacgacctacaaaggctctgtggacaaccagacagacagtgggatggtgctggcctcggaggagtttgagcagatagagagcaggcatagacaagaaagcggcttcagctgtaaaggacctggccagaatgtggctgtgaccagggcacaccctgactcccaagggaggcggcggcggcctgagcggggggcccgaggaggccaggtgttttacaacagcgagtatggggagctgtcggagccaagcgaggaggaccactgctccccgtctgcccgcgtgactttcttcacagacaacagctactaagcagcatcggacaagacccccagcacttgggggttcaggcccggcagggcgggcagagggctggaggcccaggctgggaactcatctggttgaactctggtggcacaggagtgtcctcttccctctctgcagacttcccagctaggaagagcaggactccaggcccaaggctcccggaattccgtcaccacgactggccagggcacgctccagctgccccggcccctccccctgagattcagatgtcatttagttcagcatccgcaggtgctggtcccggggccagcacttccatgggaatgtctctttggcgacctcctttcatcacactgggtggtggcctggtccctgttttcccacgaggaatctgtgggtctgggagtcacacagtgttggaggttaaggcatacgagagcagaggtctcccaaacgccctttcctcctcaggcacacagctactctccccacgagggctggctggcctcacccacccctgcacagttgaagggaggggctgtgtttccatctcaaagaaggcatttgcagggtcctcttctgggcctgaccaaacagccaactagcccctggggtggccaccagtatgacagtattatacgctggcaacacagaggcagcccgcacacctgcgagtggcaaactgtcc

SEQ ID NO: 11718 - DNA, 4450 bp, Homo sapiens
acccacgcgcagcggccggagatgcagcggggcgccgcgctgtgcctgcgactgtggctctgcctgggactcctggacggcctggtgagtgactactccatgacccccccgaccttgaacatcacggaggagtcacacgtcatcgacaccggtgacagcctgtccatctcctgcaggggacagcaccccctcgagtgggcttggccaggagctcaggaggcgccagccaccggagacaaggacagcgaggacacgggggtggtgcgagactgcgagggcacagacgccaggccctactgcaaggtgttgctgctgcacgaggtacatgccaacgacacaggcagctacgtctgctactacaagtacatcaaggcacgcatcgagggcaccacggccgccagctcctacgtgttcgtgagagactttgagcagccattcatcaacaagcctgacacgctcttggtcaacaggaaggacgccatgtgggtgccctgtctggtgtccatccccggcctcaatgtcacgctgcgctcgcaaagctcggtgctgtggccagacgggcaggaggtggtgtgggatgaccggcggggcatgctcgtgtccacgccactgctgcacgatgccctgtacctgcagtgcgagaccacctggggagaccaggacttcctttccaaccccttcctggtgcacatcacaggcaacgagctctatgacatccagctgttgcccaggaagtcgctggagctgctggtaggggagaagctggtcctcaactgcaccgtgtgggctgagtttaactcaggtgtcacctttgactgggactacccagggaagcaggcagagcggggtaagtgggtgcccgagcgacgctcccaacagacccacacagaactctccagcatcctgaccatccacaacgtcagccagcacgacctgggctcgtatgtgtgcaaggccaacaacggcatccagcgatttcgggagagcaccgaggtcattgtgcatgaaaatcccttcatcagcgtcgagtggctcaaaggacccatcctggaggccacggcaggagacgagctggtgaagctgcccgtgaagctggcagcgtaccccccgcccgagttccagtggtacaaggatggaaaggcactgtccgggcgccacagtccacatgccctggtgctcaaggaggtgacagaggccagcacaggcacctacaccctcgccctgtggaactccgctgctggcctgaggcgcaacatcagcctggagctggtggtgaatgtgcccccccagatacatgagaaggaggcctcctcccccagcatctactcgcgtcacagccgccaggccctcacctgcacggcctacggggtgcccctgcctctcagcatccagtggcactggcggccctggacaccctgcaagatgtttgcccagcgtagtctccggcggcggcagcagcaagacctcatgccacagtgccgtgactggagggcggtgaccacgcaggatgccgtgaaccccatcgagagcctggacacctggaccgagtttgtggagggaaagaataagactgtgagcaagctggtgatccagaatgccaacgtgtctgccatgtacaagtgtgtggtctccaacaaggtgggccaggatgagcggctcatctacttctatgtgaccaccatccccgacggcttcaccatcgaatccaagccatccgaggagctactagagggccagccggtgctcctgagctgccaagccgacagctacaagtacgagcatctgcgctggtaccgcctcaacctgtccacgctgcacgatgcgcacgggaacccgcttctgctcgactgcaagaacgtgcatctgttcgccacccctctggccgccagcctggaggaggtggcacctggggcgcgccacgccacgctcagcctgagtatcccccgcgtcgcgcccgagcacgagggccactatgtgtgcgaagtgcaagaccggcgcagccatgacaagcactgccacaagaagtacctgtcggtgcaggccctggaagcccctcggctcacgcagaacttgaccgacctcctggtgaacgtgagcgactcgctggagatgcagtgcttggtggccggagcgcacgcgcccagcatcgtgtggtacaaagacgagaggctgctggaggaaaagtctggagtcgacttggcggactccaaccagaagctgagcatccagcgcgtgcgcgaggaggatgcgggaccgtatctgtgcagcgtgtgcagacccaagggctgcgtcaactcctccgccagcgtggccgtggaaggctccgaggataagggcagcatggagatcgtgatccttgtcggtaccggcgtcatcgctgtcttcttctgggtcctcctcctcctcatcttctgtaacatgaggaggccggcccacgcagacatcaagacgggctacctgtccatcatcatggaccccggggaggtgcctctggaggagcaatgcgaatacctgtcctacgatgccagccagtgggaattcccccgagagcggctgcacctggggagagtgctcggctacggcgccttcgggaaggtggtggaagcctccgctttcggcatccacaagggcagcagctgtgacaccgtggccgtgaaaatgctgaaagagggcgccacggccagcgagcagcgcgcgctgatgtcggagctcaagatcctcattcacatcggcaaccacctcaacgtggtcaacctcctcggggcgtgcaccaagccgcagggccccctcatggtgatcgtggagttctgcaagtacggcaacctctccaacttcctgcgcgccaagcgggacgccttcagcccctgcgcggagaagtctcccgagcagcgcggacgcttccgcgccatggtggagctcgccaggctggatcggaggcggccggggagcagcgacagggtcctcttcgcgcggttctcgaagaccgagggcggagcgaggcgggcttctccagaccaagaagctgaggacctgtggctgagcccgctgaccatggaagatcttgtctgctacagcttccaggtggccagagggatggagttcctggcttcccgaaagtgcatccacagagacctggctgctcggaacattctgctgtcggaaagcgacgtggtgaagatctgtgactttggccttgcccgggacatctacaaagaccccgactacgtccgcaagggcagtgcccggctgcccctgaagtggatggcccctgaaagcatcttcgacaaggtgtacaccacgcagagtgacgtgtggtcctttggggtgcttctctgggagatcttctctctgggggcctccccgtaccctggggtgcagatcaatgaggagttctgccagcgcgtgagagacggcacaaggatgagggccccggagctggccactcccgccatacgccacatcatgctgaactgctggtccggagaccccaaggcgagacctgcattctcggacctggtggagatcctgggggacctgctccagggcaggggcctgcaagaggaagaggaggtctgcatggccccgcgcagctctcagagctcagaagagggcagcttctcgcaggtgtccaccatggccctacacatcgcccaggctgacgctgaggacagcccgccaagcctgcagcgccacagcctggccgccaggtattacaactgggtgtcctttcccgggtgcctggccagaggggctgagacccgtggttcctccaggatgaagacatttgaggaattccccatgaccccaacgacctacaaaggctctgtggacaaccagacagacagtgggatggtgctggcctcggaggagtttgagcagatagagagcaggcatagacaagaaagcggcttcaggtagctgaagcagagagagagaaggcagcatacgtcagcattttcttctctgcacttataagaaagatcaaagactttaagactttcgctatttcttctactgctatctactacaaacttcaaagaggaaccaggaggacaagaggagcatgaaagtggacaaggagtgtgaccactgaagcaccacagggaggggttaggcctccggatgactgcgggcaggcctggataatatccagcctcccacaagaagctggtggagcagagtgttccctgactcctccaaggaaagggagacgccctttcatggtctgctgagtaacaggtgccttcccagacactggcgttactgcttgaccaaagagccctcaagcggcccttatgccagcgtgacagagggctcacctcttgccttctaggtcacttctcacaatgtcccttcagcacctgaccctgtgcccgccgattattccttggtaatatgagtaatacatcaaagagtagtattaaaagctaattaatcatgtttataaaaa

SEQ ID NO: 11719 - DNA, 2883 bp, Homo sapiens
tcaccccacgtggttggaggtttccagaagcgctgccgccaccgcatcgcgcagctctttgccgtcggagcgcttgtttgctgcctcgtactcctccatttatccgccatgataagtgccagccgagctgcagcagcccgtctcgtgggcgccgcagcctcccggggccctacggccgcccgccaccaggatagctggaatggccttagtcatgaggcttttagacttgtttcaaggcgggattatgcatcagaagcaatcaagggagcagttgttggtattgatttgggtactaccaactcctgcgtggcagttatggaaggtaaacaagcaaaggtgctggagaatgccgaaggtgccagaaccaccccttcagttgtggcctttacagcagatggtgagcgacttgttggaatgccggccaagcgacaggctgtcaccaacccaaacaatacattttatgctaccaagcgtctcattggccggcgatatgatgatcctgaagtacagaaagacattaaaaatgttccctttaaaattgtccgtgcctccaatggtgatgcctgggttgaggctcatgggaaattgtattctccgagtcagattggagcatttgtgttgatgaagatgaaagagactgcagaaaattacttggggcacacagcaaaaaatgctgtgatcacagtcccagcttatttcaatgactcgcagagacaggccactaaagatgctggccagatatctggactgaatgtgcttcgggtgattaatgagcccacagctgctgctcttgcctatggtctagacaaatcagaagacaaagtcattgctgtatatgatttaggtggtggaacttttgatatttctatcctggaaattcagaaaggagtatttgaggtgaaatccacaaatggggataccttcttaggtggggaagactttgaccaggccttgctacggcacattgtgaaggagttcaagagagagacaggggttgatttgactaaagacaacatggcacttcagagggtacgggaagctgctgaaaaggctaaatgtgaactctcctcatctgtgcagactgacatcaatttgccctatcttacaatggattcttctggacccaagcatttgaatatgaagttgacccgtgctcaatttgaagggattgtcactgatctaatcagaaggactatcgctccatgccaaaaagctatgcaagatgcagaagtcagcaagagtgacataggagaagtgattcttgtgggtggcatgactaggatgcccaaggttcagcagactgtacaggatctttttggcagagccccaagtaaagctgtcaatcctgatgaggctgtggccattggagctgccattcagggaggtgtgttggccggcgatgtcacggatgtgctgctccttgatgtcactcccctgtctctgggtattgaaactctaggaggtgtctttaccaaacttattaataggaataccactattccaaccaagaagagccaggtattctctactgccgctgatggtcaaacgcaagtggaaattaaagtgtgtcagggtgaaagagagatggctggagacaacaaactccttggacagtttactttgattggaattccaccagcccctcgtggagttcctcagattgaagttacatttgacattgatgccaatgggatagtacatgtttctgctaaagataaaggcacaggacgtgagcagcagattgtaatccagtcttctggtggattaagcaaagatgatattgaaaatatggttaaaaatgcagagaaatatgctgaagaagaccggcgaaagaaggaacgagttgaagcagttaatatggctgaaggaatcattcacgacacagaaaccaagatggaagaattcaaggaccaattacctgctgatgagtgcaacaagctgaaagaagagatttccaaaatgagggagctcctggctagaaaagacagcgaaacaggagaaaatattagacaggcagcatcctctcttcagcaggcatcactgaagctgttcgaaatggcatacaaaaagatggcatctgagcgagaaggctctggaagttctggcactggggaacaaaaggaagatcaaaaggaggaaaaacagtaataatagcagaaattttgaagccagaaggacaacatatgaagcttaggagtgaagagacttcctgagcagaaatgggcgaacttcagtctttttactgtgtttttgcagtattctatatataatttccttaatttgtaaatttagtgaccattagctagtgatcatttaatggacagtgattctaacagtataaagttcacaatattctatgtccctagcctgtcatttttcagctgcatgtaaaaggaggtaggatgaattgatcattataaagatttaactattttatgctgaagtgaccatattttcaaggggtgaaaccatctcgcacacagcaatgaaggtagtcatccatagacttgaaatgagaccacatatggggatgagatccttctagttagcctagtactgctgtactggcctgtatgtacatggggtccttcaactgaggccttgcaagtcaagctggctgtgccatgtttgtagatggggcagaggaatctagaacaatgggaaacttagctatttatattaggtacagctattaaaacaaggtaggaatgaggctagacctttaacttccctaaggcatacttttctagctaccttctgccctgtgtctggcacctacatccttgatgattgttctcttacccattctggaatttttttttttttaaataaatacagaaagcatcttgaaaaaaaaaaaaaaaaaaaaaaaaaaaaaaaaaa

SEQ ID NO: 11720 - DNA, 1908 bp, Homo sapiens
gggacgtcagcggacggggcgctcgcgggccggggctgtatggggctcccgcgcgggtcgttcttctgggtgctgctcctgctcacggctgcctgctcggggctcctctttgccctgtacttctcggcggtgcagcggtacccggggccagcggccggagccagggacaccacatcatttgaagcattctttcaatccaaggcatcgaattcttggacaggaaagggccaggcctgccgacacctgcttcacctggccattcagcggcacccccacttccgtggcctgttcaatctctccattccagtgctgctgtggggggacctcttcaccccagcgctctgggaccgcctgagccaacacaaagccccgtatggctggcgggggctctctcaccaagtcatcgcctccaccctgagccttctgaacggctcagagagtgccaagctgtttgccccgcccagggacacccctccaaagtgtatccggtgtgccgtggtgggcaacggaggcattctgaatgggtcccgccagggtcccaacatcgatgcccatgactatgtattcagactcaatggagctgtgatcaaaggcttcgagcgcgatgtgggcaccaagacttccttctatggtttcactgtgaacacgatgaagaactccctcgtctcctactggaatctgggcttcacctccgtgccacaaggacaggacctgcagtatatcttcatcccctcagacatccgcgactatgtgatgctgagatcggccattctgggcgtgcctgtccctgagggcctagataaaggggacaggccgcacgcctattttggaccagaagcctctgccagtaaattcaagctgctacatccggacttcatcagctacctgacagaaaggttcttgaaatcaaagttgattaacacacattttggagacctatatatgcctagtaccggggctctcatgctgctgacagctttgcatacctgtgaccaggtcagtgcctatggattcatcacaagcaactactggaaattttccgaccactatttcgaacgaaaaatgaagccattgatattttatgcaaaccacgatctgtccctggaagctgccctgtggagggacctgcacaaggccggcatccttcagctgtaccagcgctgaccccaatgcactgagcgctttgcttcttcaagagttgcggccctgatcctctcaagtggccaaaagcttttttaacttttcaatcttcaccttcccttgccaacagagggcactggggtgaattcaagattttcatcgaggtctgttcaatataggacaccccagcttgtccttggctcatccaagaactcttctgtatctaaaacaatacatctcaatcttggccaagggaaaatggactgctttgctggattggcactgagcaactttaggaaatgtcggtggagtgttcagcaagatcagacagcagtccaggtcaaaggcaaacacacacgctccagcccaaatcctcctggtggcacatcctaccccagatgctaaagtgattcaaggactccaggacacctcttaagagcctttctaagaacatgataggcttacttctgctccataataaagtgggagaaaaaagccagaatataacttaagactagataactgcgtacatgatggaccattttttttttttttggctgggtagagaaatcatataaaacgcaggctgtttagcatggagatgactctcagaacactgggagggtctggcacttgatgggggttagttgcttggcagcctgcctgccactgagggaagtcccattagagatgtatcaccaccttgtcaccaacaggatgatgtcaccaacaggatgatgtcaccaggtaataaaccttcatcctcac

SEQ ID NO: 11721 - DNA, 1455 bp, Homo sapiens
ggcggtccgcacgcacctcggtaacatcacagcaggtccaggccaatgataaccttataagaggccatgtcgaagcgcgacatcgtcctcaccaatgtcaccgttgtccagttgctgcgacagccgtgcccggtgaccagagcaccgcccccacctgagcctaaggctgaagtagagccccagccacaaccagagcccacaccagtcagggaggaaataaagccaccaccgccaccactgcctcctcaccccgctactcctcctcctaagatggtgtctgtggcccgggagctgactgtgggcatcaatggatttggacgcatcggtcgcctggtcctgcgcgcctgcatggagaagggtgttaaggtggtggctgtgaatgatccattcattgacccggaatacatggtgtacatgtttaagtatgactccacccacggccgatacaagggaagtgtggaattcaggaatggacaactggtcgtggacaaccatgagatctctgtctaccagtgcaaagagcccaaacagatcccctggagggctgtcgggagcccctacgtggtggagtccacaggcgtgtacctctccatacaggcagcttcggaccacatctctgcaggtgctcaacgtgtggtcatctccgcgccctcaccggatgcaccaatgttcgtcatgggtgtcaatgaaaatgactataaccctggctccatgaacattgtgagcaacgcgtcctgcaccaccaactgtttggctcccctcgccaaagtcatccacgagcgatttgggatcgtggaagggttgatgaccacagtccattcctacacggccacccagaagacagtggacgggccatcaaggaaggcctggcgagatgggcggggtgcccaccagaacatcatcccagcctccactggggctgcgaaagctgtgaccaaagtcatcccagagctcaaagggaagctgacagggatggcgttccgggtaccaaccccggatgtgtctgtcgtggacctgacctgccgcctcgcccagcctgccccctactcagccatcaaggaggctgtaaaagcagcagccaaggggcccatggctggcatccttgcctacaccgaggatgaggtcgtctctacggacttcctcggtgatacccactcgtccatcttcgatgctaaggccggcattgcgctcaatgacaatttcgtgaagctcatttcatggtacgacaacgaatatggctacagtcaccgggtggtcgacctcctccgctacatgttcagccgagacaagtgaaacgggaaggtcctttctttccttcccaggggccggggccggaacatgtgcctcccgttccagcatctggctgcccgggggaggaaggacacccggggcgggcgccccacgccgatgggtccatggtgaaataaaaaacagtgctcgaaaaaaaaaaaaaaa

SEQ ID NO: 11722 - DNA, 1726 bp, Homo sapiens
gctaccgaggggctgtgggcgcgcagctggaacctccggctgtcagtgcgcttacagttcctaaccccgaccctgcgcgcagcccgcactatggcagccccgccgcagctaagggctctgctcgtagtcgtcaacgcactgctgcgcaagcgccgctaccacgctgcgttggccgtgcttaagggcttccggaacggggctgtctatggagccaaaatccgggcccctcacgcgctggtcatgacctttctcttccggaatggcagcctccaggagaagctgtgggccatactgcaggccacatatatccactcctggaacctggcacggtttgtgttcacctacaagggtctccgtgccctgcagtcctacatacaaggcaagacctacccagcacacgcattcctggcggccttcctcgggggtatcctggtgtttggagaaaacaataacatcaacagccagatcaacatgtacctgttgtcacgcgtcctgtttgccctgagccgcctggctgtagagaagggctacatccctgaacccaggtgggacccgttcccgctgctcactgcggtggtgtgggggctggtgctgtggctctttgagtatcaccgatccaccctgcagccctcgctgcagtcctccatgacctacctctatgaggacagcaatgtatggcacgacatctcagacttcctcgtctataacaagagccgtccctccaattaatgcagccctgaggtgtctggctgtggctcaagatttggccccatgcagaccctcccaaaggatactgccttctcaagatcataggcctcagactccaactggtgttatcccagggttccgtttgctgaagtaaaaacactgattttaaaatcccagtgggtacctttgtatggtggcacaagtggccgaatcaggctgaggaatctacggcttggttccagctgtgcagctgacttctgtgagactggggccagccacactactctctaggcctcaggggtcaaggagctcagaggagggccctgaggtctctttccggtgggtatgttcattcttcaactgttcttatgtcacagagggctccttgctggtgggcagtgggttgtaaatactttttaaaaaacactaagttccttatctcagatgctgttctactggagaagttctagattcccactgtccaatagaaacacgtgagccatatatgtaattaaaatgtttctagtagctgcattacaaaaaagaagcctgggcactgtggctcactcctgtaatctcagaactttgggaggctgaggcaggtggatcacttgagctcaggagcttgagaccagcctgggcaacatggtgaaacccagtttctacaaaaaatacaaaaaattagccgggttccatcacctgtggttccagctgaggtgggaggatcacttgagcctatgaggtcgaggctacagtgagcaaagatcacgccactgcactccagcctgggcgacagtgagaccctgtctcaccaaagaaaaaaaaaaggtgagattaatcttcactatatattttaacacaaatttctaaaagttatttcaacatataattaacatcattagatattttgtactcttttttgtattaagtattcaaaattgggtgtatattttgccacccacattttcaggacccagtagccacatgtggctagtggctgctgtgacgggcaacacag

SEQ ID NO: 11723 - DNA, 1431 bp, Homo sapiens
ggcgggtctgcttctaaaagaagaagtagagaagataaatcctgtcttcaatacctggaaggaaaaacaaaataacctcaactccgttttgaaaaaaacattccaagaactttcatcagagattttacttagatgatttacacaatgaagaaagtacatgcactttgggcttctgtatgcctgctgcttaatcttgcccctgcccctcttaatgctgattctgaggaagatgaagaacacacaattatcacagatacggagttgccaccactgaaacttatgcattcattttgtgcattcaaggcggatgatggcccatgtaaagcaatcatgaaaagatttttcttcaatattttcactcgacagtgcgaagaatttatatatgggggatgtgaaggaaatcagaatcgatttgaaagtctggaagagtgcaaaaaaatgtgtacaagagataatgcaaacaggattataaagacaacattgcaacaagaaaagccagatttctgctttttggaagaagatcctggaatatgtcgaggttatattaccaggtatttttataacaatcagacaaaacagtgtgaacgtttcaagtatggtggatgcctgggcaatatgaacaattttgagacactggaagaatgcaagaacatttgtgaagatggtccgaatggtttccaggtggataattatggaacccagctcaatgctgtgaataactccctgactccgcaatcaaccaaggttcccagcctttttgaatttcacggtccctcatggtgtctcactccagcagacagaggattgtgtcgtgccaatgagaacagattctactacaattcagtcattgggaaatgccgcccatttaagtacagtggatgtgggggaaatgaaaacaattttacttccaaacaagaatgtctgagggcatgtaaaaaaggtttcatccaaagaatatcaaaaggaggcctaattaaaaccaaaagaaaaagaaagaagcagagagtgaaaatagcatatgaagaaatttttgttaaaaatatgtgaatttgttatagcaatgtaacattaattctactaaatattttatatgaaatgtttcactatgattttctatttttcttctaaaatcgttttaattaatatgttcattaaattttctatgcttattgtacttgttatcaacacgtttgtatcagagttgcttttctaatcttgttaaattgcttattctaggtctgtaatttattaactggctactgggaaattacttattttctggatctatctgtattttcatttaactacaaattatcatactaccggctacatcaaatcagtcctttgattccatttggtgaccatctgtttgagaatatgatcatgtaaatgattatctcctttatagcctgtaaccagattaagcccccc

SEQ ID NO: 11724 - DNA, 7650 bp, Homo sapiens
cggaccctgcgcgcccccgtcccggctcccggccggctcgggggagaaggcgcccgaggggaggcgccggacagatcgcgtttcggaggcggcgcaggtgctgtaaactgcaaaccataatcctgtcttaatactgcaaacaaatcatagtggaactaaggggaacttaatttactgtttccaggttaactaaggtctcagctgtaaaccaaaagtgagaggagacattaagattttcattcttaccgggttgtcttcttcctgaagagcaatggagccgcttttacttggaagaggactaatcgtatatctaatgttcctcctgttaaaattctcaaaagcaattgaaataccatcttcagttcaacaggttccaacaatcataaaacagtcaaaagtccaagttgcctttcccttcgatgagtattttcaaattgaatgtgaagctaaaggaaatccagaaccaacattttcgtggactaaggatggcaaccctttttatttcactgaccatcggataattccatcgaacaattcaggaacattcaggatcccaaacgaggggcacatatctcactttcaagggaaataccgctgctttgcttcaaataaactgggaatcgctatgtcagaagaaatagaatttatagttccaagtgttccaaaattcccaaaagaaaaaattgaccctcttgaagtggaggagggagatccaattgtcctcccatgcaatcctcccaaaggcctcccacctttacacatttattggatgaatattgaattagaacacatcgaacaagatgaaagagtatacatgagccaaaagggagatctatacttcgcaaacgtggaagaaaaggacagtcgcaatgactactgttgctttgctgcatttccaagattaaggactattgtacagaaaatgccaatgaaactaacagttaacagtttaaagcatgctaatgactcaagttcatccacagaaattggttccaaggcaaattccatcaagcaaagaaaacccaaactgctgttgcctcccactgagagtggcagtgagtcttcaattaccatcctcaaaggggaaatcttgctgcttgagtgttttgctgaaggcttgccaactccacaggttgattggaacaaaattggtggtgacttaccaaaggggagagaaacaaaagaaaattatggcaagactttgaagatagagaatgtctcctaccaggacaaaggaaattatcgctgcacagccagcaatttcttgggaacagccactcacgattttcacgttatagtagaagagcctcctcgctggacaaagaagcctcagagtgctgtgtatagcaccggaagcaatggcatcttgttatgtgaggctgaaggagaacctcaacccacaatcaagtggagagtcaatggctccccagttgacaatcatccatttgctggtgatgttgtcttccccagggaaatcagttttaccaaccttcaaccaaatcatactgctgtgtaccagtgtgaagcctcaaatgtccatggaactatccttgccaatgccaatattgatgttgtggatgtccgtccattgatacaaaccaaagatggagaaaattacgctacagtggttgggtacagtgctttcttacattgcgagttctttgcttcacctgaggcagtcgtgtcctggcagaaggtggaagaagtgaaacccctggagggcaggcggtatcatatctatgaaaatggcacattgcagatcaacagaaccaccgaagaagatgctgggtcttactcatgttgggtagaaaatgctataggaaaaactgcagtcacagccaatttggatattagaaatgctacaaaacttagagtttctcctaagaatcctcgtatccccaaattgcatatgcttgaattacattgtgaaagcaaatgtgactcacatttgaaacacagtttgaagttgtcctggagtaaagatggagaagcctttgaaattaatggcacagaagatggcaggataattattgatggagctaatttgaccatatctaatgtaactttagaggaccaaggtatttactgctgttcagctcatactgctctagacagtgctgccgatataactcaagtaactgttcttgatgttccggatccaccagaaaaccttcacttgtctgaaagacagaacaggagtgttcggctgacctgggaagctggagctgaccacaacagcaatattagcgagtatattgttgaatttgaaggaaacaaagaagagcctggaaggtgggaggaactgaccagagtccaaggaaagaaaaccacagttatcttacctttggctccatttgtgagataccagttcagggtcatagccgtgaacgaagtagggagaagtcagcctagccagccgtcagaccatcatgaaacaccaccagcagctccagataggaatccacaaaacataagggttcaagcctctcaacccaaggaaatgattataaagtgggagcctttgaaatccatggagcagaatggaccaggcctagagtacagagtgacctggaagccacagggagccccagtggagtgggaagaagaaacagtcacaaaccacacattgcgggtgatgacgcctgctgtctatgccccttatgatgtcaaggtccaggctatcaatcaactaggatctgggcctgaccctcagtcagtgactctctattctggagaagactatcctgatacagctccagtgatccatggggtggacgttataaacagtacattagttaaagttacctggtcaacagttccaaaggacagagtacatggacgtctgaaaggctatcagataaattggtggaaaacaaaaagtctgttggatggaagaacacatcccaaagaagtgaacattctaagattttcaggacaaagaaactctggaatggttccttccttagatgcctttagtgaatttcatttaacagtcttagcctataactctaaaggagctggtcctgaaagtgagccttatatatttcaaacaccagaaggagtacctgaacagccaacttttctaaaggtcatcaaagttgataaagacactgccactttatcttggggactacctaagaaattaaatggaaacttaactggctatcttttgcaatatcagataataaatgacacctacgagattggagaattaaatgatattaacattacaactccatcaaagcccagctggcacctctcaaacctgaatgcaactaccaagtacaaattctacttgagggcttgcacttcacagggctgtggaaaaccgatcacggaggaaagctccaccttaggagaagggagtaaaggtatcgggaagatatcaggagtaaatcttactcaaaagactcacccaatagaggtatttgagccgggagctgaacatatagttcgcctaatgactaagaattggggcgataatgatagcatttttcaagatgtaattgagacaagagggagagaatatgctggtttatatgatgacatctccactcaaggctggtttattggactgatgtgtgcgattgctcttctcacactactattattaactgtttgctttgtgaagaggaatagaggtggaaagtactcagttaaagaaaaggaagatttgcatccagacccagaaattcagtcagtaaaagatgaaacctttggtgaatacagtgacagtgatgaaaagcctctcaaaggaagccttcggtcccttaatagggatatgcagcctactgaaagtgctgacagcttagtcgaatacggagagggagaccatggtctcttcagtgaagatggatcatttattggtgcctacgctggatctaaggagaagggatctgttgaaagcaatggaagttctacagcaacttttccccttcgggcataaacacaacatatgtaagcaacgctactggttcaccccaaccttccatatttatctgttcaaaggagcaagaactttcatataggaatagaaacatgctggccgaagatttcatccagaagtcaacatcctgcaattatgttgaaaagagtagtactttcttcaaaatataaaatgccaagcacttcaggcctatgttttgcttatattgttttcaggtgctcaaaatgcaaaacacaaaacaaatcctgcatttagatacacctcaactaaatccaaagtccccattcagtatattccatatttgcctgattttactattcggtgtgtttgcatagatgttgctacttggtgggtttttctccgtatgcacattggtatacagtctctgagaactggcttggtgactttgcttcactacaggttaaaagaccataagcaaactggttatttaaaatgtaaaaaggaatatgaaagtcttattaaaacacttcattgaaaatatacagtctaaatttattatttaaattttactagcaaaagtcttaggtgaacaatcaactagtatttgttgagctcctatttgcccagagatggtcatatttaaacagaagtatacgtttttcagtttcaacatgaatttttttatttctgtcagttatgacatccacaagcatcactttttgtgtctgttttttttttttttcttggactaaattcaactgcatggaagcggtggtcagaaggttgttttatacgagaacaggcagaaagtgcccattgttcaggattctaatagctacatctacttaatatcttcatttctaaattgactgcttttacctttttctcatgtttatataatggtatgcttgcatatatttcatgaatacattgtacatattatgttaatatttacacaatttaaaatatagatgtgttttattttgaagtgagaaaatgaacattaacaggcatgtttgtacagctagaatatattagtaagatactgtttttcgtcattccagagctacaactaataacacgaggttccaaagctgaagactttgtataaagtatttgggttttgttcttgtattgctttctttcaacagtttcaaaataaaatatcatataaatattgagggaaatgttttcatatttttcaaaataggtttttattgttgaatgtacatctaccccagcccctcaaaagaaaaactgtttacatagaaattcctacacatacgtttgcgtatatgttattttaaacatctttgtggtgagaattttttccccgatattctccttctgtcaaagtcagaacaaattcagggaatttattttctggcagttgtgctccagtccttttaaaattgtacatgaacatgttttagaaacaatatggaggatgatgcatacatgtcggtcaagttcagcgctcgacattttatggaaagatttttttaaccttaccacgaaatacttaactactgtttaagtgaattgacttatttcactttagtttttgaactgtgattattggtatactgttatatcctcaacttggatttatggtaaccccttatagttcatggagaccaaaatttggggtatttataatagtcagcgcaggaatgcacatggaatatctacttgtccttttgaacctcacgagtcatccagaatgtatagacaggaaaagcatgtcttatttaaaactgtaatttatgggctcaggatctgaccgcagtcccgggagtaagcatttcaaagggggaaggcagtgtggtccctaccctgtgtgaatgtgaggatgtagacatccatcagtgcaactcgagctccatcctcctccgatttctaaggttccagttttctggagggacagtcatcatgttttgatttatctgggagaaaactgtggtgcacagcttgtgaggagggcaaggttgtgacgttcgagcttagttctggtgttattctgtctcctcttctttgtcatcagccaaaacgtggtttttaaagagagtcatgcaggttagaaataatgtcaaaaatatttaggaatttaataacctttaagtcagaaactaaaacaaatactgaaatattagctcttcctacacttcgtgttcccctttagctgcctgaaaatcaagattgctcctgctcagatcttctgagtggctaaaacttatggatatgaaaaatgagattgaatgatgactatgctttgctatcattgttacctttcctcaatactatttggcaactactgggactcttcagcacaaaaggaatagatctatgattgaccctgattttaattgtgaaattatatgattcatatattttatgaatcagaataaccttcaaataaaataaatctaagtcggttaaaatggatttcatgattttccctcagaaaatgagtaacagagtccacggcgtgcaatggtaattataaattggtgatgcttgtttgcaaattgcccactcgtgataagtcaacagccaatatttaaaactttgttcgttactggctttaccctaactttctctagtctactgtcaatatcattttaatgtaattgattgtatatagtctcaagaatggttggtgggcatgagttcctagagaactgtccaagggttgggaaaatccaaattctcttcctggttccagcactgattttgtacataaacattaggcaggttgcttaacctttttatttcaaactctctcaactctaaagtgctaataataatctcagttaccttatctttgtcacagggtgttcttttttatgaagaaaaatttgaaaatgataaaagctaagatgccttctaacttcataagcaaacctttaactaattatgtatctgaaagtcacccccacataccaactcaacttttttcctgtgaacacataaatatatttttatagaaaaacaaatctacataaaataaatctactgtttagtgagcagtatgatttgtacatgccattgaaaattattaatcagaagaaaattaagcagggtctttgctatacaaaagtgttttccactaattttgcatgcgtatttataagaaaaatgtgaatttggtggttttattctatcggtataaaggcattgatattttagatgcacccgtgtttgtaaaaatgtagagcacaatggaattatgctggaagtctcaaataatatttttttcctattttatactcatggaagagataagctaaagaggggacaataatgagaaatgttggtgtgcttttctaagcatttaaaacataattgccaattgaaaccctaaatatgtttacataccattaagatatgattcatgtaacaatgttaaattaattataatgggattgggtttgttatctgtggtagtatatatcctagtgttcctatagtgaaataagtagggttcagccaaagctttctttgttttgtaccttaaattgttcgattacgtcatcaaaagagatgaaaggtatgtagaacaggttcacgtgattacctttttcttttggcttggattaatattcatagtagaactttataaaacgtgtttgtattgtaggtggtgtttgtattatgcttatgactatgtatggtttgaaaatattttcattatacatgaaattcaactttccaaataaaagttctacttcatgtaatccaaa

SEQ ID NO: 11725 - DNA, 2798 bp, Homo sapiens
agtagggaagtagctatggcagtgcctgatacaaaataaactccaaatgtgtatttattagatggttggatggaagttatttgcgtgtgaaagcgcgttttacccgaaggcgctctgtgagggccagcgggtccccttcggccctggagccggggtcacacgctccccaccgcgtgcggtcacgagacgcccccaagggagtatcctggtacccggaagccgcgactcctggccctgagcccgggcttagccttcgggtccacgtggccggaggccggcagctgattggacgcgggccgccccaccccctggccgtcgcgggacccgcaggactgagaccatggaggcggtggcggtggccgcggcggtgggggtccttctcctggccggggccgggggcgcggcaggcgacgaggcccgggaggcggcggccgtgcgggcgctcgtggcccggctgctggggccaggccccgcggccgacttctccgtgtcggtggagcgcgctctggctgccaagccgggcttggacacctacagcctgggcggcggcggcgcggcgcgcgtgcgggtgcgcggctccacgggcgtggcggccgccgcggggctgcaccgctacctgcgcgacttctgtggctgccacgtggcctggtccggctctcagctgcgcctgccgcggccactgccagccgtgccgggggagctgaccgaggccacgcccaacaggtaccgctattaccagaatgtgtgcacgcaaagctactctttcgtgtggtgggactgggcccgctgggagcgagagatagactggatggcgctgaatggcatcaacctggcactggcctggagcggccaggaggccatctggcagcgggtgtacctggccttgggcctgacccaggcagagatcaatgagttctttactggtcctgccttcctggcctgggggcgaatgggcaacctgcacacctgggatggccccctgcccccctcctggcacatcaagcagctttacctgcagcaccgggtcctggaccagatgcgctccttcggcatgaccccagtgctgcctgcattcgcggggcatgttcccgaggctgtcaccagggtgttccctcaggtcaatgtcacgaagatgggcagttggggccactttaactgttcctactcctgctccttccttctggctccggaagaccccatattccccatcatcgggagcctcttcctgcgagagctgatcaaagagtttggcacagaccacatctatggggccgacactttcaatgagatgcagccaccttcctcagagccctcctaccttgccgcagccaccactgccgtctatgaggccatgactgcagtggatactgaggctgtgtggctgctccaaggctggctcttccagcaccagccgcagttctgggggcccgcccagatcagggctgtgctgggagctgtgccccgtggccgcctcctggttctggacctgtttgctgagagccagcctgtgtatacccgcactgcctccttccagggccagcccttcatctggtgcatgctgcacaactttgggggaaaccatggtctttttggagccctagaggctgtgaacggaggcccagaagctgcccgcctcttccccaactccaccatggtaggcacgggcatggcccccgagggcatcagccagaacgaagtggtctattccctcatggctgagctgggctggcgaaaggacccagtgccagatttggcagcctgggtgaccagctttgccgcccggcggtatggggtctcccacccggacgcaggggcagcgtggaggctactgctccggagtgtgtacaactgctccggggaggcctgcaggggccacaatcgtagcccgctggtcaggcggccgtccctacagatgaataccagcatctggtacaaccgatctgatgtgtttgaggcctggcggctgctgctcacatctgctccctccctggccaccagccccgccttccgctacgacctgctggacctcactcggcaggcagtgcaggagctggtcagcttgtactatgaggaggcaagaagcgcctacctgagcaaggagctggcctccctgttgagggctggaggcgtcctggcctatgagctgctgccggcactggacgaggtgctggctagtgacagccgcttcttgctgggcagctggctagagcaggcccgagcagcggcagtcagtgaggccgaggccgatttctacgagcagaacagccgctaccagctgaccttgtgggggccagaaggcaacatcctggactatgccaacaagcagctggcggggttggtggccaactactacacccctcgctggcggcttttcctggaggcgctggttgacagtgtggcccagggcatccctttccaacagcaccagtttgacaaaaatgtcttccaactggagcaggccttcgttctcagcaagcagaggtaccccagccagccgcgaggagacactgtggacctggccaagaagatcttcctcaaatattacccccgctgggtggccggctcttggtgatagattcgccaccactgggccttgttttccgctaattccagggcagattccagggcccagagctggacagacatcacaggataacccaggcctgggaggaggccccacggcctgctggtggggtctgacctggggggattggagggaaatgacctgccctccaccaccacccaaagtgtgggattaaagtactgttttctttccacttaaaaaaaaaaaaaaaaaa
